United States Patent Application Publication US 2014/0057251 A1 - sequence listing, part 119

SEQ ID NO: 220563 - DNA, 4724 bp, Cannabis indica
caaatctcataagctaccattcactagatccactacacaatacaatgcacctcttgaacttttgcattctgatttagtcgggggcctgctcccataaactcatctagtgggtacatatattatattagctttgttcatgcttactctagatacaattggatctatctcttaagaacaaaagatgacggcccttaccaacttttaccaagtttaaactcagattgagttacaattagggaccaaatacaaaacactacagtttgactgggggggtgagtttagatccttcaccacattgctagaaaacttaggtatagttcataaactagcctgccctcatacacatgaacaaaatggagtggttgggcgtaaacgtagacatatagtagaaaccggcctaactctacttgctcaggcttctcaccctttaaaataatgggttgaggcattttgaactgccacatatcttataaatcgaatgcctactccagtgttacacaatgaccacaccacttagagacactctttcacactcaaccaaattattccatgcttaaagtttttggttgcttgtgctaccccaacttacggccatataataaaaacgagttgcaatatcgatccactccatgtgtttttctagggtacaacatgtcacacaaagggtataaatgtaatgtcaaaagacaagagagtctacatctctcgagatgtaatttttgattgaaaacaattttccctattatcactctactcacttgtcaaacatcactgttcagcagcctatatctactccctcaggacaaccacctctgtccacttttctacatgtgtcttctcctatacatagcccaaattctgtcaacaatactgctcctctgtctgcctcaccaacttccaatctacagtcgggttctagcaacccaaacaccacacctatcaacagtgtccacactcaaagtcctgctactaatacagttacgatagctgttactacagtctcatctcctttagttacagccacaccacacattacttctacatccaacccatctgctactgaccatccaacaactccaccagtatcaacctccactcatcccatgaccacaaggttaaaagcaggaataaggaaacccaaatctctcttagctgtttgtgaaccaaaaactgtcaaagcagctcttcaagaaccacactggcacaatgctatgaacactgaagttgtgcctttgaaaaagaacaacatatgggtggtagttcctagaccagcaaataaagttccaattggccgcaagtgggtcctttgagttaaactcaatactgatggaagtcttgatagatataaggcaagattagtggcaaagggatatcatcagcaagctggttataattttcaagaaacttttagcctagtggtaaaagcagttacaattcgggtggctctaactgttgcaacacttttgcccttaaagatcttgactttgttgattatttcttgaggatacaagttaccaggtctaatgaaggaattttaatgacacaaaccaagtagctccaagacatactctacaaggctgacatgcacaatgtcaacactcaaaacactccaatgaacagtggccttaagctctcaaactatggaagtgaaccagtaaaagaccctacactctatcaatcaatagtaggtgctttgcaatatgccacagtaactagacctgagattgcgtttgcagtgaacaaggtctgtcaatttatgcacaaacctcttcaatctcactggatggctgtaaaacgtatactgcggtatatttccgggacacttgactatggtctttggatcaaaccaacactagatttctctcttgatgttttttgtgatgcggattgggctgctgacccagatgacaggaggtctacaacagggtattgcatctattttgtgggaaatttggtctcttggaaatctaaaaaacaagtcactataagtcaatcctccactgaagctgagtttcgaagcttggcaagtgctatcacagaagttacttggctgcaatctctactcaaagagcttaatatatcttcaccaaatattccctctgtttggtgtgataatcaaagcacgattatgctcactgccaacccagtgctttatgctcgaacaaagcacatcgagcttgatctatactttgttagagacaaagtgttacaacagaaaatacaggtcaaacatgtcccagctcaagctcaaattgtcgactgtcttacaaaatctatatctagctcgagattcaatgagatacgatccaaactcagtgttgaatcaaagtccacactgagtttgaggggggatgtcaaggatgataagtagtttgttctgttagttagttgtaactaactccaactgtcatgactctctttactgtattctgttacaagttgttgtgttctgttttctgtatacttgctatgtatataagccttgtacagtttgatcatcattgaataagacagttattctcttttgttatcttcttcttcctttcttgattgcattatcacactcaacaacgtttgtgcttgagaactaaaaagtgagagctttttacaatagggtgaaacctttttacatacagtcgaaagttcacccataggctagactagcaaatgcccacaattaattaattgtatttaccatctaatgaggggtttacatttgaataataaaatttacacaataatttacctagttggtgaggcccaattgagatggtaggtgaggttgatgtgacttgtcttctgtcgtgataggtgcaagagcatgctaccactttttacaatggaaaggtatttgtcagtgtattgggtatgtgtatccccatgtttactttgatttcctaaaggttgcacctttgctaaaggtctcactttttcctgatgtacgaagggggcaagctacagtgtccttctactttagttaagtgtatcgaccacgtttttcgtccacgtgtcaagcaattatttggggccaacttctcttggacttcccaagaggcaataatgtccaaagaggaacgtttccccagggtccgtccagtcgtcgtttgtgaagtctttcctggacttcctttgtgtacacaccttgcggacatcacagttaagcatcacgtcatcattgacattctctcaaggtaattacataacatactaaatagtaatagtgaggaaatttttcttgaatatacaaaataatggtaattcttcaatattaagagaattaatggtgattttttaatttaaaaagaaccgagctcatttatccttaagatcgaggggaaattatttcaataagggctcgtttgaaacgtcgtattaggtcgtattgtattgtattatattgaattatattttatacaatatttttatgaaaaactatatgtggtattaactttttagacacctaaatatataatatattaatataaattaaagtttagcatagtattatataaaaatataatatataatccaatacaatacgacctaatagaacattccaaacgagccctaaaggtattgccacaccactctactatagttactgtagtagtgtttggtttgataatggtatgggcttttagccttgctttcggttgggtgatcggtgaaaaatcaatttacttatggcacttctaagtggttagcatggttacctattattgtgttcaaatttaggggattctcaaattgttattagccatatggcttctgattcattttctttagattgttctttatattgttggtcgtgttatttccttttattcttgtttgaataatatagttatcattgcccaatattcttttgtgacatctttagctgatagtcattgatatgtttgatttgtcgttagttcactcaagttaaaaatttaatatttttcacacttttttaatactttaaagttgagggcttagtggttctttcattagagatactattgggatttcttttttttattattgtaaacgacttggttggcttattattattttgttaagtccactcgttgaacgatatcatcatgtaataaatattgttcgatttacctattaataaatattttagtttttctttcaaaaaaaacaaagagtgagaaattaaaaatcaaaataaaagtatatgttgaaattaataatgaaaaagcaataataattaattcatagaatcaatccattaatcccttcctaatctaaagttacatctcatctaaaaatcctagccaagtatctaaaactaaaatattcactaaacacattaactctctattaaaaaaaatatttattaattctctgatccaattcttcattcaggtcgaatctacgattttcagctcaccagcagatagcacaaataaaaacaatttcggagctacattattatttacatatcgacctaaatttaattattttttatgtgttttatgattgtttcgcaaaaaatttaattaaacaaaatataataaaaataaataaattctacctataattttacgtttataaatttacaatttagaggaattccaatccatgtgggaatttatttagttggtaaatagttaattaacgtcctatagactatagagtagaaaattatcttacttcaccaaaggcaaatcgtttatagaaaataggtcatacattttccttcttttttttttttt

SEQ ID NO: 220564 - DNA, 2012 bp, Cannabis indica
aagcctccaaggaagtaacatggtgatggaaatcctacatgaaagcaacatgcagaaaggaaaagtaacaatattttcaaacaatcaatcaaccattcacttgagcaaaaacccaatctaccatgaaagattcaaacacattgacataacgatgttttggatcagggacaagatagaagctagaaagatcgagctagaaaaggtacctatggaagagaaccctgttgatgtaggaactaaagtgttgccagtgaacaagtttaaacattgtttggacttgctcaacatttgatctgttgaaaaactcaggttcactcccccaagagcaagctatctttaaatttttatggattaaggtgaaatttttggtaagtaatccataaaaaattaagattgtaaacaaacttccattttagttaagaaattcagttaggaagttaattaaaaggttgttagtttgagtgagtgagaaggaagttagttagcttgatagcttaattaatgtatatatatatatatatatgtaaattcttatactttgaagagtgtgaaaaagaattagagttagagagagaaacacattgagttatatatatagagagtccaagaatagagagagattgaagaggaagaactatggtgttcatggtgtctcaagtagctcaagcatggtgttttgagagtctatttctctctgttttattctcatattataactcactcatttggtgtttgtaaacaatcttgcatagtggagaaacttcttgggggagagctagattaggactcacattaagatccaaactagaataaactttgtgtcttttctcttttattttccttcatgtttcattgttgttcattatttgtttgatcttctttttgttttaagttttgatgctttgtttttttgatttggttgagtctatgttgtagatttacaacagtgctactagggaataacaaggcatgcaaagtttaagaaattagatcactttatgcgtgatgggatcactagtgaaatcgaatatgtcatgtatgttcttgaattgagaagaaatttaatttttattggatttcttgctcaaaatggttgtgtaatcaaaattgaaaaagactcaatgaaggtactcaagggtgctatgacggtgacgaaaggagaatttcgaactctattttctagttggggagtccatcacattcacaggtgttgtagcaatagcctcaagtgtgaaagaatttgatgctacaaatcttgtaatttttctaaattttgtaaaattgtattacattttaagtaataatttatttagagaaagaattggcattactagaaatgacttggatgaactttatttctgaacttatccttcatggaactatgaagtaaaatattgaagctatgtccaaaggggccaaagatgacataaaagaattaattaaaaatgggtagccaaaattaatagaaatggaagaaaataaaattatgacatgaaagaataggaataacaccaatgcagattttgcttcgacttgttttgtacaaaattgaaggaccaccaattcccaaaaaagctcctcctatgccatctccatctacctcaaaatttatgagattacaactgcaagtgttcaaaactacaataatctttctacaaataagccgcaaaggagaaaacaacgccaatcatcaccacaagtctcatgaaagcacttctgtgaaagtagtctgcaggagaatctgaactagttgaattgaacgacggcatggtaacatttaccagggtaccattcatccccaaactgagaattgacaaatgaattacactgagttaataatgagactaaatgacaggttttctaaaaaatctttttgtttgcaaatttaccaaatagtttaacacattgcttttcccaaagctataccaaatctttttgtcggacaagtggtgtataaaagaaaatagaagagctataccttccagtaaatacgcaggaaccatgacctgcac

SEQ ID NO: 220565 - DNA, 2046 bp, Cannabis indica
agagaacttttatttttaagcacgcacaattacaaatggagaattagagttcaagatagctcaacgataactaaaaataactgaaagttacaaacattctaactaactctaacaacttgaaacaactaataaacttatttctatattagcttacatcccccacaaatgaaaagtgattgaagctatttgatgtttgcctttgagatatagaaaatagtctgttgaaagggatttagttagaacatcaaccacttgatcaattgaaggagcaaatttaacagagttttgtccaaaatttgatctctcacaaagtgaagatctatttcaagtgcttggaacgggcatggaagactggattcgcagctagtacaactgcaatttgattgccaacccaaatgataggtgcttttggaagagaaacatggagtccatttagtaaatacaccaaccatttaagttcagcatctaaatttgcttgtaatagaccttactaccacttgttgcttttcggcagaccaaaatatgagatttccaccaagaaaaacaacataaccactagtaaatctcctgtcatctacacaactggcccaatttacatcataataagcatataattgtaaagtattagctggtttgagcaaaagcaaaccaaaagaccatctgaaagtgtgcccttaagatatagaagcagcctcttacaagcttcccaatgaacctctattggagcatgaataaattgacttagtttgttgataatgaaagcaacatccattctagtaattgtcaaataataaagagaacctaaagtgcatatgtgtagagtagtgtcctaaaatggagctccttcagttaaggacagtttttgagcagagctggtggggtttggacaaattttggcacccccaaaatgtaacttgacaattagattaactatttatttactttgagacaagtacatcccattggaatctgtatatatctcaacaccaagaaagtaatgcacaggtctgaggtccttcaaagaaaaataattattcaaatatttaataagcttggagataagttgggagttaggatcatttattagtatatcatcaactagaaaaaaatagagaagtatctgatctagagattgtgaaaccctaatcaattaaagtctatttgagcttctcattccaatctctttgtgctttcttaagcccatatagagctttataaagatgacacacgtgtgggattcttaggatcaacaaagccttgaggtttatgcatatagacaatttttttgaagttggccgttcagaaaagcattactaacatccagttatttgacctgccagttaaaggtatcaacaagggagagaactgtgtgaactgttgtaggcttcactacaggactaaatgcttcagcataatcaaatccagatgtttgtagatagccctttgcaactagcctcaatttatatttatctgaggtaccatcaacatttaacttgattatgtacacccatttgttgttaataacagccatatacacatgtaatcaatgataacagcgggaaccgtattaattgtaaaactacactttggaatgtcagtcaccaatatgaaagatccaatcctgattgagcaaggacaatgagaccaattttctgtgatgtgtctatgctttcattctactcttccattttgttcatgatcataagaccatggatgagtaaatttaattccttaatcctttaaaaatctaacaaaagacctatattccctcaccttagtagcttggactccttttacaggtagattgaattatttttcaaccatatttttgtatttaatgaacgcatcaaaggtctgagatttaagagtgagaggaaatatccaagtatatcgactgtaatcatccatgaaatgcacataatacttgaatccttcttgagataaaacataagagggaccccaaaaatccgtatgaattaattcaaggggtcgggaagcacaatttgtggatgaggaatgtggttgtttgtgttggaattattttac

SEQ ID NO: 220566 - DNA, 1816 bp, Cannabis indica
acgcaataggtgaaaaaaagtatttgcagcaagttatgcgtcatttaagaatcgacagtataaattttttgtgtcagttttgcaatatggcacaacccttttcatgtcactttcaaactgacacaaaatgttataaataaattttatattttgcatcgatttcaaaatgacaaaaaattttttttttgggtctcttttaaaacgacgcaaatataaaacaatttgtgtttatgacttatatgtcaattttatagatcgacgcaaaatctttatatgtcacttagaaattgacgaaaatacccctttttgtagtagtgaccacataacttttcgaggaatacgtttccttttctcctcgctcttgtttgttttagggcggggtaaaccacaagttgggcaactgtccatgtctgcatattcctttcgatacaaaatacaatcgttcggacatgcatggatcttttcatacttcaatcctatcgcatataaagtttttttcacttcatatgtagacaccaggaaacaataatcaataggaaaaatctctttaaaactagctaagaactgactaaaacccttattgttcacccattttctagctttaatgttgtaaaattttaccaatgttggtaatcttaattttttacaaccatcgaacaagggatcactaacccagtagttgtctaatttttcaagatcaacaaatcaagcaattccatgccaataccagtagggaattgatattattaattgccaacgacattaaatgtcgttgttgataatactttttgccggcgaactattcccaacgactttttaccaatgaaatatcctcattgatagatattactgacgaaaaatgggctttgcaccaacaaaatttgtccttattgatgcacatatttcttgtagtgaggatactcatcaacatcattaaacttaaaatcatctatccctgctttcataacgaatatgggtcactagttgaccactctccgtgccaataccaatagtgtatcttttattgaaacccagaaaaattatgtgatctttattatcgtaatattcccttttgttccttacaacaatctacacacggacagggaattcgttcgtgattactaaggttttttagggcaaactctagaaatttattgaacccatcttgaaattacggtgtttctgtcctatcaagcatccacgatttatgcataccacaaatttaaaataaaatcctaacaattaggtttaaaataacttaaataaaaaaatttatccaaattctactaaaattttggcagcatgaagctataaatcggacgttcttgaaaaaattaaccataaaatcaaaacatatattaatgcacagcaataaaatagtaacttccacccatctgaccgcagtacatgtattcgaagaatctacttcactacgaatgaatatttaagatattcaaacttgtgtaacatgcttattaattcataattaattaagatagaaaaagtatacctctagttagatagctaaccaatcaacacttggaataaatcgtattgtccttctaatatatccatgatgcttaaccgtaaaacctacaaacaaatacaattactagaaaagtttgtagaaaaaaaattgttattagctaccaaattcatataactagttgttactagttatttgacaaatgattactagttacaaactcatctaaacatgcttatcaatttataattaattaaaagaaaataaaaaataggatatatctctagctagttagcaaaccaacaaaccttgccaaaaatcttgttctcc

SEQ ID NO: 220567 - DNA, 3571 bp, Cannabis indica
aaggaaagatcaactccttctttgttggcttcactcgtttatgttcaagacaattcttggatctttagcccaacataattcttctcatgctatctggagagctcttgatcaacgctgctccagtcaatccaagactcgcttactacagatcaaatcacaactctccaccattcgaaaaggcaatctctcaattacagattactatgataaagttaaagttcttgctgacactttagctacttctggccatcccatggaggaaagtgctctcatcatgcatctcttgaatggctagggccctaagtttgatcccgtcgttgtccatgtcaccagcttagtggatgatatatctgttgaatctattcagtcattgcttcttactcatgaaagcatattggaacgccacttcaacaccgaggatcgcacctcaaacatgtctgtcaatctcaccacttcctcatcaagattcagtcaaaatcgtttctctccgaacaagagtcgtggcaacaccctaaactttccaaatagacctctaggcaaaccatttgggagaggtaatttccccaattcaagactggtttgccaagtttgccacaagattgggcacacaactactttttgccattaccggtttgacaaatcgtttgttacccccaaaattggcaaatctcgtgctttcttgactgagatagatcaagctgatgatccttaagcctacatgacctcaagcgtacccgatcctaacattgaccatgactggtatacggataccggggctaccaatcatgttgcgttaggcatggaacaccttgattgtgaacatccttactcaggttctaaatcccttattgtttgtaatggtaagagactttccatctctcgtattggtaatcattctttgactggttcttcaaaacctatactgctaaattctatcttaaaagttcctgacattactaaaaatcttgttagtgttcttaaactaactgaggataataatgttttcttagaatttcattccaaatgttattttgttaaggacaaagtcacagggacagtcttgctccaagggagggttgaaaatggtctttatgtgcttcctcaaaatcacttttcttctccaaatgtggagctccaatgtcaccttgccacctctcaatctagttcctctgtacaatcttttcatgcttccaattgtaataaatcagctggttccctagctgcaatttcttgtaaagattcaataataaatcaaatggattgttcttcttgttctgtttcatgtccttgtgcaacttttaatgttcaaactaaacctgacattaatctttggcactctaaattgtgccacccagctcctaaaacacttgccaaagtgttatctaccataggaattaaaagcaatcttaaagaacttcagttctgtgaagcatgcaaaattgggaaaagtcataaactcccttatgccttgtttgattctcgtgcctcctagcccttagaactgcttcacaccgatgtgcggggtccctcccatgtgtcatctatagaaggttataggtactacatacattttatcgacgactttaattgatatacttggatttttcccctcacggttaagtctcaagcctatgccacctttctcgagtgacaaaaaaacttgtcaaaaaccaatttagtctcactattaagaaagttcaatctgattggggtggtgagtataggtcattttctaagttcttatctaagcatgggattaagttccaacatccttgtcctcatgatcatgaacaaaatggtagggcggagcgaaaacataggcacatagcctcactttacttgtacaatccgatcttgatttaacattttggtggttagcttttcagcatgcagtatttgtgattaacaggcttccatcaccagtaatccaagatatgtgtccctatgagtgtttgtttcataaggctcccgattatgacattcttaaaccgtttgggtgtgcctgctatccccacttgaggccctatcaacagcacaaattcaatctcagatctaacaaatgcacctttgttggctattcaatgcatcacaaggggtacatgtgtcaacacccccaggaagaataaatataaccagaaatgtggccttcaatgagatggacttccctaccatgtccaacaaaaaataaaccaggtaccttcttctcttcctaatgaacatcccactgccagtttttgtacagaacctatgttcactaacactcctcttttacaacccgaggttactcctgctgcaattacacttcctagtaatggtggccttgcttcccatgtccctcctcctatgatcacaactccatagtttgcaccagcagcagtttccactttagctgcactgcctactgatcattgggctgctactacacttcctgctcaggtctcggctcaaggtgatgtcttgattgagacacgaaataatatctcagactcatgtgctcctactaccacactcccatctacaaacaagtcaaacaccaatcccccttccattactcaacccaccaatcaccactccatgcaaacaaggtccaaagctaggattacaaacctaaagcctaccatgccacaaaatatcctctccctttcacctccttaactaaagagccaaaaaccttgcaaaaagctttaaatgatcccaactggttcaattcaatgcaggaagaaatctttgctttaaagaaaaatggcgtatggacattggtcctttttgatcctacaatgcacctggttggcaataaatgggtgcaaaaagtgaagctcaaacctaataacactattgagaagtacaaatcacggcttgtggctaaaggctaccatcaaactctaggtattgactttactgacccatttagtccagttgtttgccctgtcactgctcgtgttttgctcacactagttgtctttaacaattgaaaagtcactcaattggatatctccaacgcttttctcaaagggagattggaagagacagtatatatgtcccagccccaaggctttatggatcctgaaaagcccaatcatgtgtgtaaattacacaaagccctatatggtctaaaacaagctccgagagcttggaacgagaagcttaaacaaactctttacaccactggtttcaaagcttccaggtttgatacttcattgtttatacacggttctggtgcagatttgataatgttattactatatgttgatgatatactaataacaggaccaaatgagaagataattgcaagccttatagctgatctcaacagggttttctctgtcaaaaacctaagttctcttcactattttcttaaagttgaaatagttagagatagtagtggcatttacctatctcagtttaaatatatatctaatctcttggttaagttgcatcttgatggagctaaaccaagtccatcacaaactagtgcttctcataaactgtccttaaactatggagaacaatttgaggatcattgtctttaccaaagcacattaggggcacttcaatacttgactttaactag

SEQ ID NO: 220568 - DNA, 2094 bp, Cannabis indica
aaaaaaaaaaaaattattgaatcaaaataattttaacagcttagagaaaatataactaaagaattcaaaaataccatttggtacatatatgaaagtttgagtgcaaaagaaaattctaattagtcataatatatagaacacatgtatacatgggtatgtctgtccatgaatagaacatgtgtgcgtaattgtcgtaattttcttttgatttgatatatcatatgatgtactatatacacacatatatataattcattccataattaatagctaaaatatacctatatttaatcaagcatataaactaattactgtttaataccaagattcgaaaataagtgtggctgcaatttgtatattaattggattacttgcttcacaagatgaatacttatagttatataacaattttatataacacgcaacaataacatatatatatatataatttgttacagtataggcggcaaaaaaatcaataaatgtaattatctttacaatatatattatttttgatttttttgataagaaaacagatggctaagtctgtagctagcttgcttatattttccatatagtgatgactccttgtggggtttgaaatgaaattattatatgatttgatgagaatttcaaatttcatatgtacagttcgtgaaataaatgcacttattaattatattatatgatctatatctaatataatataattcaatatatattgccgtccacgaaagtgtatgagaaacaagttatacacataatatttttttatatatataaataataaaaaactcattcaatatatatgtacatttactagtcaattgttctagagaatcatgaatttaattatatggatttaatttgaaagctgaaaaacaagtttttataaaaatcaatatataatacaatgaagagtttgagaaaacaatatatatgttatttaatttgatataaatatatagttatacgtagtgtataaaaaaaatattgcataactttttacataatatgtatactaaattatacagagaatctagtagtggttatgttatgtagtctacattctataggtcagattttaaaatattagccagatttattattattattattattattagtcaaaataagcaatcatgcaattccttctgttctaatatgccagccataattattatcaatttgttgtgcaaaattgcctaattgactaaaattaagatatatacttgtatacttctaaacatactttcattttcacatcaatcgataaatcaagtaatcatatagcacatagaattatatataaaaaaatattatatgcatatgatggaaaataaagttgagtatagctagccaaaaaaatataaaaaatatatatataataataaaaatgataggtagacaagcaattaagaagcaatgcaggacacattttctaccaaatccatgtcacggttgtatagtactacttcatctcctttttgtgggtttagaggaaaaagctataagatttgtgttccaccaactccacatcttcaacccttatccaaaaaccctcctccatttatttgatatacgaattttttttaatatgttttaatttttgtcatatttagagtaattatatttttttttatttagtattgtatattattataataaacaaatatctgatttattttaggaaaattttaaattatttatagttgttgaaaattatggagttttatctcaaaactaattagtattgagtagaataatccatctttttatataagactcaatatttttacatttgatccacatggataatattatctaatatttttcctcaagatggtaactatattttgttcttgaatcaccttatcataagtagtgtcatttgttcgtggctgcgagttccatttgcttatttgttgatggttaagtactatctaataaatgtgaatcgaaagctcgctaactaaaaatatgactttgataccatattaacaaagaatatatatatatatatatatataattgaattataattttttgcatatacaaaaaacactcgtacctaaaaaattcatatatatatac

SEQ ID NO: 220569 - DNA, 7538 bp, Cannabis indica
aataataaaaaaaaatagaaaatactatatgagatgattctcctttgaacaatttattttacatgtgtataaaataaaagaattacgcgttcaatagactttttgaactttgtttcagcgtgctacattgttgccaagaaaccactatcaaacaccgtctatgtcaacatatcttttattgttttattattttgttttgtaataagaaaataacttttcataaaaataaaataaatgtgtttatagactacccatttcaattgttgtgctttcttaaattgcatacctatacaagggtgcaagttttgatcgatatttgtggagtggattatcctctcaaaaatgaaaatttgaagtgatctataatttattaagtaccgggtataactcacaaacgtgtacaaaccactgcaaacgaagtaacacgaatatctctggtagtcaatctatttcattagctagccagtgagagcaagaagcttgggatatgtttggcattgcttccatcaatcatctagacttacgccatatatcaacatattacggtttcgagggttatctattgcgaaaagactttcctcttagtggatatgtgaaagtacactatgatgattaagagaaacgtgtggtttttgaatccattgagatgacctaaaaaatttgctatttcaattttgctagtccagaacaacataacaacagacaattagataatttaattagaatttgtccagtctaggagacaaattaatagaaaatgctatttgctttgattgatggccataaatggaatgaaatgaaagagttttacgagaatcatcttgatcgttggatatcattgagaaataggaagaagtgttatcaaatgattttattgcaattctttctagcatggaattggtaaagtgtgacagtcagcaatcctgtgattcgtaaggagaaataccaggtaagttgtgcaattccacgtcgtttgaggaaggtcaaatgtaatgattctgagattgtataggtatgagactaaacaattgaagaacaacaaggtacattttattttctggtagcccatcacaaaacaactccacaattaagagcatctccaatggtaaaactttagaggatgtttggtgaggtagacatattatgtggcaaaatattaaggtgctatatcattggagagaaaataatgtcattctaaaaatttacatgggtgatatgttgtgtcattgatgctattcatatttttaaataaaaaattgaagctaaaaaattattgtagttaaaaattaaaatatatattaaattataatgtgtaagatcataattataacatttttagagagtgttatacattgaagtattttttaaagtaagagtatcaaaaataacgtgaaagagagataaaataaaatgttatatttttagattacatgtaaatttttagcatccttaaaaaatattaccattggagatgctctagcatgcttgaccttaataatttcaaaataaataattttaaaactaaaagttaaatttaattatttaaacaattaaattactttttattttacttttcataatttttaggattgtctactagaacaaattttaaaaaataatacatattttttttctgtgatgtgtagttttgacatactactttgagtatgctgacgtggcaattacaatttgattggttggccattgttggaccgtcagattaaaatcgaatcacagactgagattcattcgaaaatctcacgtgccgagtcccccaaaatggcaaaaccaagtctaaaatctaatctctcacgtgttaaaacatgaccaatccccaactccaatatctggccttaatttcccataatacccctataaaactagataactctgtttcaaccttctaaattaaataataaatttccaagtcattaccaataccatcggatttccatttctatatttgatgacgacgctcccataatctctcttcattaaaaatctagggtttttttttcgccacggactatccctagatcccagtttcatttgataaagccctctaattgattcaattttcggtgtgctttagggttttgattttgagtaatattctaattttggcttgcggaaatttcgggttattcgttacggtatattttttttcccttaattggtcgaattgggagtttgcttcgcgagcaagttttggttttggttttgattgtgagatttggggcttgttgatttttaggtaattggcgtgttgggatttagggtttttgttattggcattggtttgttggggttttgaattgaaggattggggatttagggtttttgttgttgggagatggcgacagttggtggtgcggaagaggttgagtatgacagtgatccagaggaggcgaagcgatcccttgcgatgcggaggagggaagcgagcgatgatgaggaaggagagggagagggtagtagtgaaaagttgagggttgatcgtagggctgttattcattctgatgaatccgatgggcagggtggggcagccgagtatgatgacgatgatgatgaagaagaattgggcttggtagatgatgaagaggatgagggtggtgagattgacgaagaggaagaatttgatgaagaagaggtttatgaagcgagttcccatgagcgtgatggcagggttccggcttcgatatctgcaattccaaaggaacatgttggtgatgttaggaggcctgtggaagaatcagaagacgcccaattggggagtcaggccgagggagaggtggagggggagggagaggaggagaagaaagagaatgaaccttttgctgtgcctacggcaggagctttttacatgcatgatgacaggtttagggacaataacggtggccgacacaggtatgggattttttttctgaatgagttgggatgacattgtcgaattaaaaaatcttaatgaaataaaaatgtgtattttttttgttaattattaattacaatcattatgactcgtacacttcttattctgttgtgagagttttgatgatgatttttcacttcccacatcgtatttaagtcagtttcctaataaagatgtttgctttaaacttcttttggaaaggaagtgcaattttactttttttgatgactaatgagatacagtgataatttatttctgtttatgtaggcgaactcaaggggggaggaagttgtgggagtccaaggatgagagaaagtggggccatgacaagtttgaagagataactttccaggacaggcattatcaggaggtaatactgttttaatatgtactgtcagtttatgaaacttgctcaagtgtttatatctgcacgcctttctttctgttttggtttttataccctatgtaattttcagggaaggagatcatctaggagcaattatagaggccggggtcgaaattcaaatcgtggtgttgaccgtagtgttgaccatgggtatggtagagggaacagacctaaagcatacaacaacagtactaatcagggccatgtaccgaaaggtgtgaggggaaaggggctcaggaagtatgaacctgctacaaggaacaacagtcagtcaccatcaatgtcaaacaaacagtgagtgcaacctttttatgagcaatcaattatcgattggataatcgttttttgctgaaaagtagtttagattatgaaaataattaattattttttctgtatgaagtttccaatattaatgcttatggattggtattctctttgttgacctttgtagatctgggaggccttttgagaaaccttcaaattctaattcagccagagctttcacccctgcatctaatgctgaatttgatcaggttgcgtctaggaaaaatgtcttcgcatcgagcttgaattcagcttcccctcctttttacccttcgggatcctccaataaagagatcaaccttacacagaaaagggatgttcaaactggaaataccaacaggaatcttcgcccatccagtgtggacagtgctgtgctccgaggaaagaatataccagagtctgtcggcatggacaaactcaacattgatgattcgtccagttcagttgctgggaagacagtgagtaatattagtacgcaaatgtcaccttcaggagcggtgttgcctaatactgttaatactgctcattcttctcagtcaaggattcacggtagggctgtcattcctggacagatggcttatcaaccaagtcctcataatcaggccataagaggttccttatcagcacaaccacatgctgctcagcgaagtccagttcaaggtcgaggacaaacttttgtgcaagtttctgcacaacaattaggacagcgtcctggtagtggttctcaatcttcctctccaccaaacacagctctgtcggtaaattcctttgaaactggtgaagtggtttcatcttcagaggtaaataaatctaaaacagctctggttgcgaagggaaaaggtgttattcaaggtaatggaaggggctctgctatgtatggtggggcccaggtcattggggccacgggtagcatgggtgtaagtcatggagatcagaacttccctggtgctccgacctttcttccaggtattgcatcttgggctcatgtgaaagaaaaataattagttattttttcatggtctctactgtcgagatggtagtttacgtttgttaaaacatactattatctgatccttttgaacagaatttgagttattaattctaactttttgcaaagaatttgcaagacttacatggatattgttgcttgttgggcagtcatgcaatttggaggtcagcatcctggtggtattggggttcctgctgtagggatggcatttcctggatatgttgctcagccacagggtcttggtcttggaaattctgagatgacatggtatgtagcttttttaatatataactgctagtctactgctgcacagttgtctttttataacatagatgctgtccatctaataaatttgagacttacattatatactgatttttatatttgaaaatattcagtagctattttctataatctactctctgataggaaagttaattgtttcaggttaccagttctggccggtgctgcaggagcctactgttcaccgtatcttgctgttgatggttcttaccatgctcgcccatctggacagtcatcttctggaggtgctgcaaggttggttgcatgttgaaaactggttttgctgttaaaccctgctttattcattgtctgctactttttttgtttttgatggtgaatttgttcatttttgtatctgaagactgaagctactaattagtgttatatctctagcctctagattaatgtgtatgaataatatggtcttcaactgggttaaggaatttgttgtcatgatgttatgattcataattattatgtatatggaaatgatctttctttgttgttatttgctgtgttgttttttcttatctactgcatgcttatgatataaagctcattcttcttctttcccttacttcaaagaacatttaacgcagcgctttctacttgcaagtgtttttaaagggttttttcccttccagcatttttttttttggcttatgttctttcatcttctatgttgctgctgctcatataagaaaatgtggctaatttttcgcatctttttttcttgtgttagaatttttgaactgcaagctttgcatcttatcttttgtgaaaccttaatttgatttgatcgataactttttgtatctgttctgtttctcagcaaagaagatattgcaaacaaaaccagtaatgaatggaagtctccacaaaagcctggtaatcatatcacatccttagcctcttttttacatttttaaattattggatattgaccagttgttctgtatccagactcagtgaatgatgaatttggacagcgtcaaaataagcctcgcaggcaagttatcttctccatcttattttggagaacatttgtgaaagagggctctggtgaaagagcatatgctatgttttttgtattttaacatatgtttgcccttaaattgcagatattcagagatgaactttggtcaatgaagtacttaaatagggtgaagcttgtttgaataagcagataaaagttttgcttgaataaaactgtctttactttgggcatcggaaacttctgagttgtgagaaactggtatctcatgccttcctctaggtcctctgtgttttccggctttattctggggcactttgggccgcaatgtgttacaacatatgttaggtatttataccaatgcttttttctttattctttggtgtaaattaatcactttagagttggtactcttcaagttaaaataaaacctttttgtcattgttttttatttcaatattttgttgttgaaaaatactctatgggtacttgttgttatctgattttatgtactgttatttgtaatgttatggcatgtccaaatatccttttgttgctttgatagaaaggtggtttaacaaattttactctgtacattcttctcaccattccgtcccgttgttattcttgcagttttgtatggcaaacgcctctcaatgctgcattcagtttaagatcaatattgcagcttgacaggtggcagttcctcattaaaatgtgcggtagggattctattcttaccaaagattgtggtcatttttaatgtggatatttgaatgaggcagatcatctttaggtgaattcttaccatcttttggcatttatcattttttttcaggttttcttgttgcttttttttctaggtgaagcttgtgagaaatttaggcgggcttctctttgatccgtatacccaaaaaaaggaaaaataagaaaaaaaataaggaaaaaaaaaatagggcaagaatgattgtgcagagctgctgttaccttggtgaagctttttctgtttctgaataatctttagtataaatggtgcatattgttttcttattcattttagcctacttttgctggttttgaaattgaaagaactttttctatttgggttggtgactgaaaacttctatgctggggattataaggaatggtggttaagagtgttcatgtgatgagggaacttttataatttgttttgctgtgatgagtgagttgatgttttcatatgaaagacttgtgtttttttttatgcaaatgcaaaggtttggctatcatgattgtggttgctcaaaatatatggagtagtactctttatgaatttaatgaaactctcattatttatattctcttatctaacattactaaccttatgttgtggaatatggaccctttcaatataaaagaataaaaataaaaaaaactagtaatggtttacctatcttctcaacaacctttttaggtttttatttaatatttctttaataggatttggtgtatatacttgccacacataataattaagggcgtcatgtgcttggaaaaaggggtcatactagttgccgttttaaatggtatc

SEQ ID NO: 220570 - DNA, 1951 bp, Cannabis indica
aattgacatactggcatttacgccaccaaggagcaaacaagtttaagttttgagaaacaaattcagagacatacactgatgcaccatgaaatgatgctctaacaacccaatcaagagagcaacaaccatttgagtttgccacatttggcagtgctccacttctttgagctgctgccaacttttcttgaacaaaattcacttgaaaagccacttccatcgtatattgcagaagaaaaacatttaaaagttgtgtccaatcagcttccttagaccttagccatatagaataaccccaaaagggtattgttctgcccctgtcgtaaacccagtgaccaccaaacactatgtggtttagttgaagcataaaaaatacaaacctctcatctacagaaaaattcttgaagccaaattggttatacttaccatcaaatccttttaacaccatcactgtagtaatagcactcgtgatagacattaattgtttaatttgtatgatcagtataaccattctcattaaaggataatgccaaatgtcactaattagccaaattgaagatagaaaattattagtaggtggccctattccataagaaatacctggcagtcccaactgatatttctcatccttgctcttggtgacatttctgccattgtctaagaatccagaaataaccaatagcgagacaccagaattatcaacaaccatccaagaaataaatgccaaaggtctcttaagagttggaattacaaaatcaggtgcacatttcttcaaaattaaatttgaaggtgaaccagttcttgaatgttggtcatcgggagactccaacaaaattttcagcaattcctttctaaaaaattgcaaacgtgaaagactaaggttaccttgttctttttgaagagtgattattttccctctatcaaaagtccagcgagaaaatggcttccccaacttttcttcaattaattccggccaaatacgcacccctccgtccaccctcacggcgatccccatcctttgctcagtcgctggtggtggtggatcacaatcgacaagtcgacacttcatgcgattaggagaagaagaagaaatcgtggaaaccatatctgggtcccacttcctttgcaacctgggacctaaattgtccattgggcctttagtaatgtttaatgggctgtcatttatacccaacccccaaacaacacaatgacctaaagcacacaatgggccatattcaagggctaagttgggccttaggtagggtttccaaaattcaagcccacatgtctccaccatgtacgcagctccaccacgacctggaatggtggtatcgcacggaagtggcttctctgggttttccttcaacgttctccaaccgtagttctccggcgagatgcatgtcttcttcgacattggcgatcgcatatcatggtgtaagatcggtaacgtactcaaccccaaatcgagatcagaaatcgtcattgtttcgtgttgaacggcgttgatggctagctggtcgcccctaccacgatcaaagagcttgtgcgcctccatcgacaataacggaggatttctttctgaccacgtcgccttcccttgcctagtttgacgaatttcaggtggaaaattcaagctcgacttctctctgtacaacaccggcatcacctccagcaccagtgtcgtctccaggcctggtagctcaaccttcgtctccagcgatgcaagcttcgtcgcgagaataaattgatggcctgatattttctccacttctctttccgagagcaacttagatttaaagccatgattagattccttgatttccaccattttcgttggagactcaagaagattaacaggttgttccttgtcattttgcaattcttctttctgtaagctagtttgatgacagaactttagctgtccttcaacaaagaatgctttggcaatgacttc

SEQ ID NO: 220571 - DNA, 1581 bp, Cannabis indica
gagaaagtttcttcatattcaatccaaggtgtttgtgagtagccttttgcaactaaccttgatttgaatctgtccaaagattcatcatcattcaacttgaccctatgcacccatttatttcctataatctgcattgcagggtagtaaggaaccaaaaacaagtgtctgcagcttttagtgctttggctaaatcatacataaaggtgaaccatttaggatcctgtaatgtaactttgagggactttggttcagatggtattaaagattctggaaggggtgcttggtagagagataagcctttggtttaataataccattttgagacctagtgaccgtgatatgatttcttcttgcagcagtttggaaggttttagtaccattaggcatataatcactaatggtatttgtttgtgcaggttgagttactgcatgctgagtttcttcaggttaagggtgttggggtggagttgatacaggttgagtgttttgaggttgacttgctgcaagttgtgttgttgtaggttgagtgttttgggtttgagtttcagtagattgtgtgttttaatgttgagtagcagtaggaaggggtgttttggggatagtagggttatttgtgggataagtagtgtggtttacgacatgagaggtgataggtggagtaatttcagtaggtcttgtgggtggtgcagcaacattttgtgtagcatttgtgcatggaggagcaggctcagtggaaacattgtgatgcacagaatgaagagtattgttagcacctgaacaagttgaaaaacttgaagtaggaaagtaactagggttatgagcaaattgtaactgatgtgatagcagttgtgaagaaacacatgggtaacacttttcattaaacactaggttttgagcagtgtacattcttcctttatcattttcacacaaataacctttatgaaaggaagagtaccccaaaaacaagcattgtcttgacgtgaagtccaacctatgtgaattataaggcctcaaataaaacatgcataaccaaaaggctttagtatagagtaattaggttgtgtaccaaataagcattcaaaaggacttatattgttaaaaataggtgtgggcagcatgtttatggtgaaagtagcacattgaaatgtatgccaccaatatttgagatccaaatttgcttgtgctaatagagttaaaccagtctcagttatgtgtcgatgtttcttttcaggccttctattttgctcatgtgtatgtgcacaaggatgagaaaatagaattccttgatcatttaagaaccttgcaaaagttttatattctcctctaccatcaacttgaaggtaattgctaaattacttttctatcgcgttcttaaactgaatgaacatatcaaatgcttgagactttaaagataaagggtaaatttatgtaaatatactgtaatcatccatgaagaaaatgtaatatttgtatccatctctagattgcagcctgaataactcgaagagattgagaggctttgtgagtggacacaggaaagggtaatttataactcttaccatgttgacaagcattacaaaa

SEQ ID NO: 220572 - DNA, 2422 bp, Cannabis indica
ttttattttattctagaactgaactattaacctcgcagataatcacttatcacagtctccttatcacaattaattatggcgaagcactaaatcattaaatttttttgactaagcaatagacccataaagcagacaatctatttaacctacaaaaaatattaaattctatagagataagttaatttaagcaacaaattgatttaacatataattcatttaaaataggttacattcttcatcataaactcatcacaatataattaaaagtaatttatcacttaaacctagaatcctagactattaggtgaataaaaaattctaaaatagtagaataatataaaatttaatttagcggtcgtctaaacaagattaaaatattaatcataaaattaagtaaagaagaatataaacaattcaatacgaagaaataaaataataatattaataaaaaaaaagacaagaaatcatgtctcgagttttgaaataacccttaacttaaaagaggactactccataatctcaaacataatcataagcataattataaatgaaaagtaaaagaatttaagaagaaaaactagatatgaatgtagattctcctcttctcttgagttttcttcttcaaaacgcaatgaaaaatttactgaaaataaactctaaaagtcttatttgtagaagtaaaaccctaaaaataaacctaatttaaacttaagaactaattttttcgcaaattgtacagacacgagtgtctgggcggagtttaagtggcactagggcgctacttcctggattttcactatcgtatgctcagagaagtattttgcccataacttcctcaatattatttgaaatttgacaatttaagatgttctgaaaagctgagaataagatctaaaactttcatgttgagctccaagtccaattctgcctttaaaattgtcaaaattttcatttaagttctggcttataaaaccgaactcacttacttttactattttctacttaaatgtgctaaaattcctctaaataactctaaatgcatgattagtctttaaaatagtctaataaaatataatctcactaatcaataatttaaaaaatcaatttaaaaatattaatatataaattaatcatatttataaaataaaatatcaacttgctatcatgaaaaaaaaattaggaggactatagacatttaagagtgtaatgtagacatacccaaaactttatatcttaaatcattaacacctaactgatttatcatttatatttgagtcatcatctatgataattatggttaaagtaaagaggagaaaggattacaattaggaaaatattacacatttctcaacttctttagtagtaagtagtaagtaaaaaccaagtaagtcatgatcttatgaagtagtttttttttcttcctttttttcatttttgacacggggaagtttaatgtattttattgtctaataattaactaattatgccttaaaatgtttgaccatcttttctgttctgtcggcagcaaaactcttccaaaaactatactctcatcaatgtcatatggtgcagatctacagtgattgttagagaccacagttcagttcagtcaaagctctgagctttaacaagagtgagagagagattgactgaatcgaagctttggtttttatatatttgataatccaaatctgtaactgtaatgatggtccaacaagacccgccatttccatcctcgaaaaagcctccaaaacctcatcgcaagcaaccccaaacacaaccccaaccccaacagaccaccaccattctctcagatcacttccctgagcctcaatctctcggtttgcccaaatgggtttccttcaatctcttcaaagtcaccacctttacgatcctggcccttgtaattgcagccctcttcttcctccacaacactaatgagtcttcagctactttcttctgtttcaattctcacactaagaagccaatcccaattcaacttcccaaagtggatttcaattcggttcgacccatttcggataaagattcggtttacgcatctttcacttcccgtcgatggattgtggtatcggtttctgattacccttctgattcacttcggaagcttgttaaaatcaagggttggcaagtattggcagttgggaattcgaggactccttcagattgggctcttaaaggtgtgatttttatgacattggaggaccaagctaatctgggttttcgtgttttggattaccttccttatgattcttatgttaggaagacaattgggtaccttttcgccatccaacatggcgcgaaaatgattttcgatgctgatgatagggcggaaattgttggtgatgatcttggtaagcattttgatttgaaattgtctagtgtggatgtaatgcaggagagg

SEQ ID NO: 220573 - DNA, 1732 bp, Cannabis indica
gacttaaaatatgacaacgtatgttattattttatttattgaaaaaatctaaaagcaagggggaggataagaaacaatgatgtcatctatcatcaacacaaatttttatgtttaagattaaaaatagaaaaatatgcctgcactaccaataaataaataaataaaagaattcaataattaaaatatgcatgcactaaaattttattattaaaaaataaaagtaaaatcaatcaaataaggttgctcgtttacttcagaattgagatatgagtgtgagacatgcatagaaataacttcaaaagatttttctaatgcactagaaatcacgtcaatcataatagtattgagtgagttatatatgacaattttactgaaggttgtttaacatccaacgaccaagttttagtcttgcaaaggaaaaagtttctgatgtcaacctagccactagttacatgagaaaacgtgttgaagtcataatttttatagtctaagtgatatgatttcatcatttagctaatttctttgctctggtgaggtgagtcaccagttctcagaggtttttctcttccacgaaattgagtgttttagaacgacccaatttgcggatcaattgtccgtattatttcactttgctaaaaaagtgaaatattaaagtgtgaatttggcttgccacaattcgtagatctcatttatttcgtaaaaacaatcgaatgctcgaaagggatctggatttggataagcataacctaacgcaccagaccatatgttaacctgggcattgggtgcttatttatgggcttcctgagtgttgttttggtacttccatggtatttgaatttgcaaacgagggctcctctcctgttttagaccaaaataagaaggcttctaaaaatataatttgtgtctgagcagtagaaccatgcgcactaggttgaatgtcaacttgggcgtaagtgaccagtgcctaggtcaacccgctagtcaggtgtgttttggcccctagatggtcttgtttgctcattgagaacatttctatcttcattgttgatgaaaatgaagaaaatgcttgggaggtttctcggaaaaagtccttagaaatggctcaggttgacaatatattaacatggacactaggtgagcttcttggccaccagatggccccgtttatttccccaaagcacttatatcttcattttggaagtagacagagaaagtgaccaatttttttattttcagaattagggttggaagtgcccccaaattgacaatatgtcaacatgggcgataaggacagccttaggttggcctgggtgccaggtgctccaaacgggaagtgttttggtattgattctgatgcctctaacatgcttgtggcaagtcttatttgtgtctaagtacaaagttcgagtgatttgcactaacacgggaccaaaaactgaaaccctaaggccatatgtcaacttgggcgttgggttaaatcctaggcacccaagttagctttcgggatgccaaattgatgtctgtcagtttccaagtttgtgactcgaagtcttcatgactttttggctcgaaacattgaaggtggtgatttggaaatgactttgcgggatccaaatacccattctagatcccctgatgtcaacttgggtgtaaagctaaagaccatgcccagggttgaccgctatgattctggactctcgactccgagaatattttttttcttgccatgtgt

SEQ ID NO: 220574 - DNA, 1216 bp, Cannabis indica
ctcaaaaagaaaacgctttggctggctttgaaagggagtggtagtttgggggaaaggattaacaatgagcgctttatgatctgagctgaaaaattctccatgtttgagagtagcatgtgggaagagatccttcgaattaagaatcgttgatgatgtaccaatcgattcttaatgaatgtttctttcatttgggtggttattgttccaagtatatctatcactctcaaaatccaagggtttcatttcccatatttgtcatctaataaaaatgttaaaattgtcaacaaacattcaaggggttcaaatagttattttgaccgatataattcaataattaccaagtttgagatttttgggcttgatgaggggaaccataaagcaagttaaatgaaaagaagggtattaagcaagaaagagctaacataacagtaaatatgattaataagagtaacagttacatttgacttccaaaataataaaagacctccttccctacctattctaccaacttccaaaacgttaggaaaactaagcctaaacttaatcctgcaacccagaattagtctagattcaataataaacaaaatatcaagattacaaattttcaaaaggtgggagaggttgcagaatgcacggtcactcccaagacctcgttcattccaactgatgattttcatgctatcttgggcagagcttgcctctggaaaaaccttgtctgttgctagagtggggctcgatctagcatgcttaataatggtacgagtgactccatccactgtaatgacttaccttttgaacgagtctttaatgcctccacttgctttcttctttgtgacttttgtgggaggcgaggcagtagctcccaacgagaaggtggtgagcagtcctatgagaggctgacttgttgggttttatgccctaaatacaattcaatttcaatgtaatctttattatttaaatatcaataacgaaacagaagtattttcatcacttattgtgtcatttggttcatgttatcatttatttgtttatttgatttataaattcatccaaatccttatcacatttatattcttgtttattgtgtcgtcagcacagtggaaagtaatcaagattatgtgattaaatatatattcctagatttatcagtacacagggtttaactgatatgataatctacaacatagtttacttgcaccttggataagtgctatgt

SEQ ID NO: 220575 - DNA, 2574 bp, Cannabis indica
gaagtggttataatagagatagttggacaaatgagattgaatatttctttctttttacaaggataaataaataggattctttttcaatattatatggaagatattttatattatggattgttattgttagctttgtttttttgggtgtaaaaatgagaaatgaatgaaaaatacaaacaaaaaaaaatgctataaatatcttatccaaagaggcacggccccatagacattattataatgttttcttttttacaagaccttataatattttgagcattgatattaattattagtggtgcgtgacacaatttaaaaaattttacgatgagaaaaattattacttttaattatataaaatgtaatatttaattatactaataataatataaaatattattttttaacatttctgaaatattttatatgtttttcctaacaagtaaaagtgatttgtttatgaactaagtgtttacaaactattatattgatgtacatatatattttttgaaaaatctataatacctttccatcacataaattttagtatattctttatttgtcatgctatctagttttttagttatttaagactacttataaatttttagaaaattttaattaatttacaataccaaaataagattcaaatattttattatatatacaattattttttaatacgtataataagtaatgattaactttattttcaacactataaattatttatcattttaaaaaaatttataagtaatcctaattaattacaattacacattaaaaactatagttgaaattaattatacaacataaaatttgagtatacaaattaaaagtgtacacatcatatatatatagagagtttttatttgattttggtatactatatactactgcttattttctagctaaattgtctctttctttagaaatctatgagtttagtagttggatatttcgcgcaatgtaaaaagactatctttatattaatctttggatgttttagaattttctttttttaaaattgtatagataatacataaaactattttttttttgtaagagcataaaagtaaaatattaattatttttttaaaaaatatctaaaaatattaatgagagagagggagagtacgtttcttatacgcatatatatctgtattggttgtcattgattacttgaaaatgactcacatctaacttataatatcatatctcatagtagaaacattttaagctctttcatgattgaatccaaaaggccaagtataatggaaaacttacaaagaaattttgtttaaattaaaaatgaaaattccacacatgtgccatgtatggcttgaactctttatcaaccattgaaaaaataagtagaatatttttatcaccattattactaaagcaatttatagtattcctttttatcttttttccaagtaataaaacatcattttatttactatttaacattaatgagttgtttaaatatacaatcttaataaaaagtatcattaatgaaagtcatttttttcaaaaaaaattaaatgtagtcatttttttttacaaataaatatatatttttattggagtattactataagacatcaaggtacgtaacacttctatgtcatgacgttttataattggttaacagttctttataatatgtattaaattaaaataagtgaaatccgattttgaattgcaccaataataatattgcgtacatcataagagtaccataagttccctttagcatttctttaatttttacaattgaacttccatacacaataaaaagtgcattgttataaaacacatgtgcctatcatctttatgacatgacgttttgtaattggttagcaattctctatagtctttattaaattaaaataagtgagaaccgatattaaattacaccaataacgatattacacctcataaaggtgctaagcaccataaatgcccttagcatctctcaaattaataacatttagagtaccctactcgctcacatgagctacctcataataagtttttctttaaaagagagaagataatggttaaaaaatacatcaaatgagctattttacctcaaattttaaaaaatattaccgtacttatttaatgtagagcaacactatccatttttgaaacaatattttaatagtattttattcatactttattattgtatattttatatatatttaaaaaatttaatatttaattgaatgtagagaaaaaaaaattaatatatggtgtatcgtaaaagtttaaggtaaaataaaaacattagagttttggtgaggtattttaaaacatatagtgaagatgtgagtgctttccaaatatatagttgcctagattgctaataaaatatacttagaaatactcataatttaggataagtccaccttgtttctgcccctaaatgaaagtcagtactcaacaattgcaaaaccagctcacaatttcatattctacatggcatttatatcaaatcattcaatcctctgttttacaaaattataggcatcaaaacttctggaacagctcctaaatctacactaa

SEQ ID NO: 220576 - DNA, 4719 bp, Cannabis indica
ataactaatcagattgtaaagacttttatttagggcataaacccaacacaacagtcatcatactaacgtgtgtaataatctgaaacaagatataaaattcctcatcgagcgaaataaaccgcacttgtaacagtatgttaagatcaaccatgatcaaagggttgcccagctatataataatcataaccagttgatgcctccacctgtggatgtaaatttacaagtgattattgtggccctcatattactgaagacttgaataaaaatagagagagttatgctcggaccctatagtatgaacaaaaatatgaagttttggtcatataagaaaaaaaaaacaaaaatagtcgcgcatagaagaactagtcatctcctttagtgatgaagattttaaccatgtcatttatccacacaatgacccccttgtcgttgaagtgcaaattataaataagatagttgctcggacaatgattgacaatggagcctcttcaaacattcttttcaaaactacatatgaaaatatgaggcttcaactcaaagacctggttccttgcacgcagcttgtatatggtttctctggccaaagtatagctccattaggacacactcaacttccacttatgctaggaaaatctccaaatgacaacaaaatcatggcacaatttttggtaattgatgttccttctgtattcaacgtcatgttgggttagcccgccctatatgatttgaaagaagtaacctcaatttaccacctgtgtgtcaaattttcaacaaggaattgagtaggttgttcgaaaggaaatcaaaggactggacgggaatgttataaccttgctctaactaaagccaaaaaggaagaaatatctaaccagagtttagagaaaagtaaaggtattgaaaaataaggatccacccaaggcatggacgaagacatggatccccgccttggggaaccaagtgcaagtgttggataagtaaaagaattagaagaagttgagattgatcctactatgctgaccaagaaactcaaaactagcaaaggtttgttgcttgaaataaaattagctttgataaaatttctaagagtgaatcttgaaattgtttcctagtcgcatgaagacatggttgggatcgggctaactgtcattgctcacacccttaacattgatcctaagttttttcccgtccagcaaaataggagactgctggataaagagtatgcacaagcattgaaagaagaagtagaaaggcttcaagcaaatagattcataattgaggcttttatactagtacccacaccgaataagaaataaagcgtgtgcattgatttcactgacctcaataaggcatgtttgaaggatttttttttttcaacttccaatgatcgactagcttgtggatgctacagtaggtcatgagatcctaagcttcatgaacatctactcggggtgtaattagagaagaatgtatccactcgactaagaacacataagcttccaaatagatgttggcttgtactgttataaagttatgtcattttgattaaagaatattggagatacctaccaaaggctaatcaacaggatgttcaaagataaaattagacgtaacatggaagtatacgtcggctacatgctcgtccaatccagaaaggttaggggcatatagaggacctagatgaatgcttcaaaatcctcaaaaaatataacatgaaactcaatcccttaaagtgttcctttagagttaactcaggtaggtttattagattcattgttgatgctcagggaataggagccaatccagagaaaattaaagcccttttggatatgaattttccaacaaaagttaaggtagttcaaagtcttactgatcggatagctgcactaatcaggttcatgtcaaagtcaacagacaaatgtattcctttcttcaacatcctctaaatttttggtgatgtcattcgggttgataaatgctccagcgacctttatggatctaatgaaaagagtgttcaaggatttcctcgataattgtgttatagtatttatcaatgacatccttgtatactctcagacagaaacggagcatcagcaacatctccgaatggttttagaacgacttagagatcataaattgtatgaaaagtttaaaaagtgtgaattctggttattagaagtatccttcctagggcatattttcgagaaagatggaattatggtcaattcagcaaagattgagtcagttaagaattggctgaggccaagaaaaattactgaggcttaaagttttcttaggttggcaaggtattatcgacattttgtagaaggtttctctaatatttcaatgccattgacataattgactaaaaagaaccaacggtttacatggtctaacaagtgtgaaatgagctttcaagagctggagaatagattgatcacgtcaccagtgttagctttaccgtcaaaccaagaaaaatttgttgtttattgtgatgcgtccagacaggagctgaaatgtgttttgatgcaagctaacagagtcaaagcatatgcttctcgatagttgaaggattatgaatagcgttatctgacacatgacttagatctatatagaccacaagagtctcaagtatttcttcactcaaaaagacttaaatatgagatagaggcggtggttggagttagtcaaggattatgactgtgagattttatatcatcccaagatagtcaatgtggtggtggatgctttgagcagaaaaggtctcgagcaggttttcagtaccataatgatatcacttcaataggctttagacatggttaaagctggaattgagttcgtggttgggaaactacataacttgacacttcaatcagacttgttagaaagaataagaaaagtgccattggaagactctgagctagttaagattttggcggaggtattggcgggtcagcctaaagacttctcaatcttgaataatggaatgttactttacaaggctcgagtttgtgttccgagcaattatgagcttagaaaaaaaaaacttgaggaggctcatactacaccttattcattgcattcgagaaccaccaaaatgtaccagtatttgaaaccctactattggtggtgcagaatgaagaaagacgtagttgaatacgtgtcaaggtgctaaacttgtcaatagatcaaagcataaaataaaaaactggcagggttatcacaaccattaacaatccctaagtggaagtggaaagatgctataatggattttgtggttaatttacctagaaccaccggaatgaatgactcagtatgggtcatagtggactgcttcacaaaatcaatacacttttggccagtgaaaataacttatactgtggataagtatgtgaagctatatgtaaaagagatagtacgtcttcatgggactccaaaatccatcatttcagacagagatctgaaatttacatcaaaattttgggtgagtcttcaaaaagctatgggtacaaagctaaagtttagcacaactttttaccctcaaaccgatggacagtccaagaggacaatacagatattaaaagacttactacgagcccgtgtcattcactttgagggttcatggagcaaatacttgcctttgatagagttttcctacaacaacagctatcagagtacaattgggattgccatgaaatgttgtacggtaggaaatgccattccccgattcactgggataagactagggaaagaaagtatttaggtcctcagttagtttagcggacaattgaagccgtaggcaagatcaaggcttggatgcttccttcacaaaacaggcaaaaaagttattcagattctaagcatagagatattgaatttcaggtaggagaccatgtttttctgtgggtttcaccaatgaaaggtataagacacttgagaaagaagggcaagttgagctctaggttcataaggccattcaagatactcgagaaggtcaggtaggtagcatatcagctagccttaccaccagccttatcggctgtacataatgtatttcatatttcaatggtgaggaaatatatgtcagacccgactcatgtcctaaattatgaaatcctaaaactacaattagatctgtcctatgaggaacaactgattcaaatcctcaataggaaggaaaaggtccttcgaaacaagacgatagcattagtcaaagtactctagaggaataacaagatggaggaagccacctgggagttagagtccaacatgaggaccccatatctagagttgtttaggttagattttgaggacgaaatccttttaacggaggaatacttgtaatgaccgcatgattagattatggattagtaaaggcaattagcattaattattgttattttatgattatacacgattttatatcttttgtgggtcccattttcagaaataggtattagagttataaatttttcaattccagagatcttattaaactttaagggtactattaatgtcatatataaatttatagtttttaggaattttactcggcgatgatggaaaatgcaacagatggccaatttagtcacgtgagttagtttagaactttttttatttagcgggatatttataagttgatatttggaatatcaggattagcaaaggttggtgttaaatcattttacccctaagccattttaccatttaagcacttaagtg

SEQ ID NO: 220577 - DNA, 2844 bp, Cannabis indica
tcccatgtagcttcaaattcgggcagggacttccatttaatgaggacctctacctcatctaggccatttttagctgactgccgcacttgaagaactgcttcgggtgcaacttgtagctctaattcaggtgtcacgggaggcaacgttggcgatgaaagagtcgagccatgtgctcttttcagctgcgagatgtggaaaaccgggtggatggatgaggaagctggtaactccagtcgataggctaccgcacctatcttttctgttaccttaaaagggccataaaacttggcagcgagcttctcgaagcgacgcctggctaaagattgctgtcggtagggtcgaagcttgaggtagaccaagtcgccaacttgaaattcctcatggtgcctgtgcttgtcagcttggtgcttcattcgctgctgagctcgaaggagttgcatccgtaggtcatcaatggtggcatcccggtcagctaataaagtatcaactgcggacacatgcgaagatctagcgtgatagcgaatcaaaggtgggggagccctaccatacaatgcctggaatggggtaagcttggtgctcgaatgagtggaagtattataccaatattctgcccaagccaaccatttagcccactgcttgggtttctcattagcaaagcaacggaggtatgtctcaagagtccgattcaccacttctgtttggctgtctgtttgtggatgataagcggtgctacgcttgagggatgtaccttgcaatttgtgtaactcactccaaaagtggctagtaaagatccgatcacggtctgaaataatggacaagggtaacccgtggagtcggactatctctttaaggaagacttgcgcaactgttgtggctgtaaatggatgttttagggtgacaaaatggccgtacttgctcaatggatccactactaccatgatggtatcccaaccttccgatcttggcagaccttcgatgaaatctatggagatatcatcccaaacttgagcgggcaaggcaatgggctgcagtaagccagctggggtagtggctgcgtacttatgttgttgacaaatggcgcattcttggacgaatttcagtacatcttttcgcatccctacccaaaaaacctcagatttcaatcgttggtatgtcttcatttcccccgaatgtcctcccataggagtggtgtggaattctcctaggataacaggaatcaaagaagaatttcgggggatcacaatcctacccttgtacaacaaaatatcctgctcgatcgtaaacccaacatgttgtttcccctcggatatatcccttttgatgccgagaatgagagaatcttgctgaacctcagtttggagttgctcccagtgttgccattgaggtgtttgaaggttattaaactcagctatagctgctggttttctagacagggcgtctgccactaagttgctagcaccggatttgtagacaatgtcaaattcataggtcatgagtttatctacccaacgctggtactcattacctatcacccgttgctctaagaggaatttaaggctttgctgatcagtcctcacaatgaagcgtcgaccgagtaagtaaggtcgccatttatttactgcatacacaatagccatcagttctttttcatagattgacttaagtcttcctcggggaccaagagtgtggctgaaataagctatgggtcgagatccttgcatgagaactgccccaaggccatatcccgaagcatcggtctctataatgaaaggttgagagaaatcgggcattgctaacaccgggactgtactcatggctgtctttaattcttgaaatgctctacttgcctcttcttccacccaaagcaatctttcttcagttgatctgttaatggctaagctatttgcgcataccccgccacaaatttacggtaataccctatgagacccaagaaccctctaagctcgcggatgtttcggggaaccggccaatctatcatagcagccaccttgcttgggtcggctgccactccttgacccgagatgatgtggcccaaataagtcatttggcgctgcccaaattcacattttttccgatttgcgaaaagctagtgctgttgaagtaattgaagtactatggtgagatgtccaatgtggtcttcgtcactggagctatataccaaaatgtcgtcgaaaaaaaccagcacaaatttcctcagataagggcgaaaaatggcattcatcagggattgaaaggtggcgggagcattggtgagaccgaacggcattaccttaaactcatagtgtccttcatgggtcctgaaagcagttttcggcacatcctcttccctaacccgaatttggtggtagccggacttaagatcgagtttagagaatatttgtgcaccgtggagttcatccaagagctcatcaatgattggtataggaaatttgtcaggaatggtggcactattcagtgcccggtagtctacacaaaacctccaagttccatctttctttttgaccaacaagaccggactagagaaaggactttggctgtcttgtatgattcctccttgtaacatctctgctgtcttcttttcaatctcggtcttctggaattgggggtatcgataaggccgcacactcactggtggggtcccttctttgaggtttatggcatgctcatgaccacgtgttgggggtaacccttgtggtgtttgaaacacggggtcaaacttcaccaaaagctcctccaaaaaaattggttgttcggtcttctccacggttgtcaatgagggacatattggatcgggtcccccatttggttgggattgtttccttt

SEQ ID NO: 220578 - DNA, 2471 bp, Cannabis indica
aacataaaaaggcacctagcgacgcctctagttttggcaaaaccaataactagagagacactgtttctctttatggccatcttggaagatgtgattagtgcagccatagtacgagaagagggtaagcaccaacaacctatttactatgtaagtaaaagattactaggggcagtttccagatatccccctctagaaaaactcgctttgtgcttagtctacgcgtctcgtaaactgcggtcatacttctaggcgcaccccataaaagtgttaaccgatcagcctttgagacaagttttatcaaaaccagatgcttctggaagattgataaaatggtcaattaaactggggcagttcgacataacataccatcctcgaacatccatcaagggccaagctttggccgatttcttgatagaaggtataactccagaacaaattctgcctcttcaacgagatgtggaaacctggaagttatacgtggatggtgcatccaacgagcaaggttcgggtgcaggggtaatattaatatcgccagaagactttaagtttcattatgctctgaggtttcaatttgacgcatcaaataacgaggctgagtatgaagccttgatcgccggcttaaagatagccgaggcgttgaaagtcaaaagcctcatctgccatagtgattcgcagctgattggaaagattcaattactttaaaatcgaacacattccgagagaacaaaactccaacatcgatgccttagcaaaactggcctcgcagaacgacttggatgaattgaacttagttatggtggagatgctaagcaaagcgtacttgtttccgctttattgctttttggaaagcgtttcttgattcagtaaggaaagttgtggcatcggtgacctccttagacaccgcaaccctaaaagcctcaggtatgccgcacttgatgatcataagactcatgcggtttgaatggtctcacttctcataaatcctcctttgctcggaggtactagtatccgtaagtggagcaggacgatccatcattaatacaaggtcaagatccatgtagccaaggataatgaaaatgttctccttccagtccttgaagttattaccattgaggaccagtaccgaattaaagttagcagatacactagcaacaaccaaaaagaacaatacaattacataaataacatgctcatatgagaattcagataaaataataaattcaaataatggttaatcccatctcaagataccaaacacaacattaatattaagtctttggacaataatattaattatatgcggtattcttattgtagtgatcagacattgacaataaattatgtcaaacaacatgtaatccttggaataacatattattcacacaaaatatattataattgtcacacatttatcactacaaatatgcatgaaatttaactaaatattaactcacttttaaattagttaataaatttatgaatcacatacacactattattctaatattttgattaaattaatctacataaaagagatcattttaatgatattttgttttaattaatttaactaaatattagatatttttaataaattataaaactaaaatttaaattaaattgttattatactattattgttatttaaactattatttaataaactgtccaacaatatatatatatatcgcacgatacatttttattatataatatatatatacgaaatgaataatttattttcatttcagttcattatatctatacaatttactttaattatgtataatttataaaatttttaccagtgttatacggcaaagaaatcactctgggctctaataaacattaaaagaagaaaaattaagattatactttaaaaactttatcaatgtaatatagacaagcatttaagttgtcagtgcatgtatattttacgccgaacaaaattacagcggcacacacatatatgcacagtaatcgaccgtttacaactaaactataaaaatatattctgcataaaccatttaatgaaataaataccatttactatgtctgataccatatatatacgcaggatgtatatatgtggacactattttttcttactttatagtcattataaagaatattatcaggtattgaggagggttccacaaaacttgagatattttgagggaacgcctaatttaccatattatgagcatcagaattacaacaacacgaaataaatgaaaaattacaaaatacaaaatttttagagaattgattacgtaaagaaacataattatcaatattccaaatagagtgaaatcctttaagctctttgataaccatttcagaatctctctccaccaagacatagttgtgattctcgagtctggcggagtccaatgcaagtctacacgccgccgctttcccaatcaggggatctctgaaattgagcatgttaacagccgcccacacaacag

SEQ ID NO: 220579 - DNA, 3330 bp, Cannabis indica
tttacaagaataacacaaaatccatgccttctattttgtttttagtagatctcttcccacttttaaaaaacatggcatgtattaatattattaaaatatatatgagatatttataaggttttgattggtatagaatttgataatagtacaccccttcctataccattataggcgtttcaccatatgttgcaaattatgatcatagaaataaagttgtgtatattgttatacatcgtaattatgttatgtaccctctatttttttgtaattatacgttaatatatggtgcgagaaatgcatcgcatatgtacaaactctgcaagtttatatacatttatacttggtgtaattaaaaaacaatatacattactctcaatgcatcatcctagtatatcaatggattcaagttcacggacaatttattcttggatcttttttaaaattaagtgattctttgacaaaatagaaaaatgtgtgatatgaagagagccccacatgagatatatgtgcgatatgaagagaggctgacatgagatgtgagtttttatttacaaggatatataaggtacaattttagaacttggaattggggcttaaggggtatccagttttgtggaaataggtaagagcttcacacacttgactcaccacatgtgtacgtcgtttgtttgtccgttcgatcaagctatctgagttgagctagttggtgtattgtgacagtttatttttttacaaaaaaattatttaataaaataattatttttattttatttgagaaacttgtttaattaaaactgaatataaatacttagtcgtatcagttgacacttggtgtcagcaattaggttgatattttgtcaacttgggctgatttcgatgatgttttcctagaactcttctaagcatcttctccgttttcaacaaagattaagattcaactatttttggggactaaaaggaactttcgaagggctataattgggacccagtacttaggttgacatctggcactaggtccagcgcccaggttgacatattgtcaacctgagctctttccattcaagttctcgaaaaagtgttccaagcatttttttttttgtcatcgaaaataataaagattcaagaaaactcaaggaaaaaaccacaaacccgatcccttggaaacagggcccagcgctcaagttgacttggtgttgggcccagtgcccaggttaaaaatcaatctggtgcactggttttgatctctcaaataatgctaaatctaattcgactaattgtaaacaatctgactcaatactggtgatggggatacagattgcagaacacaactgcagggctgctagaaaggcctaagcttctgcaaaaattggcgttgaggcacctgcaatactctttgaaaggccgactattctctggttatgatcattaaaaactgaagcacctaaaccagacttttgaaacttggaactaaaagttgcatccactttgagcttgaaactagattgagggcgagaaaagcttccttgggaccccactggggttgagacgcccggagtgaaggtgactttgcttccaaaagatagggaattaagcagctgggcttgttgatagtcctgcaaaagattcttcacaatattttctgcatcatgaaatgagttagacttgcaattgaaaattttattatttcttgaattccaaatctaccaggctaaagccaacagaagccataattggtctttgctaagagtcttcaaacctgtaaggtaaaaatgctttatatcatatctatggttttcaatgaaaaaatctgagtgaagaactcttccaaacagacttagccttggggcattgcagcatggcatgggtaacagtctcgatttggaactgacaaagtggacaataagggtgagggagaacttttatatggtggagattaagagagcaaggaaggatatggtgataggctttccaggtgaagtgcttcatttttggtaagattttgttattccaaacaactttccaccaagagatttggcttaaggggttggaggtggttgcctgggaagggttagggatggagttagctaggtgataagccgagttgactgtgaaaatcccagaatggtgctgaccccaaataagactatcaccttgataagggtcaatagggaccttaaggatttcctggacctggtaattaaggagggaggtgatgcctaagggtagggatatgccaattgtcgctatgatccaagaagcagaaagatacagttaggttagaaggatcaatattggtaaggaaataaagagagtgaagtccaggaatccatttgtcatgagttagggaaacggttttccatcaccccctttccaaatgaggccgcaattaagaagctgacgcccctagagaagactttttccaggtttgagaagagtagtgaccagtagtagcatgaagaaaatcagagtttttgaagtatttggccttgagaagagagtgaaggagagaagtaggctgagtccatattctccaagcttgcttggcaatcaaagcttggttgtgatgaataaaagaacgaaaactaagaccaccaaaaaatttagaattgcagatagtagaccagctctcccagtgaattttgttgttattactatcagaaccccaccagaacttagagatgagacactagatggagtgacaagtggttttggggatcctgaaacacgacatggcatatgaaagaacagcctagacaacctccttaatgagagtttccttacaagctttggaaaagaacttagcattccaaatgttcaatttggaagcaactttttgaaccaagtggtgaaactgctcagaattgagtttgcctttaccatgaggaaccccaaggtagttactaggaaaaccctcactgaaaatacttagggaatttttaaactgggaaatagagtctgagggggtattaggcgagaacataatagaagattttgccagattagccgtttgcccagtggccttttgataaaggttgaaaatgtcagttatggcagcactagaattcttggacatagtagaaaaaaggatactgtcgtcagcaaaagaggatgagaaatgacaggggcaatgcgacagatccttaaaccacactacaaaaaaaatgccttatctcggcgggcccggcctgcaagattgatcaatctcgacaggcttagcctgtcgtgaatctgtgtgccgagattgaatatgggtttatctcgacgggccaagcccgtcgagattggttagcaataaaggggggcttaacccgccgagattggtgaaaatag

SEQ ID NO: 220580 - DNA, 1303 bp, Cannabis indica
aaaaaagaaataaaaaaataaaacaacatataagtaaagaaatataaaatttgataaaatgtaacaaaaataataaaagataacatatgaaacttgaaagagaaaaaataaattaatatatcttagcaaaaatatggccttcttttggactaaaatatcgattctaatttgtccgactaatttttgaaatattcaaactttaaatgttattgatcgatcattccataaccacatccatctgtaatagtacaagttagttcttcatatcactattgatgctctcatgcattactatgtagagatcgagactttataaatgatcttgcatttgaatataatgagccttgttgaatctacaattttaaaatcaatttcatatatataaggtgattgcttaagctttttcctaaaatccattttatatataaggtgattacttaaaaataatataatatatatttatatgtatgagcatgtatatgttatagtgagatttttctcatctagaaactcgagaccagactcctgtttgaaggacacgtttccaagaaaatctgagatatccataagagactcctcgagtttaaacctcgcctgagctagaatcagcgagatgatgcgaatatgatcaaagtctaatcgcattcgtgtaactcgcattatgtgggaccaaagaacggatccaactcgcatgtactaggatacgtgcgggtatcctttccatactcctgcgaagacatagagatcgattctctataatgcgagttggtcccggtgacccaacaacctcgataaaccaacatagactcatgcgtctaggttctatcagcttattacacgatgtccataaatgcgactatctaagaacgcaggcatcttagacttaaccaaatgataagtatatcctaagcccgcgagctcacaacaaaatatgaacagccaactcgagcaatagaagtcgcatacgttgctgtatttagtgaatagaaattgttattcatttattaatgtttacgtttttagtttaattattgtgaatcaatgtacaacggattgacaatgaatacaatcctggtgtagttaacttgacacttgctttgtatataaaggggtgatccaccacgaaatgagacctacggaactcttgctacagtagactaagcagaccgtgatctgactgaaccactataatcctttgtcttcttgttatttccagtttttgttaagtatttacgttcccatctcgagtactcaccatttttaggttgaatactcgcatttgttcttcatacaatttccttct

SEQ ID NO: 220581 - DNA, 1659 bp, Cannabis indica
gcagaattactttctgctgctgcaaacgcttacagtttttatattttcttatatacaactgacatttgcaaaaacacggtttttcagcaacaatcttcaaacaaggcctaaaactgtcgaacaaatgtagagagtctttgatatcatcacaacattcagaaatgtctaagtactgaagttgagggcaactattgagaattttgagtacacctttagtagtagcgcccgtatgagaaatgtttagatgttttagcttcagcattattgtggatgctatagcaaaagcctcttcatctctaccaacactcttagtaactggaacaaacgccctatccaatctttctagattcttgcagtgatttccaattgccctaatagctgagggttttatattgacacaacttatattcaaatgaaccaaacatgagagtttctcagctacacttgtttcaaatatggttacatcgttccaaaaatatgcatcttccatgttcaacatccgaagtgattgagcactatatatatagtgagtataattaaaatcaaattattaaacttaaaaaatatagagagagagagagagagagtagtagtagtaatacttacgagttagcaattagagataatgatgagtcattgagtaacaaggtgcagaaagtgagtgaagttggcctgaacatctttttatcaacattggaagtactttgaggaaacgagaagacaatcttttaatgccaacaaataagccttcgaattcttcacggtttatatcaatatcttgccaacaataaggccttgcaacaactttgctccacggtttgcaaacaaggggaaatgttgggctaagtttgtctttcaatggtaactttgtaaagattaatgctagggcttctggtaacagctcactccaacgtggacattgatactcttccatcatcatcatcatcatttatataacactgatacaacaatcaacaaagatatattatagtagaaactagaaagatatatatttaaaaatgaaaaaaatatgtagagtacgatcgagtggtgcaagatatatagatatatatataataatgatttaaatagatatataacatacctgaaaaatacaataatgtaaagaaaaggaatgagtagagtacttacaatatgtactatattatttatattaagtactctaacaatatgcaaaagaacttaagagtcgctgagcatttataatcttcttggtaaatctcgaacgattttaattaattatatataatttcaatgtttgtacatcttaattaattaaaatttggctggcttttcaactatattattattgaaaaagaactgcatgcgtaataattataaactacatgcatatatgatcatatataatttaattaattttttgttaataattattaaatgtaaaataataatctttaaaaataatgcattgaaaaggatatgtctatcgaattaagcaatgcaaccgcacgtccctaactcattataataattaatttgttaattaactaattaatgcattgggcaattgaattgactcagcaaatgcatcagaggattataactacattccactttatggagattatactgtatatataatatacatgcttgcttaattattttattaatttttga

SEQ ID NO: 220582 - DNA, 6663 bp, Cannabis indica
ttgtgactaaaattaaaattttttatagtgattaataataagaatttatatacagttgttgtctcgatttttttatttatttttatatattaataacaaagccttttgttaattgtaatatttaaattaacacaaaagcataattaattcatcaaaatagttttttttttcaaatttattgtttcatggggaactcgcatacatatcataccactaagcataggttgtgtaaatttataaattttttataataatctcaactctaatctgaatcacggcctcgactcggacccgaaccctagatcaaaattaggacttggaccccagaccccagacccaaactcggaccctaagactcgacccccaactcgaacccggacccgagtcccaaacccagaactcggacctagacctgaacccaaacttggacccaaaacccaaacctgaactcgggtccaggtttgggtccgagttcgggtctgagtccaagtctaggtttgggtttaggtccaggtccgagtctaggtccagggtctgagtccgagttggagtctgtgaggttagaatttattttatcaggattttaatttacaataatcttaatttagaaaataccccttttatgtcccagactattatgtccaacacaaaagggactcgaaaaatttatctagtctaatgttgatggactaaaaaggggttttttttagtagtgcgtatgtttgattataaatatatataatctaacatcctaaatatgaaattcctaaaatgataaattaaacatgtaaaagtataagaaaccttacattagttgcagcgaaatataatgtctccttttgttcagtattctaatattttttttcaattttgttacagagtagtaacaagtaatgaacctagattctccttccttaacccaaaaagcgatagttcttcataatctaccacaaaggtctgagtatcactttaaatagtgtggattgatactcaattcacctttggaacatattttgagagagagaaatagctatagtgatttttgaaaatcaaagagaaagagaggagattttttcttgtgtcagatctagaaattaggttaaaaattaaaatagaatcactagagctctcttccatcacttcctttatatagctatcgcttagggttaggtttagatgggctttaaaaatatacaatggaccataaaaccaaagccttggccgaaatcccatgtgggcctcaaggatttgtatttttttttttttttcatttttgtctcatttaaatgaaacactgctatcttttccaaaatatcatttatctagttctttttatttaaatataaatttcatctatttaataattatcaaataaaatatatggaagccaaagctcatatgcaactgtacataaggctttctgctctttcatgcaccaaaaatctaagctaagttgggtaaaagagggtgatcaaaatactgcactatttcactctagcatcagagaaagaagatatcaaaataggattttatccattactaatgctgaaggtaatagagtagaagaccctaatggtatcactgcagcttttctatcgtattattaaaatctgctagggactcaaatggagaaaatacaatcagttaatgctaagattgtagcccaagattctgtgattactaagtaggatgaggagctactattagcagatttcacaaaagaggaagtacaacatgttgtgttcagtattcttggaattaaagcccttgggcctgatggttataacggcttctttttccatgacaattgggattcggtgggaaatgaagtctttgaagttgttacatccattttacatacaggccatctgctcaaagagataaacacgaaagtgattactcgcattacctaaaaataaatatcctagcactgtaagtggctatcgacccatagcttgttgtaatgtgttatacgaaattgctacaaaacttatctgtagtagacttaaacatatccttcctaatctggtggcttagaaccaagggggattcattcaaggcaggtttattgacccataatatataatgatttgtcaggatcttataagatatattatggaaggaaatcaaccaagcttaactacatggtcaagttggattaacaaaaagcatatgacactatggattagaggtttttagaggagatgctacaagcttttcaatttcctaccaaattcattaagctgataatgaattgtatcacaactcctagatacccgctaatgttcaatggcaccttacatagtttctttgaagcaaagcgaggcatgagacaaggggactcgatgtctctcttactctttgttctagggaaaggtacattagtaggataatgcaaaaagttggggggcttttttaatgaaagatgtagtgaattgaagctcaataatctcagctttgcagatgatgtgctcttattttgtaaaggtgactttaaaagcatctatcttatgttgtaggaactcaaattgttctcaaaaacctcataattacagccaaatggtaataaatctgcaatatggatataaaggagattaaatgagttgttgacatttttggttttagcagaaatgatattcccttcaaatatcttgacattcctatatgtgccaagagaatctctactcaagaatgtaggattctggttgagaagatgatagctcgaatcaagacttggagctccaggaacttatcctttgtaggaatgacagacttgatcaattcaattctcttgactattcatgcctactagagtcaaatcatgatcatacctaagaaagtggtgacataaatagagggcatttgcagaagttttttattgaaagggcaaactaacatggcaggtgctgaaaatgtagcatggaataagttatgtccaagaaagctagtgggattggcttcatgaatatagctatttggaaccgagctgctctgataaagtctggtcaattgcaacaaagaaagataacctaagataagtgagtgcataatatttatccaaagcatgaggcttggtggggacacgataactcacctcaaagtagctggtattggaggaaattagtgaaaataaaagatgaggttagtcacctaatggaacctaaacaatttacattaggtatttaccaaattttttctggctacaagatgcttaattaggtacaagatagatttcattagagcaagcaagtttggtccaaacttaattaacattcctaagcacaattttttgctctaaattgtagtacaaaataggttaaaacaagagaaagacttcacagattcaacattgcagatgatgcatttgtattctctgcaacaatgttgtaaaaatagttactcatctcttctttgagtgtttgttctctcgggaatgtctatatttgttaaaaacttggcttggatggaatgcccacattattgccttgcaggatatactcaaatgaattgatagatctaagaagagtaaattcaagaagatggtcttagctgcttccatagcaacattgatgtaccaaatatggcaggctaggaataacaaacattggcaatcaagcatgttagtccaaatttgttaatctaagaaacaaaatagcacatcaagactaggataacttgtgttaggtctaaatatgtagatcatagaaacatagattaggttgatatattgtaatttctcatgtattgattcttatatagacatccatatgagatgttttaggttgtataaattagtttgttagtgcagtgaaatttttgatttaaaaaaaatatgggctaatacagtaaaaaaactatccaattgacctatattttattaaaactaatataagttaattaaaggtcaaataaaaagtctaaaaaaaatagatacacaatgatatgatgaattgtaaattaattgaggagtgctaccgtcaaccttctattataacttcttagtcaatttctgtgcctgaaaatacatgtcagaatattcttttcaaattttttttacgacagtgttcgttatgcttcatccctataaatttttgaaaagcttcgaagagtttacagtgccgaaaatacgcttgaagttttttaaacacgcgtgataattatactggaatattaagaattctacttttggtactgtaaactatttagaattttcgaaaatttacagggatgatcgatactgtaattataataaatactgctaataaaaaaattaaaaaaaaatatttcgatatataattttagacataaagattgaccaaaaaaattataatagaatggtctaattaacactcttccaattaattatataaaaataaatattaataaatacatttgtacttttggacaaacaagtagactatatgtatataatatagtattattacgtaccctttacgtaatttgtgaaagtgataaaacttttgatttgaaaccttgaattttgacttaaggatattgagatgagaacaaatttaactaatatctgtgggacaaaatttatcctgatccgtcaattagtctgacaattaatatggaatttgactattaatatcgtcatatatgtactgatttgaaagtttcactactgtttttttcactatgtatgtgatcaatatagtaattaagatttaagaatgtaatctactttgtcaattgtcattcaaattcacgttggtcaaacttcaaaaaatttcatcgtaagaggaattttataaagatggaggattggagagataattgtgatattattaatattgtttactacatattagagatgaaaggacgtacgataattcttccccccaaaaaaaaaaaacctattaaatgttgtcctatggccctcaactgaactcaagagcaatatgaagtatacatggccggccctaggcgggctaggcccgtgcttagggtctacacttttcgggggcccaaaataaaaaaataaaaaaaataattaggcttttattgaagtaatatttaagtgtattatataagcaacaaatattcatatcttagttggttgaggtggatgggcatgcataatgtccaaggtcatgggttcaaattccataacactaagtaccaaagttttaaattacaagctctattaaatgttcctttaatatattcaaaacagagtctgtacttatgtcgctataccttatatattaattattaacttaattaaaaatagtgtttgagattaattgtcgttctttgctatcttgtctaaataatattttcttaatttttgttaaatcggtttgtaaatagggttgctcattgctgtaagagcgtcttattttatgttagattgtatttttaatgagtataatgctcctcctgctcttaactattgtaacaactgaatgttattgattgaatgaatttttctttgttaaaaaaaaattgtgttcgaatatactcttaaatttaatacttttaataaatttaaaataattttagaatccttacaaaaataaataaataagtttagaatttgagtgctaattgaaggataatttttgagttaaatatacagtctattgaaaaaccaatattagttggtattggagattgataatccatgtagtgatttggtgaagaattgttacaagaaagattccatcaattaggtttgtaaaactctttttcttgcctcctcaacacctgtttggtatgtttctctagtttggtctcgatttaacattttgaaacatcgttttattatttggatggctgtttggaaaatgctgaaaatcaaatataggctcaagggttttggattagagactgatgaaatatgccctttgtgtgagattgagttggaaaatcgtgtgcacttattctttcaatgtaaatttagcaagagatttataaaggaatagttgagttggattggaattggctctcacaagtcacaattacaacttttaaggtatcttgaattatactagaaagatcaaagtgagtaaagtaaaaagggaaactacttatattcttgtccttaattattgtgtaaaatatttcatttgggcttacagaaatagagccatttggtctcatgagatgagaacccttaaagtgcttgttttgtttgctaaacatatgattgaaaatagattaattaagagaagacttactacaaaaagataggagtgaaatagacaaagcttggctttcaaatttgtatagattttaagttgagtttgttagcttcttgtacagctgtttctatttgtagtttttcttttgatgcaataatcttatttatttaaaagaaaattagaatctttattatcaatacatgaaatattaaaaaataaatattaatatttatatattaaaaaaagagataaatactattttactagaaatttgtgagtgggattgagatagctagcttgtgaaactctattgtaaaaaaaggttcatacttcatattactcactaaaattctatgaaacccactgcattcccacctataaaattataccaaacatagaatagagctcatatttttacatatcttaacacttctctcccataacaaatacctcataatgtaaaatggaatacacactactataattttaacatgag

SEQ ID NO: 220583 - DNA, 2402 bp, Cannabis indica
gttcatgatttagggtttagaattaaaaataaatctaattatcgttacttatatcattacttaccattaattttatcattacttattattacatatcattaattatattaactttatcattacaaatcattacttatattaactttattattaatcattacttatcattacttattctacatatcgttacttatattaactttattattactaatcattacttaaaactactaagtaatgattagtaatgataagcaatgatttgtagtgattagtaataagtagtgattaaaaataaataatgcttagtaatgattagtaataaagtgaatataagtaatgataagtaaactctaaaccctaaacgctaaacggtaaacctgaacccttaaacgcactacccttaacactaaaccctaaaccataaatccttaatcttaaacacaaaccctcaaccctaaaacttaaacccgtaaaccctaagccctaaaccctaatccctaaaccctaaaccgtgaaccgtgattccaaaaccctaaaccctaatctgtaatccataatccctaaactcggacctgaaataagaacccaaacgaagacacaaactcggcctagtacccaaaaagggacaaggacctagacaggacccaaacccagacctagacaaagacccagatcgggactggaacccggacatggacacggactcgaaactggacccggaccttgacccaggcttggacctagactgggaccaagattctaacctagacctagacctagacctaaacctgaactcaaacctaaactcggaccaggactgggatgcacacccggacccagactcaggaacaagacccaaacacggtctcgggcctggacccaaacccgagcttagaaacagactcgaccttgactcggagtcagactcggacctaaacatagacctaggacccaaaactaaaactagaaccataccagggctaggactacgaccaagaactggaactagaacttgacccaaacctaatgccgaacgaggaccctaaccaaaacctagacctagactcagaacggaatccaaactgggacccaaaccttaaccgagacccagacttggactaggacccagacctagtctaacacctagatctattctgcgacgcagacctagagtgggacacgaacttgaacccgaacccgaacccagacctggatccaaacctaaaccctaacctgaaccaagacccagacaataacctagacctagatttggacctgacccgaacccaaaattgtacccaaacccagattcaaacctagacatagactcaaacccatacctagactgggacctggactagaacccaaacccacacccaaattgggacccaggacctggaccaagatcggggacccaaacgtggacttagaaattgagacttgacccagacaagacccacgacctgaaccaaaacttaattgggaccccagaccaagatctagatgtagatttagagccgggacacaggacctgaggcttggacccaacccgtagtaggtgtatagatttaggacacgaacatagaccaggacttggaccaagactcagaccaaactcgaacctagacccgttcggttcctaagaaccgacccctgttctaagtcccaagttttgtttggctcaaggtgttgatccttaatctaggtacgggtcctgggactgggtttgggtatgagttcaggtcctatgtcaaggttcgagtttagattcgggtttgggtttgggtctcagttcgagtcttggtctgggtttgagtatggatcctggtccgggtctagcacctagtttgggtctgggtacgggtctgggtctgagtatcatatttaaactgactacggattgggtccaagccccgagtcctaggtctagatctagatcctggtccggtacttgttcaagttctaggtcttggtttgggtctcaggtcttggtttgggtcttaggtccctggtctttggttcgagtccaggtctacttccccgattcaggtcacggtcctaggtctcggtctgagtgtgggtctcgatccgtgttcgggtatgcatcttggtcctaagttttggcctcgtcttgatttgggtctcaatgctggccctaagtctcagcttggtcttggtgcaggtcctagacctagtctgagtttgggtctcagtcccaaaacgtgtttgggtcctagtcccgatcatcgttcgggttcacgtgttgggtctaagtcgggtccgggtttgggtttgggtccaggttctagtacttgtacaggttcttgtttgggtcttgagtaatgggtcccaggttctaggttgtgggtcctaagtctaggttcaagttcgggtcgagg

SEQ ID NO: 220584 - DNA, 1574 bp, Cannabis indica
acatgagtttgtgtagttaaatatcagtgactctcttgctctattaaaaatttatattaattacattaatgacatgaaataatacactcaaacaggagactaaattgtttgcggttgtgctacttttcataggcaaagtagttttgaagcaactataaagatcacacccatactcatttatctatcactatattaattattatttttttgaaagggggaatcaactaccataaagaaacatagtaatttaaattttatgtaaattatattatatataattaaacatatatgttaaaaaaaattattttaatcaggttggtgaggttagtttaggttgattaggcaggttgatattatttataacccgctcaatataaatattcaacgggttttattttcgtctagtttttcaatttttatttttcgtcgggttatttcaatttaatttgaacggattatttaggttgagcagtttacaaaaatttatttacagctctagtacacccttccatgaagatgaaactatcatcgacaaagaattagtaagagacattaacaccatttccctcttcgcttgtcgaatgagaacaaaaaatgtacccttacaaaagagaaaagaaacatataataggggaatcactagggacaatcttcccccctatattaccattgagaatcatcaagaacttcactgattgaacacacctcataatcttaacaatccacttttgatagtaatccaatttgaacattaccctttcaataaaaactcattccacacaatcatatacgctttaaccatatgtacatattgttagagattttattacaataaaataaaaattaaaaatttacaacttaattatataagaatcaacaaaaaattgattaaataaatatatttattataatttgtatatataagaaaggtaaaagaaagagattacaacaaattatataatatatcaaaaaaaaatataattgcatattaattcgtttattttcttttattttttaatatattgttcttgtcttaaatcttaccaaattcactttttttaaaaaaaaaaaaaataataataataaatagtttctactgtcacgtatctataatctactcatacctaagctttttatattaacgtgcatcacccacatgtacacataaataaaaaaatcaaacatgattaaacattatctatattctacacgttacattgaaaaaagtcatgcatatataatcaacacacttataagttatattattattatatttatcaacaagtttacctgttaattaataaatatatgggaattaattgctaacaatgttcttaataatgagattaatgtcatgataatgcctcgtgtcctcaccaatattccagctcatcaaatagagtctcatgtggatgtggcccaagcttttgttgttttgcaatgcctgttttattaatattagagaaatgtctcttttatcaagcaccacaaaaaaaataatacattgctattagtgaaaattaatttaatcgtaacgctctacttcagtatacaggggcggagccacagccaag

SEQ ID NO: 220585 - DNA, 5799 bp, Cannabis indica
agtagtcccagtgatctagtaagggtaaatctgggtaagctgtgcaatcccacattgcctagggaaggtcaagtgtgatgatttcaatatattgagttatgcgactacacagttgaagatgacttaaatagtttgattggtaacacctatatcaacaaggtgcatcttattttctggagtaatcttgagaactcgaaagttaagcgtgtttgactggagtaatcttgggacggttaccttctcagaagttttctcagggaacgtgcgagtaaggacaaagtacggtagaaacagtcgtgttggtttgtaggatcagtcgtcactccataaaacagctaaaagtaacatacccgtgcataagagccataagtctatgcatcttcttttagtagcccatcatgaaaaaactccaaagataagcacgcttaatctagggtaattttaggatgggtgaccacctgagaattttttccaagaagcggacgagtgaggataaagcacactagaaagactcatgtttctacaggttcagtcatcattatgaagcagccaagagtgatgtacctgtgtataagagtcattaatctgtggggaaggctcaacggaggcttgaagaaggaatgttacattccatcctgagacagatggccagctcaagaggaaaactaagatattggaggatatgttacaagcctgtgtgatagattttgaaggttcgtggggtaagtacttgcctttgatagagttttcctacaacaatagttatgggagtattataggaatggctccccatgagatgttgtatggtagaaagtttcactctccaatttatgagatgaaatcggggaaagaaagtacttgggtccaaactcaattcagcgaaccagtgaggctatagagaagatcaaggattaaatgcttgattctcaaagcagacagaaaatttatgcagatccaaagcccagagatatagaattttaagtaagggaccatgtcttcctatgagtttcaccaatgaaagggtgaaacgctttggaaagaagggaaagttgagccctaggttacaagacctttagagattctcaagaaagttggacttgtagcttatctcctagccttgcctccagtattgttagtagtgcataacgtccttcatgtgtcaatgctaaaaaagtacatgtcgaatcgactcatgttttgatttatgaaaccctcaagttgcatccagacgtgtcccatgaggaataaaaaatttagatcctcgatagaaaaagataaagtccttcaaaacaagaccataactttgatcaaagtactctggatgaattgcaaggtagaggaagtcacttggtagttagaatctgacatgagggctcaatattcgaagttgttcaggttagattttaaggatgaaatctttttaatgggaggataattgtaatgaccacatatttagacatagaaatttggagcttaaaaatgatttaattactttttatgttatatatgtgcatttataccaaaacaagacttattgtcagaaatatacatttgtgatataatttattaattatggagattctattgtaacttaggtgtgtcgggcatgttataaatgaattttggtatttttcatattttatgcccagtaatagtagaatgcaacaatttggtgccacaattatttgggttagtatcttagtagtagctaagttttgacattttgagtaatttaccataagtttgacttttccatttggtggagtttctagagaaagctattcttttgatgttagtgagataagcattaaacaagggaatttttgttagagataaccattacacaaagaccaaaactgaaacctcatctctctctctatatatatatcggttttgcactctcaggagaaaacccaaaggaaacacgaacagcccataccaaattcaaaccaaatttactcattctagctagatttcagcaacgattaaaatgggaaaagtgacttctaaactcaaggtaaacctagtttggttcctctttgtttttatagtgagtttttggttttgggaatttgtgttttggttgcctcgtgtgtttgattaagcttagaatttatttttaagatgaattgttgttgttgttgttgtgactagtttttggagtattattgcagcagtagcaggtttgggcaaagtttgagtttatgaactcaagcttttctcatccatggtagatttttgtgtaagatttttttgaggcttttgagttgtgatttatgtttagaatacttgcttgtgttgttttggaaagtttggttgagtttgagcagatttggggtagattggagttgagaacttgaagctttgttctttggtgcattctggacaacgtgttccggatggaaccttgctacctggaacagttccggatggtaagtcccagaaggggccttgccacttggaacagttccagatggcaagttacggatggaaccttgccacgaggaacaattctagatagcaagttctgaatgctcacttgttgccccaaaacagttctagaaggagcctcgctgccaagaacggttccaaaagggaggttccaaatagaaagtcctaagtggaaggtctcagttggaatgtccagatgcgatctggttgttcggacgaggaacttctagacagaaaatttttgatggagggacctctagatgaggatttccagatgggaacttccagtgttaggactttcatacgggggacttttattgttggctaggtatctcagcgttcgattgctttcatccggataaggtatgtctggatggatgatttgacatccaaatgcggtacgtctagatgagtttgattaggctagtttgattttgtttttagtccaaagagcttctgattgttagttaagccctgagagtgtttttgggagaaacactcattcgttttgccttattgtgacttaggacctcaaaatcattgagcagcatttccactagggttggttgacacacctgattatgaaagtgaattaacattagtctaagaatgcacatatatataaatgttgtatacacatgttataagctaacataccgatactagtacgttaaaggtattgagtgcatatggtaaacaagttaggaggttcaaactaaccctaccgacactagtacgttaaaggtactaagtgcatatggtaaagaggttaggatattcgagctaaccctaccaacactagtacgttagagtactgcgtgcatatggtaaagatgttaggaggtttgaactaaccctaccaacactagtacattagaggtactgagtgcatatggtaaagatgttagtagggcttcagggggtacaaactatttgtactcttgtcaagaatgtttgagactcgtatacattgggtgcgtgataattactttgtaattgggtgtatggacgcctaagctacaaacacatttaatatgatatgtttttatgcttttcttagtgagtctgttgactcacagttaaatgattcatgtgtaggtaaaagcaaggcaaaaattgaatagcgatgagtctggagctccatgaagattgttcatatttggtaagttagaccttgagtgtttagatcttcaaaatatcataagctcagtttcattagtcgctaagcaacatcttttgagctgttgcaatttttaagtgtcagaaaatatttatgggatcccggagttatgaacttaatatgttatattaatagtaaagtttgttattattataaaagttttcattaatcacatttttactaaattctttgattagcaaatgttaggacagtaattatgaaatcagtatagtgcgcttacaccagtagcgcactacagtttgagtcctaatcaggagggcttgctattgatctgtgcgtgggtttgaatatctcgaattctcatctctcgcatcttcgttccaatcatccaatggttctattttcttcgtttcttgccatccagggatctaggttcttgccattgggttgtcgattgggtttctaagctttttgtcgttctagttcaggtgtccatctgttcggtagtctatatccctattacagtcagccatggcgatcctagttcttttccatccatttgtttctgatcggagatgtttttatacgttctggtcagatttggggtttggttattctctagaaatggaggtggagcgattagtgatgggttttcggtggtcgatgtcattttaggactgtggttttcttgggatggttgtggatttatcacatggattttagttatttttattttcaataatggtgttacaacaccactttgctattattattgtatttgtagtatagtatgttttatttatggtatgagactttagccttttgttatggtgaatcgatggtggtaatttaattggctgatcatgtcgctttcgcttggcgagtgtggctctttacctttgtagtcatatttgggggacctcaaactattattggctttatgtcttgggatgatcttattcattaggataatcctttacgtggttggtaaagttattttcttttattcttatttgaataatatggttgtcattgctcaacattttttgtgagttctttggctgatagccattgataggtttgatttgtcattagttcatttaagttgcaggcttagtattcttcacacttcactactacaaaaatgagtttttgtgtcaatcaacacgtcggccttcactcaaaactgaatctaaaaaactactttaaaattttgcatcgatttgagaccgacactactttccgttggttctaaaccgacattttttagttttagcatcaattataaatagatgcaaagtagcatctgtttataacccacgcaaatgttttttttttaaaaaaaaagcccaagcccactaaaaagccctcgtataaatactaacattacacacacatacacacacttattagcaattagtcgcactccctctctccctttcttctttctctttttctttctcggatatctttcccagccgcacccaaccatgtaccaacctcaagtctctctcccttaatagtagtattttttggatacttcaaagctggctgtttagttgcccttttgttgaagatgttattaggatatattttctttttattgtaaacaacttgattagcctattattgttgtctgattcacctattagtgaatattttgattcttcttaaaaaatatataaatagccaataatttttatatttattataaatagaacatatattatgctaatttcacgatgattagcatcagaggtgtcttgtactttgtagaagtgtcatcgtacgattagttagcaatatctcctaaaagatattacattaaattatatataactcaatatttcattgcattaatagcgatatgacttaagaaatactaagcacccataatactttttaacatttttctaatattattaatttgtttcaccccacactaataaaatttgcttaaactttcgttttctttcaatgcactataggaagataataattatacaatcacaagtatgactgaatacgtaggattaggaactagctaacatatctctacaaaaagttttacttttagccacaataaaatttgtactaaaattgaaaaaattatgactaattataaattattattcctatgttgtgactaaaaggtgttatataaattaacaattaacccaagatctatttgtatataacatagaaca

SEQ ID NO: 220586 - DNA, 2164 bp, Cannabis indica
ggagaagatgaataaaaaaaagaaaatataaaattaaataaatttataattttaaatatatttttagtttttatttatttttaaaatttttaattaaaattattatttagaccaataaaaaattgacatgtggcactttatttgggtttaacggatccgttagaaaaaggaccaacggacaaataaaaactgagaccttaggtattttcaccgccaatttttgaggttgaggactaatcggcatcaacctcaagtttttggggacttttgccgcaattatcccttctttttattataaaacccaaccttaacccttattttacataaaaaaaattagatgttaatattattaaatacatacctaacatatgaaaaatataaatttcatacataagtataatcacccaaaagttacagcattatagtcatccaaattccaaatttaaatataagtcttgaaaatcatttaaagttgtccataatgattataaacttaaaataaaattgaaaattttcataaaataaattattcaacaatattcatagtgatagtcttctcttttggtgggaatctctttgaccatatatttattatctacaattcaaaaagaatatcagtagcaatataagaaaaaaaaacagtagcaatatatagccaaaattttttgtagcaatatattttttgacatagcgaaaataaaaaatgagtagcaataaataaccaaaaaaatcaatagcaacaacttctgtttttgacataaatataaaaaatcagtagcaaatttagataaaattttcattcatcacacacaaaatcaagacaacaaaaggttataaaaaatactacgacataaaagagttggacaccaatggtgcctagtattttctagagatgtcgtcttgtgattagttagcgatatcccttaaaaattattatattaaattttatgaaattcaatacttaattatactaataataatattacacttagactagtcattttttagctttgtagatggtctaagatatcaactatttatattagggaaaattcatgtgattccttttgtactctccaaaagtttgtagtgaagtttcggaataatattgtaaattattttttctaactaaaaaaacaaatgaatacatgtatcttgtaattttataatggttatatattgcgtacaaattggcatgtatatatgtgttgggtatgtccccaaacaggtagacccaacttgcaagtcttaattaattattgaaaaaaaaaaggttaaattaagtgtaaagtatataagttataataaatatgatatgattaacattgtttacctttttttttcgatgaataaaacattgtgtacctgtaaaaggatatctatctatcgtaagataagtcctatattttaatgaatatctttccagctttatcgagaacacgtaattgccaatgcatcaaatatataactagataaacagatagggttggttggctcatgtgcatttagcaaattttcttggtaattcttgattacaatttacttaattaatattaaattgtctactctatatagtattatagtgtatatgtatcttttagtccatgtttataataacatataacattgtttaaattcgacaggtactataaattgttgtgttaaatttaacacaaaatataacataaatcaaattttatataacaataaataaatttgttatttacttttttgtcattaatatatgaaacagcaactcaaaacagagtgcaagaagagaaaaaaagtgtgaaatgaaaagaaagtcttagaaccaaaaatgcttgcttgtacattatgagaaggaaatgttttacttatagtgactgtacagtcaaaataccaacaaaaaattctattataacagaattgttacaagttatgacagaaaaaaaaaatctaaaccaacaaaattaactaattttttgaaatggcttccctatatatggtaaatgttgaagctagaacttgaatgataaattattattttgaaatagtttttcgtgctttttatatgtccaattgttgacttttactagaatattattttagtgttatttttatttggattatgttaatttgtgagtttagatgtaatattaaattctggtgggataggatgcta

SEQ ID NO: 220587 - DNA, 4501 bp, Cannabis indica
ttttattttattgtattatattaaattaaataaaaattaataagatatataattttacataaaagtattgtgtaaaatacaatttaatataatactatacattataatacagcaatttatatataattatttattttcttaaatagtaagttacttttttattttcttaaatagaaaattaaaaattatttttaaattttttgattgagaaattaaaaatttaaaaaataaaacaaaattattttcaatttttttttaaatagtttttttttcttaatatatatttttagaaaatatttttacttttttaataaattaattaagaaaatattacaacacacttgtttgaaaacatatggaatattgacaatattgtaagttattttaatattttttttgaaaacatatggaatatttgttataattacagatatatatatatatttgacattttgctataatattcaagtagtagctaagaaaatgtaactcattaattcatagatataacatacatgatactttcatcaaaaaaaaaaaaaaaaaaaaacatacatgatacatggattatagtctactcacgaacacacagagataaacatacatgctgctctctgtgaagactgaagagcctcccgttacaagggtcttgtactttgatgcatggtagaatggtactggtcacgtgagtcgtgacgggaaatttgtaagatttatacttgaaaaacaccttcaattccactaaaatccaaaaaattgtttgagattgtaaggccatgtggcatcagggcccccactccagaacatgtgtgatagttgcttgtatgccttttcagatggatgaccagaatcaaagaagaagtaatcaccaacatcatcacacaactcaaactctttctctcctctcatcccaccacagctataaactcctctgtataaaccactgccacaacatcccatactaccatccttgaaaccttttcccagaaaaggaaaaatgaaaaatattagctaatgaatttatttaccaattaatgaaaggaggaaacaagtcatataggctgtataagagctttaccatatttggaagggtcatcaattcttttactcatagaagtaaacaaatcataaattgtgtagttgaaactattatgttcactctgtatcttttttaggactttaggaagtagtgcattgtgtattttagccagagatgtaatttcatcatagcaaccactttcattatctggtttaagcattttgagacttggaaggcaacccaatggtggagcatttacaaacccaaatttccttcctcctcttttgtatatttcctgatcaaaacaaaaaaaatatatgcatcaacttattaaccataacccactttcagatatacaatcatgaattcactagagaactatataaatatgtagtaacagtagtatccattacttgaagaacttgggtcacattgcctaaaaccatgcgagcgtattctttattaaacttgtcgtcggaaacagtggagttagctttaaaacggtcactgtaatcgttgacacccacgctaaacaagtaaacagctgcagagatcaatttcttggcttttgcagggcctagtgtttgactcaaccgcttcttcactttcttaaagtactttagttgagtatgaagatcaaccacctaaacagtaataatgtacccaaacagaggattcaaaacgaattaactcattatatgaagcttaaagaaggcctggaaaattaagattacttacaaaaccttggtgactctcaacaagagctccagccccaccggaggcaaagttcactccgtatgcatagttggaaaccccaggctttaaatatgggggaattaagggaaggttggcatattcacctaaaaaaagtagtaataataataatagtagtagaaagaaaaagatcatttttttagaaacatatctactaaataaagtgatgtattgatggatacagagttccttagaaatcttactgataaaatcagggattagacggccattggagaatctaccggtgggaaaacgaaaaaaagtcttcccataaggatagaagttggctctgtattcattagtagtgttgatgtaattgttgttaccggggtcgtatagtgaatcgccgaagacgaagagggccacgtgtttttcaggcaactggggatggacgacgccggagactgaagggttaagaaggagtaaagataaaaaccagagaaacgttaaggatgttaaccgcactattgtcatgtctcaatgtgagtcgctctttgttttgtttcattaaaacgctcaatgtgaatctcatttatgaaggactagggaatcaggatatcgacgattagtctagtccattcccacggttttcatacacttctatttttagtctttctagctatttttttttcaaatcagcatttcccatttttttttaaaagaaaatactaaaaaagaaataagaagtgattttcaaattcacacatattgtaagagggggtaaaacgtcacatggtttggcctatttggattgccaaaatttcaaccataatattatatactttcatacattgctaacaaaaaactataatttatagataaattaatcaaatttgttatgataatataatttttagcttgtacatgtagttaaagttatttgttatatatagtttcttcaattgtggtaaattagcgttacatttttagcgttacattaataagctatttttcatttttagaaaaaaaagaacgaaatgaaatttatataaatgactaatttacggcataaatatttaaatttaactcttggttgcagataaatacataagtttaattttttatagtaataatacttaacttatatgtctgaaactttagtaggtacatgtccgttaactgtcaagtcaatatacatgtgtcatttttttattggtatatttaaataaatttttaaataaaaaataaaaatttaatgacttggactaatcaaaaactaccatgtgaccattaacttgacacttcataggtacctacagaagttctaaaattataacttaagtattattattgtaaaaaattagacttaattatttatttacaactaaaaattaaagttaagtatttatgctataaattaatcttttcctttctttaaaggttaaaaataaagacgtccttgaagatatagataaaatcaatgcccccaaacaaggtcgggcctgagcttaggcggactaggcccgggcttagggcccacccagttcagggtctaaaaaaaatattttctctttaaaaatataaatattttttaataattttcaaaaatactatatatttttcaaataaaagacccaataattacttttctaagatcaaggcccataatatatactcctctggctttactaatcatgattaatatcacatttcgttgtaatacagctgtttacttgtatacataggaggacctagggtgttgagggagggctaaagcccacctgaaatttaaaaatatgttaatataccgttcttattttttatatatacatagtagttaaatagaacaattagttaaaatactttaaatttacatgagagaccatgttttaaagtttcttatccctttttttctacgtgtatctacattttatttattaagaaataaatgaagtataagattcaaactataatcaaacttatgaccactagaataggaggatgttgctaaaccatcatttcacttaaatttagctagttatttattgttttggattatattaaatatataactaagcctaccctaaaattcaattcgaggtccgtcactgcttgtatatatattacttgtaaatataattaatcagatattaatatcacatttctggttttactcatctgtagtacttttatatattacatattttcctttgtactaagacaatgtgcattaatttacatagacgttcatggattaatacgtacatgcacacagaaataaaagttacttatttttataaaggatataatattaaatactaagactatgctcctcctctatgtgaagatcctcccggtagggtcttgtcctttgatgcatggtagaatgtatattgggcactaaaattcaaaaaattgtttaagattgtaaggccatgtgacctcagggcccccactccaaaacatgtgtgatagttgcttgtatgccttttcagatggatgaacagaatcaaagaagaagtaattaccaacatcatcacacaactcaaattctttctctcctctcatcccaccacagctataaactcctctgtataaaccactgccacaacatcccatactaccatccttgaaacctttcccaaaaaaggataaatggaaaataatattagctagtaaatttatttaccaattatagaaaggaggaaacaagtcatgtaggctggtataagagctttaccatatttg

SEQ ID NO: 220588 - DNA, 6009 bp, Cannabis indica
gtctagttccatgtttgggtctgagttcgggtctgggttcgagtcctgcgtccaggttggggtgggtatctgggtctcggtcccgatttgagtctaagttttagttggagtctaggtccttgtccaattacagttttgggtctaggtctaggtctggttacagttctaggtccaagtccttgttccagtcctgttcccaggtcccagtctacttcctgtttcgattccaattttgggtcacaaggtaggggttcgggtccaggtttaggtctgcgactaggttcaggtccgggtttgggtttgggtcctggtcctagtctgggtttgggtcttggactgggtcccagatcgagacaccgacgacgggttcggtctaagccccaggtccagatcttaatcttgatctcaggtcccagtctagttccattttacgagatgggtccgaggttcaagtcctggtttggggtcaggtactaggtcccagtccttgttccattgccaaggtctctatctccagtctggttccattttacgagatgtgtctgaggttcctagtcttggttcgggtttgggtcttagtctcagttcgagtttgggtctcaatctgtgtttttatctgggttcgggttcaagttttgttcctggtcctggtcctacttctagtccggttctagttctagttgcaattctgagtttgagtttgggtttgagtttaagtcggggttcaactcctcgtccgagtttaggtttgggtccagatttcagtctaggtctgggtcaagctctgggtgtgggttcgggttctcggtctgggtcctggtctaggtctaagtcccaagttctgatcatgatttgtgtccaggtttagttccgcgttttagtaccaagttttgatctcgacctgagtctaggtttagtttcgtgtctaagtcttgggtttcgatcccggtctgggttcgcgttcgggtctgggtccaggtctaggtttggatcttattctggtcacgatttgggtcttgggctaggcccgagttctgttctatgtgtgggtccgggtcctggtcacgatcctagtcttgttcgagggtcctggtctggcaagtcttattcaagttccagttttaggtcctgggtctaggatagggtccgggtttgggtcctggtctgagtcccaaatctggatccgtgtcacgtgtccaagtctggttctggttcaggtcctgggtcccaggtctgagtttgggttctgcaccgagcaggggtgcggttctaggtccccgcccatattctgtgtcttgagtctggctccatgtttgggtctgagttcgggtccaagtttggcaccgagtactagtcttggttgcgatacgggtccgggtccaagttcaggtctaggtcttggttggagtctgggtctttgttcgattacggttctaagtctacgtccaagtctgattacgattcaaggtctaggtacaagtcctggttccggtcccgttcccaagttccgatctacttctggtttcaattctaatctcgggtcacaaggtacgggtttgggtccaagtttgggtcttggactaagttcgggtctgggtctgggttcgggtcctagtctgggtttgggtccggggctttgactaagggtttagtccaagccccgggtctagatccgaatcccaatctcaagtctctgtctggttccatttcgggtgtcgggtcacgagctgggtcctaggttcaagttcaagtctagggtcgggtcttgggtcccggtcctagttttgttgcccaagttcctatcccgattcaaggtctaggtcccacatcggtctggtttgggtctcggtttaggttcgggttcgggtcctagtcgagctttgggtttgggtctcgttcttggtccttgtcttggtcctagtcctagtctgcttccagttccagttgcaattccaagttcgagtttgggttcaagttttggtcggggtttgagtttgggttgctgttggagtcctggtccgagtttgggatttggttcagatcctggtcttggtccggatcaggctccaagtgtgcgttagggtcctgggtctggatcctggtttaggtctgagtccaaggtttcgatctcgatctcagtccgtgtttagttttgggtcgaagtcttgggttccgatcctgatctgggttcgattttgggtttgggtgcaggtcaatgtttgggtttgattctgggtctgggtctgagttcgggttcgggtttcggtttgctcttgggtatgggttcgtgtccaggttcctatcttggttttggtccagggaaggttttgggtcagggtctgggtccgactttggattcccgggtccaggtaaggtcctggttcgatttcaagtcttagagttagatctaggtatgggttccggggcctaggtccctggtctaggtctccatccatgtccggttcctaggtcctgatctgggtccaggttgaagttcgggtccccagtcttggttttactctaggtctcaaatcgggttcaggtctatgtctcgatcccagtcttggtccgggttcgtgttcgactccttgtaagggtttggatccttgtctgggttgcgggtctcaggacccaatgagggtttaggaccaggtcagctccaggtcctagtccgggtcctggtccaggtctaggtcccaggtctcaggtcccagacctagtcaatgtcttggactaggttctggtctaagtatgggttatggtttgggttcggttcttgtctaaggtccaggtcctagtcacagttctagtccaggtcattagcaagtaaaaaaaaaaatcaaatttcataaaaaataaaggaaactaaaagaaagacaactttccaaataaaacaaagacaaaataaaggaaacaaaatgaaaaaaggaaagctgccaattgccttggaaaacgtgataagctcaacttgggtctaaattgagtccactttgatgagaaacacaaattttttctctccttcagtgttgactgcggtctcctctcgttttaaaatttggttgactaagttgttgagttcttctttgaatctcttggcttgtgccctggtcaccgtgccaactggaactttacttgtatctttagctttagtgttctcatcaccgggtctcggtctgggtctagattagggtcggggtccgagtctgatttcgagcccgggtatgggtttttcagatctcgatctgggtctagttctttgttaagctccagttcgggtcctgggtctgggtctcaggttcaggtctgtgtctgcatctgggtcttggtccaggtcccgtgtttggatcccggtctgggtcagggtcggtattcgagtctgggtctgggttcgtgtccatgtttaggtttgaattccaatttaggtcaggggcttggtctgggtctgggatcgagtcctgagttcgggtttgagtctcagtcctagtctgggtctaggaccaggttcgggactaggtccgagctcgagttcctaggctgggttctgtctagttttgggtcccagtccaggtcctggtcacggccccggttctgttccagggtcctggtcatgttcttgttcaagtttcagtgtcgggtccaaagtttaggtctcggtcttggtcctggtccggctttaggtccttgtccgagttccacatcaagacatcgactatgggtcttgtccaagccccgattctctgacccgaggacaacatctggatcccaatcatgcgtcctagtctagtttcagttgatgtccaaagtccaagtctgggtctgggtctaggtctaggttcgagactgcggtctagttctaggtctcgatcccagttctaggtcccgtgtaatgtttaatgttcaggtttgagtttaggtctgggttcgagtttcgattcaggttttggacccaatcgcagtgtgggtttttgtccgagtccgggtcctggtccggttacagttttgggtctggatccatgtccctgtcctggtcctgatcttgggtcctgattcgcttctagtttcgcttccagtttcaagtcacgaactacgggttcaagtcctgatttgggtccagggagatgttcaggttagggtttcgatctcaagtagggttcgaggctgggtcttgttccgagttcgggtccgggtcaaggtcccagtcccgttcaaagatctcggtccggtttcagttcaagtttcagtgttagttcctgagtttggagtgggtcttagtatatgtccaagtcctggtttgagtttgagttttggttcgcgttctggtctaagtcctagatctagacaccgactatgggtcgggtccaagcatcgagtcccagagcccaggtcacgaggtgggtcctatgacaaggtttgcgtttggggtccggtccccgatcctgatccaagttctgagccccaagttctggtccaagttcgggggcccaattcccaggtcttggtcctgcatctatgtttgggtcctaggtgccggtctgggtcaatgttcgtgttccgattcgggttcaggttcgggttcggtccgagtctaggtcccagtttgggttcgagtcaaagatttgctcccagtcccagtgtgggtcttagtttcgggtcctaggtgcgagtctggttcttgggtcctgggttcggccccaattttttggtctgtgtctaggtcttggtctcggtctgggtccaggtcccggtcttagtttaggtcccaggtcataagtcctggtctagttctaagtcttggtatgggttctggtctgagttttggtttaggtttgggtcctgttacagtcccagtcctactctaattctggttccgggtccggtatccggtcgaatttgaacctgggacctatcccaaacccaaactcggacctagacatggatctagatacaaacctggacgtgaaccgagacgcagacccatatccacaccaggatcaaaacttggaacctagatctggattgagagccagacccaaacctggacccgtacccaagacttggactcagacctggaccaaaacccagacccagacccaaccgtgaactcaaaccaggacacagaccccgaccccgaccccgacccgtacccgaactcggacacggagtcaaaatcgaaactgggactagcacccgaacccaaaaatggacccgaaccttgatgggagacctggacttgggcctcgaaacccaaacccggatcggaacccaagactcacactcggaccaggatctggactcaaaccaagaactcgaacccagatctggaccaagacctggattggaaacccgaaacgaaactcgaggtaggacgtgaaccctgacatggccttagactcggaccgaaacctaggacccagacctgcactcaggacgcgggcttcataattggcactgagacccaggacctgagcccagacccagaccctaaactaggaccgcgacaaggacttgggaccgaaagtgcaactagactaggaccggataccaggatcttgatcgggacttggggcttggacctaacctatagtcaatgtttggatctaggaccaataccgggactcaaacccaaacccaaactcggacccaaacatagaccgaaacccagacccataccccaaacccaaactcggacccaaacatagaccgaaacccagacccataccccatcaccgaaactggaagcaaaaccggaagcggagcgagacctgcgaacaagaccaggggactgttgaaatttatttacaaggatcttagatctactcacaagtatgttgtttaacaccctaaatatgaactttctaaaacgataaataaacacatacaaagttaagaaaaccttacaatgatggcagcgaaataatgtctccttccactcagatctctaaccctgtatccttctgtcgcagagtattatcaagatctgagcccgaatgtccttctctttgtgtgtgt

SEQ ID NO: 220589 - DNA, 3811 bp, Cannabis indica
tgggttgatgctttccaaacagcggtgtacctaattaataagttacctacacctgttttgaatcaaaaatcaccacttgaagtcctacttaacaccaaaccagactattccttcctaaaagtgtttggggctgcttgttttcgttgtataagaccctatcaaacacaaaagtttcaatttcactcactaaaatgtgtgaatcttggctatagtgagtctctcaaaggctacaaaggcctaagttcaatagggaggatttacatatctagaaatgtaattttcaatgaaaaaagaattcctttttaggagtggtttcctaaacacttatgctgctgaacagcaaacagttgttcactatcctcaatggtctgagctacctaatttgcacccttttggtgctgaaaacacttcattccctgctgattttactcctgctggtgcagactctcactctcaaagttccctagaagcagcatcaactaccaatacaactgaaggttatgaacacattgatatttgtagcacacacactaattattctgaaagtttatctgcaccagctgttgaacaagaaatgtaggaacaagaacctgctgaactagtagtgcaacaaccagtttcatctcaccccattgtgacctgtgccaaggctgggatcattaaacctaaagtctaccttggtcagaccaaattgaacccgagccttggtgtacctagttgcattgaggaggcactcaaatctaaagaatggaatgatgcctttgtttcttacttgaccatttaacttatctcttcaataggttaagtccaaaatataatgcctttgtttctccaatcttcaccgaatctaaaaaacacctaatagaagagattaatcgttattgcttagctatgatgcatgtttggacaggcaaaatacaaccactactctttgctccctacaagttactttaaattccttaacacccaaaatccattcctataaatgcacccaaacctccttatacattgtttaacccccttgcaaaacagaccttcttaccctcatgctccacctcaatcttgacctcctactctgaattggagtcaccaaccttctttagcaccacctcactgtaggcctccttatagacctgaattccaaattttcttcaaaccaagccacacaacaccctttttctatcatcacaaaagtcttatgttcatccctccacaaccaccctacaaacagtttgatgcctatctcaacatcaaacttctttacctgccttccctcctattttctcttcataccaacctcaaccctgaccatctgctacatccttaagcccttatacctcctcttgaattcatgaccctaagtggtcatggatttgggtgcctcccaccactacactcctgatctcaaccttttgagagcttctcatccatatcatggaggcgataaaataactattgttaatggtatgttttctcctatctctaatgtaaattatcgaactttacttgctaatgattctttcctcaaattgtgtcaagtttaccgttctccttccttatcaaaaaattttcttagtttctctaagctctgtcaagataatgatgcttatgtccagttttatccttattgtttctatgtcatacactaagtcagccactaactccttctcactgatcttcttgattaaggatctatcatgtttctccatcctccttgtagccttcatcttcaacatcctctgtctagcttctactatcttccaaaaccaatgttcacttgtggcatttcctcttaggtcatcccgctagtgaaaccgtgtgttaatgttgcttcgttgtgtaatttttctttttcaaaaaaatattactatagtattgttggtttgtcttgtcaatttgtaaattcacaccgccttgcttttcctaattttgtatctcaggctcaatttccttttgaactaatacattgttatattaggggtccttcccaggttactacaatttctggtgtttgttattttgaattgttcattgatgattattctcgttttacttggttttatttattcaaacccatgattttcactcaatttaacggtaaattaaatgaacccgctcatattagggtggggagttttgttccgtttcaactttcgtccactctcatggcattcttcatgatatttcttgccctcaaactccacaacaaaatggtcgtgttcaaagcaaaaaatttcatatttttgacacaggtctcacccatttagctcataattccatgccccttaacttctgaccatatgctttatccatagcaatttatcttataaatcgttttcccacttgtgtccttaagtctcatagcccatttcaggttttgtatgacaaacttccctcttatactcatttttcatattttttgctgagtgtttccctttcttgcgccccttaatgcccataaacttgaattcttctcttccccatgcgtcatcctcagccacatcatcaaaaacaagagttaatgtgtcttcactcattcacatgtcgcatttacattactcttcatgttatttttaatgaaaatatgtttcattttgcctcctcatcttctatttccccacccattaattttccccacactataattaattcattgccttttccttctctaaactttactaccactgtcaaatctccctctttgtcccctactccaatccctaatacttctattcactctccattgttagctacttcttccactcctcacacagtctcctctttcaaatctccatcttctaacaacactatgcctccttcaaactattcctcctctattcctttagtagtagagttacatggtcaactaccattgttaacttacatcctatggttactcatgctaaagtggacattcataagcccttgttattttatagtgtggctgcaggtaccccgattgtaccctcctcttttgaagaggcttccattgatccagtattattgcatgctatggataatgattttgttgctttacgttcccaacgtacttggacattggttctccttcttcctagctccaaagtcattggctacaaataggtatactgtattaaacttagttttgatggtttggtagatcgctgcaaggcttgctttgttactaaagggtttcatcagactctgggttttgatttccatgagactttaagtcatgtcatcaaacacactactatacgattggtgttatctttagttatctcttttcactgtcccatccaacagattgatattcaaaatgattttctccacaaagacttgattgagatagtttacttgatactaccccaaggctttgttgatcccaaattccctcaccatgtgtgtaagttgtcaaagtcactttatggtttaaactaatctccataggcatggcttttcaagcttagtactgctcttctagaatgaggttttcatgcttcaaaagctaatacatccatgtttatttagaagtcaggttgcaccatgttgatcctcttggtttatatcgatgatatcaccgtcttgggctcttcttctaccattattcagtccttgttgtgctacttgcattccaaatttgtggtcaaggatctaggctccttacatttttttcttggcatccaaatcctccgctttccatccagactcgacatgtctcagattaaatacatacgagacttattaaccaaaatagatctgttggattccaaactagtcaatacacctctatctctcactcccctctccctccatgatggttctcccctaa

SEQ ID NO: 220590 - DNA, 3808 bp, Cannabis indica
ggacctatcaccttggatggtgcggtagagcttctaaattaatattaaagagcattgttatgttattagtgaccagtagtgtttagcatttttttaaacatgtcatcttacgattagagtgatattctttaaaaattacattaaatcatatgaaactccatagttaataagacttagtgatatccatatgtaagaggagtgctataggcactattggtgtctttttagtattttttaatattaaaaggcattaagtattattacaaattattattggtgtaattaaatatgacatttcatataatttaattcagagcaatattattaagtactagtgatacttaatactttcatatatagatggtgctatatatacgattagttaacgataatttttaaaatctacttattaaattatatgagattcgatattaaattaaactaatattaatatcacaccgaaaaaaatataaacaactagtaatattttttagcaattctctttaatttatttctaccggccatttaattattacaaggcaccacctcaacatatgatgatgcacatagcaatgattgtaagcacataattgaaaatggtgcattgttatcttcttgaccatgtcatgtatattactcgtggcatctataaaataaaattacatttgactttttggaggtggtggtgtacaaatttggtgattcatataaaatatttctatatctataaaatgaataaaaaaatggaaaggataagtgaaactttcttgtccttttctccactcttacacttttttctctatttttttttaaaaaattttttaactagtctatattatcttgaatatttctccttaatcattttataatttttttttgttgtacgttactccatttttataattttatttttatttttgagaatgaattaatcaataatattataacgaatacatcatatatatttttatatataaaatatagctatttaacaatttttgttatacttcaagaatttaataatattccgttaaatttaacggtattagtagaattaattttataaatatatatataaatattaatattatctattttacattaatttaaatatatattaatgttaactgtaaatttagccaactaacacatagtctgattaagattgaattttgtttatgactgtcatgtggggaataataataaatgtaaaagatacaagaatttatagaggtttggcccctttaattaggtaatgacctactctcattttgttgtattcactattgagataataccatgcagactacaggctgaaaccttataatttttagctatgacactcttcagtattacaataataagatcaagtatgagaaaacttgtgaagtggtgagaagatgagagaatgcaagagctctgaacacttaggatcttagtgtatcataagtgcttgtgaagggtcccctttcgtgtaaggttaagaccctttatataggagtagggcattacaagttgttattcaaaatatataacaaataaaaaatatccctagaaaatagggcagttacattttggtgaagttttcatacttttgagggtggtttgaagtgtttcgaagttgtaggagtcctggggatgatttggaatcttctagaatgcccacaagaaaattcacaactgttacggcgtattatgtgcattggtcggccagccaaatctgaaggctgcccggtatatgggttgtcatccatggtcgggcagctagaggtccggccagagtcttgtcaatacttttgtatctctgtcttcgataataaattgttcatgatccccatagctttgatggagattttgatattaggatgaacttaatttagaaccttgaatatgtggatcttgtaagtctccttgctcttcttgtttgagtccatcttgcaaccctaagatattaagggttagggagctgcatgacactaccctgactagttagggctgacttgtcttccacgtgtctttcacttttggccatgtggaggtgtaacatcatgtggacaaaattttggataacatttgccccctaagtccctgtctgaacgcctattcggataaggactttacactcgctctggtattgtaatgccctttgtcgtgtagctatgcatggtcatactttggtatcttcgattaatcagccatcaattactatgggaaatcgtgttgacggttgcacactatcccattttgaaactcttggctttctctctcccatgcacaactatttttgtggaactaactccccattaattcttttggggggcaaattgttttcggaactctttttaaaggcttcattccctcattcttcattttttacttttcatttctcttttactcttagaaaattctctctaagaaaaaccttatacgaaactcgaaattccccaaacctgaagctctgctcttcaagaagcctgatccttcgagactttggctatttatagttatgaatcgtgcctaccgttcagctcagattcgaccacgtctagtcctggccaataggtaattctcttgaacttctcctttttgtgaggacctcattgactggggtgaagctttgttcatagcgagagcaactaaggaaggaatatctagccagattggtgaagcttgccaagtcgagagttgtactagccaggctgctgacaagactagccaggatggtgatgacaaccaggctaatgatgttagcaggtgattgatggccaagctgccaatccttcgttggaagttgctgctacccaattgacgaggctattgttcagggccaagttgataggacctttgaccctctgactccgtatgaggtccctaagaactagtgaagtctttatctttatttctatgtttgtttttgttgcacgaccttaaaggccatttacttatggacaagtaactggccaaatggcttttaatcatggcttcaccttcttttgctaaatgtatagttgaccgggcaacttttaatcctagacgtatgcattttatgcttaattgatgttttccactcgcacataattagccttctatattttgcttaaaaaagttttaaatttgtttacttaagtatttttgcgcttattcgatgttgtgcggtgtgggtgtcctctaagtgattgaacagacttatggtctctttgtcacttgacaattaaccaagtacaatagactttgcctgtgtatttcttgaaggacctattgcactcatgttgaactaaaaagaaattaactttaaaaagctaactattagcaagttatttaatttgacacaattcaaaaaagaaattaaaaagtctttatatatttattggtcttacaaaatgtgttattgttgtgcaaagtacacattttttaataaaagcttacaaatctaaagcctgcttttaaaacatatatttgtgaaccatgcaggaaccactacttaagagttaagagtggtgtttttacaagttggttattggtatagtactttttgaaatattttccattctagtatcttagtaggagaactaattcaatcttcttattgtactagccgagtttgtaagcacctttacttgtaatttctgacttggtatggtctttctaagttatgtccaaatactcctgctgcagaatctttggtgtttaggaatactcttcgaaatactaagtctcctacaaagaactttatttccctaacttgtttattggagtatcgggtaactttttgctggtaggcatgcaactttaagttaacttaatctct

SEQ ID NO: 220591 - DNA, 3106 bp, Cannabis indica
ttaatcacataatcttgattactttctattttgctgacgacacaataaacaagtaatatttaacgtgataaggatttggatgaaattaaaaataaaaataaacatataaatgatcatatgaaccaaaatgacatactaaataagtaatgaaaataattttagttctttattgataattaaatagaaaagattacattcaaatagagttttatttagggcacaaagcccaataacaacctgtaattataagtctattagatgttttaatgtgtaaaccgtggtatacagtgccctttcactacctcaaaacctctttacagtagtctagtgtattgtagtaggagtctatagaaactgacttagcttattgactgtaaaagagaggtccaatctagtgtgtgttagatattgatggcctccaataatgctcttgtactcagttggattgttaaggggctcccaatctatttttgacaatggtttgttgactgccatttgagttgatcatagtttaaggtgcatcatcccagttctaccaagagttcttgaacatacttgccttggttaagatgaaggacagtctcatctctatgaactttgattccaaggagtaatgcaagagccctagatctcccatggcaaacataggatgcagcttattaattaattgattcagcttggtagtgttgttacctatcacattaacatcatccacgtagactaaaacaatgataactaaacctagaactttgtaaaaaaaaaataaggatgaatctaccttgtagttcttaaagttccaggttatgagagtagctttcaacctgtcataccaggcccttggtgcctgcttcaaaccataaagggacttggtaagtttacatacttaattttgttttgattcatctacaaaagcattgaggttgctccctgttgtgcaagaacaaggctgaaaacaacaattaacaaacaataacaaaacaatataaaggatcaaaagagatcaagaataatgtactgtacagaatgaataagaaatcgaattcaccaagaaaccataagaccggattatgaacatgaagaagaatctttattgctaaattagctttaactataatgaatgagagagagagagataaaaccaggaagatgaatcaattacaatacagagacatttacagtaaatcctcacatgagggaagttatttcatgaatggacactccctttgacatccctccataaacactcttacaatctctattttctgttttctcaagctctctctcagcaataacaaatcataaaactaagtcccaactaaatcaatgagaaagaaatttatatataggtgtaggctgcaactaattttgatgccaaccgaattagttgaataggatagttggtgatgatgtggcaaactaccaattcacatgtgtcttaattacaacaagttttaccttaattgagacacaggtaaactaaagtttgtgaattttaacattcttcaatgttaagcaaggttaggcaatgcctaaacttgtccaaagtgacacacttggtaagcatgtcagcagggttgtgatctgtattgattttcttgacatggacctgattgctagtgactatgtccctgatgaagtgtagccttatatctatgtgtttagacctctcatgattcataggatttttcatgagatgaagtgcactttggttgtcacagtgcactgttatatcatcatagttgagcccaagttcactagtgaatcccttcaaccatagtgcctctttcattgcttcagtgacagccatatattcttcttcagttgaagataatgccacaaccttttgcagtgttgatttccaacttacacagccaccaaacacagtgaacacatagccagtgagagaccttcttgtatctatacaactagtataatcagaatccacacaaccattaacaatttctttggcaaatgactcttttccgaacataattccaatgtttagggtgcctttgatgtacctcagagtccatttaagagcaaaccaatgttgttgcccaggatctgtgaaaaatctactaaccatgctcattgcatacccaatgtcaggtctggtacaaaccatggaatacgttaagttgccaacagcatttgcatatggtacgcaatccatatcagatctttctctttctatttttgatgattgctcctttgaaagtctcaaatgatgagataatggtgttgaaacaggtttggcattttccattccaaacctggttagcaccttttgtaggtatccgttctgagataataaaatcgtgtggggtctgtttcttttgatgtcaatgcctaggatcttcttagctgatcctaggtcctttatttcgaattctgcattaagcttttcttttatcttatttatctcagatctgtctttgccaattaatggcatatcatctacatacagcagtaggtagacatgctgattaaagtaaacacaagaatcataactgctttgactgaaaccaaaggtcttcatgaactcatcaaacctcaaatttcattgtctagggacctgtttcaaaccatagagtgacttgagcagtaggcatacttgattaggattcccatggtcaaatccctctggttgtgtcatataaatcttttcatcaagttcgccatgtaggaatgctgttctaacatccatttgatcaatctcaaggtcatactttcctgctttagccatcatgacccttgtggatgtttgcttcataacaggtgcaaaaatttcagcaaaattagttccttccttttgagtgaagccttgggcaactagtctagctttgtaccttacttctccattaccagtttcatcttctttgtgcctgaatagccatttgcatcccacaagcttttgtccctatggtttgttgacaataatagatgttttgtttttcttccaggatagcatcgcatcatcaatagctttgttccatttcttgctatccttacatgtcattgcttcttgataggtttgaggttctgagttgtctagcttttctgcagctgcaagtgcaaaagctgtgaaatcagcaaaaccaaatct

SEQ ID NO: 220592 - DNA, 2751 bp, Cannabis indica
agtgtgtttttgaaggttgttcagaaactgtcaattgggttgttgctgaagtgaagagtatagttttatatagattgaatcttgtaaataataaacaaattactagacatcagagagcctacttgaatagaatacaatgtaattaatttgtttctttgtttttggcttgaggccagttttgttctagtgaggcttgagggtgtaatagcttgttgattaatgaagtatcttcttcgtgatacaaaaaaaaaaaataaatggtaattataaaaatattactttctataaaaaaatatttactttagaatcaaaattactgaggatctaacaaaaaaaaaatagaatgttgaaataattttttattttaattaatttatagtaaatatttgtctcttctgaaataatcttctaattttgtctaattttgtttatgagtcattgtgtatgttaatttgtaaaagttgaagttctcgtgaataatttatgaataactaattcttactgccaataaattgtggtacagttcctctaaatgaaaaaggtctctaattttactccaggaatgttgtttccagaaagttaggtatttcttgaatgttgttcccaaacacctaacttgttcattcccgaagaagtcttgtggaatgatagttgtattcggaagaagtccactccatgttcagtctttaggatagctagccctcctccagaaaggagttccggacagctagttattcttcttggaaggcagttctagatagtcattttagctggttctttcctattcagaagcctctccaacatgtgcctttggtccgtgatcccggaagctcgtatatattctcggatgcactaagactgatgctgacgtggaaagttcactcaaagaggagttagttaagttagctatttctaactaacttaataacttcatttcatgcagccaccgatttcatgcagccaccgactttaggatcttgatcctaagcctataaataccaccttgacttcttggtatgcaattggaagcgatctcaacaagatgatggactgtctttcttcatctaccttgtaatttaaatttttcaatcctataataatctcattaaatctatcaatattctcatctaaagaaatggaaaaaatcattctaaaaccgtgtaacctttatagcaaattaatcttgttagcaattgataatttcaagtattattctttaaaattattccaaactctttttgctgtcttctctacgatgagtttcctccaaatattgtttcatagatacatgatgattgtgtagtatgccatctcctccatttttgctatttttttctggtttttttttgccaataacttctcatctcaaagaaccttggagactttctggtgcactaggattccttttagactttctctccatagtaaaaagtccccatttccatcgaacttctccaattcgaatctcgccattgatgacattcaaagtttcttcaagaaatacagcggaaagaatcttgattctacattcttgattgattaccaagctctgattggtggaaaaattaagactaaacaagttaggtgtccgagaacaacatccgggagatatctaactttctaggaaaaacactctaggaagaaattggagatctttaatttgaagtaactaggtaaatttgtggtattgttcctccagatgaaaatgtctcaatttcattcctggaatgttgttcctcaaaaagttaggtgtctcctagatattgtttctggacaactaatttgtccattctggaagaggtctttgtagaatgatagttgtgtttggaagggagttcccggatcaccattatgtccacttcaggttcagtctttaggatgctagccctcctctagaaaatagtttcaaacagctagttattcttcctggaaggcagttccagatagtcgacttcagctggttctttcctattcacaagcctctctagcatgtgcctttggtccgtgatcctagaagctcatatatgttcccggatgcactaaaactgatgttggcatggagacttcgctcaaagaagagtttgttaagttagttatttctaactaacttaacaacctcatttcattcaaccaccgactttaggatcttgatcctaagcctataaataccaccttgacttgttatttcgagacatgagattaagaactaagttcatgtgagattgaaagtttgagcaagaaaagattgagaggtagagagaggtgcagaaaaaatatagagattgggtttgagttttgtaagaagaatcttatgtagatgaagaaaattcttaggtgtaagcgtgagagttgaaacacttagtgagagctcatcagagaatctcgactcgactatattgtacttattcttgctcaatcaataaagaagaatttcggtagtgttccagaactggagtagagccgtaaattacatcgatctatcaaacttgaaccaatatatatttggtgtttatttttttttattttctttattttctgtttctagttttctccactttgttctcctctgttttacattcgattgttattcttgatttaataatcttgtcattgttaatcgtttgattatttcaagtttagttgtttagattctgcactgttagttttgattttcccacatgaattaattttttttttgttaggaacacttgtaattactttttttttctgaataacaaaaatttaattatt

SEQ ID NO: 220593 - DNA, 6542 bp, Cannabis indica
ttttttcagcaaattcttcaaagtcccaaattttgcttctgcaattgtgatgatgccctaaactgtactggagaaaattgtgcttgtaataaggtatatatattttttttcgttccattatttttaatcttttttttagggaacattagtttcaaatttacatttacgttttgaggagtgctaattacaatcttttagttaacttctacgtttgaaattacatattagaatattgttttcaaattttttttcatagaggtattcgttatagttatagtatcattcttgtaaatttttaaatttttttgaatagttaacaataccgaaaatagagtttttgataatttagtttactacgtgtgtttaaaaaacttcaaacgtatttttggtactgtatttaattttttttaaaaatttacaaggatgatattgtaagactaacgaacactatcataaaaaaaatatcccgacatttatttttcaggcatgatggttgactaagagatgttaataggaggttgacagtagcacgatgagtgctaattacaacttcttagtcaatctctatgtccgaaatcacatgccaaaatatttttttcaatattttttcataacggtattcgttatagttacagtatcattcttgtaaaattttgaaaaattctaaatagttaacagtatcgaaatcagaatttttaataatctagtttactatgcgtgttcaaaaaaattcaaacgtattttcgatactgtaaagtaattaaaaaatttcaaaaatttatagagatgatgttgtaagtataacggacactgtcatgaattttttttttttttaagaaaaatatttgaacatatgttttcggacacaaaagtaataaaaggttgacggtagcactcctcattttattttatataattaattattatattatattttattggaaaaaaaatgtaggcagacacaaggtgtggtgaccattgcatttgcactgggtgcatcaatccatatggaagaaggccatttgaccttaatgaacaacttgaatgaatatttttttcttttttgttttctttggacaaagaaataattgttttagctgttatattatttgtaatatattatgcttacaatagtgtaatatataaattaaaatattaataatatgatagataaatataatatatagtttattgtggcaaataatgtaatatataggtgttaggttttatgccttaaataaattttaattttaatttaatattattttaatcaataaaattcaaaaatcaatttattaattgtttggttcacatatttatttacatgattatatgtttaattaaagattctattaaagaatgtcatttttggatgaaatggcccaaagatatttggctatgatagcttgattccacgtagtccccctttgaattccagccctccataatattttggaaggcataccttctctcaactgaccacatggagcttacttctattcccattccatcctcaaaggaaccctctacataacttttcaatttccttggtgatgctttcaggcaagacaaaaatgctcatccggtaattccgaagcccaaataaaatcgagtggattaactgagctcttcctgcaaaagagagatgtttgcttgcctaacagagaagtctttgtttaatcttcttgataatcacaccacaatcttcagctttctattttgtcggtctcaaaggaactcccagatactttaggggaaaggtgccctcagtgagagttaattttctcaatatagcctgttttgcctcttctccaacccctccaaagtacatatgagatttacctgtattgataataagacccgaggtgtctttgaactcctccaaacacttcttgagaacctggattgactaaatattccctttacaaaataatatcagatcatcagcaaagcataagtttatgattttgatgctcttacacatggggtggtatctatattttgaattgtcagctgccagttgcaatctccttgttagatactccattatcagaacaaacagaagaggagataagggatccccttgtctcaaacctttctttcctttgaagctacattgaactcttccattcgtaagaatagagtaggaagtggctgtcacacatgtcattatcttgttgatgagccttgctggcagcttatacgaattaagaagctcctccaaaaactctcaattcaccgcatcatatgctttgctgatgtcaactttgatagtacatctcggagacacattctttctattgtaattcttcaagatgtcttggagaatcatgatattatgagcaattgagctcccctgaataaagactccttgattacggctgacaagaatgggtaacacctgagcaagtctggaacacaacaatttagagatgcatttatatatcgtggaacaacaagcaatcgagctgtaatccaccgcttttgtaggactctcagttttggggataagagttatcatagtagcatgaagctcccttggcatgacaccattgttgaagaagctttctatggccttaatgaattcggctcccaaatcagcccacaatttcttgaaaaatcaagctccatacccatcaggccccagggattttgaatcaggaatgctaaagaaagctctcctattctctgtggcagtaaacaacttgatcatgttcaattgctgctcaacattcaaccttttcccttgttccatgcaatccttccttaaaccatgagaagttatgcaactagtcgccatgtatccctcaaaatggtttataaagtgtttcaccacttcagaaaatttctctatgacttctccatgatcattagtgtaagaaattatactattctccattccttctttttttcaaaaaggcatgaaaaaaagtattattctcatctcctttacaaagccaattcactttgctttgttgtttcaagaagctatgatacatgtgttactgctcataaaaatgagttgctgcctctttctccttcttttgataattcagatcttgcccatgagcttaagcttccattctaccttccatataatgagtttttgctgcctgataacctttcccaatatcccctattgtctccttgttgaatttctccaatttgtgctttaatctcatgagctttagaaataaagctttcatcccatcagctctaactggtttaacctagtcactaagaaccacatgagtgaagtcttgatgtttgttatacccgaaattcagctaccatctcagtgggggacacatgtcaggataaaagaaatatggatcgatgcaatctctttttatgggataactcattaattgtgtaagtatcagagtatatttgtaacttgctgactgtaaggtcttgtgtgaggaatcaatatacaaactgttgcttagtatattagcgagaaactatatgtcgctgaatgcgaatagcgaggcattgagtacattacatctaggaagaagaaaacgatacatgtcaactgcggaagcacttattgtataatgaacaagctaagcacaacagttgggttggctcgagacctagtaatagcaaggtgcctatctcgctttgggaaggcttctagtaatttcacccagttaacttcagacattttctcggtgaggcttacaatcctgacgagccagaagctaacattcaaacaagctttgaagaactctttgtaaataagaaatgcgatcatcacaagacgtgcatcatcgacatcggaaggaaaaatggccccagctcgctattgtgatcactggaaccaagctcttgacgagacatccccagatacaaatattgaagacgtgtttaaatatacgatcattttgacccagtaaaagcgggaaaatcacagctgtatgattttcaagcaataaccgcatttacactacatgatatgtaatcaaaccacatgattttagggatgattgttgtaaacagattacagtcaactttgtaattaactgcccactatgtaattataaatagtggcaagaaagatcaaaaaaggaggaaaaaactcatacaaaagaggccctgaaaaaacaatcaaaaatctgaaaagattgactcgtggactatgcagaattttaactgcaaaaccacgtaaaaatcttgtgtgttcatacttttacttttatagctttcattttttcagtgtgaaattgctaatgtgaggctcaaatttggttaacgaaaatcacattgagagcctctgtgaaaaaactcaaaaaaaaccctcccttcttttgaagaaaaaccacctccttcatggctgaaaatctaaaaaataattgtggagatataaggaagaaacttattgtgtgttgtttgttgtgtttgttatttgttgagatgatatgtacttatgaaattagaaaatattatagaaataaaagaaattttttccgattttaattatgtttattcagtgattgttatttgttgatatgataggtactaaaattatattttatattatgattttgtcccgttattgtactttcacggattgtaatccgtgatgtacgacagccgtcagatgagggagttatttgatctgacggctgagattgatctaggggtaattagggttaaaaagtagaaacgtaccctgacactcatttaatgtaccctgagacctatctaatgtaccacggaatacattccgtgaaagtacatcacgggacaaaatcatatccctatatttgtatagtaaattcgtgtatataatcaatttaatagcaaggggaattaatttttttttttacaatattagcatatctcagtgggctgcttgaagactttcgagattaaccaatctcgggggaccgagcccaccgagataggtgtctcaaaatgctaaattgtgttcaaaatatacctaactcgacgggcgaagaccgtcgagattacataatcaataacgacgggcatgaaccgtcaagattgttagcaataatggcagacttggaccgccgagatagacccatattcaacctcgacactcaaattaacgacaagcatggactgtcaagatagagcaatagcagggaaccaagcccgctatgataagcctatttttttttttttttttttgtcagtagttgctatatttttgccccaagttgggctaatttcaacatatacatcactctttcactatatatctctcttttttctgtaagtaaattttatttctatcaaacaaacactacaaccgaattccaaacaaagaatctgtacaaaaaaaggcaaaagccaacacccaactatacatgtaactcctcaacgcaatgtctatctacaatagtgatttaatcagtcaaaaatttataacatctttcttaattctcaaaatcttacaatgaattactctagtaactttatgatcccataaagcctcatttcgattaaaagaatgagcctttgaagattaaaagaaagaaccatccatcccattgtaaccaacaagccttctcataagccttccataatcaagaatcttaaaatgaagagcccatgtgagataatctcatatatatctttccatattctcctacagaagccatcgacaactcaaattttgcacggacaactgtcggtgcaatcctgaacttgaaaatggttgtcaaaactgccctgataggaaacaaaactacatatttgcggtaaactctttaattatatattttttttaaaaaaatttaatacgttttatatttatatattgtttaataatttaagtaaaataattgggaaataatttcagcaaattctccgaagtggagagtattgtgtttgtgacgattcactgaattgctccgccataacatgccagtgtaacttggcataatttgtttctctctctacatatatattttaatttttaattattttaatttttaatgaattaattaattaattaattttgatattattttttctatgcaggatggtagagggtgtggttgatttgaaccagcagccatgagtttttttgttgttactaatagactgttagatgaatatggtttgctataatagatcaatttagatttcttgttttggctagtaataatcaatagtaggtagaattaatggacttaatgctttgaattaattatcaatgtctgattagttttttttttaacagcaaatagggttttattcacaagtgatttcaattttggagaattgcttaccaatgtggtactagttttaatttacttttcatctcatagaacaaaagtttttggctatggacaaagacaaccattagagtttttaccttgaaatattagtggataatattgcctatttttggttttatcaaaatatttaaagagtgaaatatgaaaattttaccattttggtttattttatctaaatttactataaataatagtatatattgacaatatttttactatcatggtaaaaaaaaaaatcaaatgaatgtcattttcaagtttttt

SEQ ID NO: 220594 - DNA, 949 bp, Cannabis indica
aaaaaaaaaaactaagaaaaagaaacattattgacataaactaattgcgtttaaaataagtaaacaaaactatacataaacaataacaattcatcacggcgaggcctactttggttgcgaccaattcttcgctgtcgcgacgagaagacttatggccgcgacaaaacctgtgcaaaaagggcacaattctatgacaataatttcaccacagcgaggcttttagtggccacggcgagagagtccgtacgactcaagggtaaattcatatttttgtaatattttgagttcaaattaattctatttaagggaacttcgaattagaaagtatggactttaaagttacaacctagaagcagtagaaggacggcaactagagcgagagtggcaacccgaatctattccaccatcagtttctttcttctccttttatttcttttatgttaatttttgtttttaatttatttatggatacgaacatggagatcatgaactaaattctcaatttagatatatgatgaatgttagttgatgtttatctgatttagttaatgtgattgttagtttttttttctggaaagtgtgatttgtcttatttgttataattacatgtttaagaatgaccatctttaatgtgatttatgatcctaatatgaaatctgagaagtgaatattaggaatgctctaatagaacaaatatatatagattttgaagtaaaacgagagtatttacatagcttatgtgacatttggattttgtttaatgcaaattatttgttaatttactttagagatgtaagtagataatatttgatttaggaccttaatgatctaagaagagttaaggttacttttataatttgtcatcacttaaagggagaaaattattaatttacattaacaattggataactaaaataatatgattcattcctaattatcatcaatagtc

SEQ ID NO: 220595 - DNA, 1863 bp, Cannabis indica
atatatgcttcattgcatcttaggccattagaaaaaataggagtaatcattcaattgattaatcaatctaatgtttaccctcgtggagtggtggaagatgttctagttaaggtgaagaatttgtttttctcggctgatttttatgttctagatataaaagatgactctattctatgtgcaatgccagtgttgttgggtagaccatttaggactacaacaaatatgaaattggatgtcaagttaagagcgttaacgatggaatttgatggtgatcaattattgttaatctcaattctagtcaatgatacagagtcaataaatataagtgtttgaataatgaaaaatgaaaataataaagaactatatatgatacaacatttatagaggttcgacccctgaatcggtaatgacctactcccttttttgttgtatttatctaagaaataataagatcacatgaacctggtcaagtgagtttcttgctatctttgaaagttacaaataatttgacaatgtaatagctctcttgtgaatgcaaaattcagtcccctgaatagtgaatatgattcactatttatagggataggatgtaacaattttacattaaattacaggataaagtatttaatatttgatagagtcaatcccacaaaatcctcaatttcccctaattctcgcaatcccacacttaaaggcgtcttgattgacctatttgcaagggattaagttattaggatgaatctagacattatcctctgttagtttgctggtcggacacttcgtccgtgaggtgtcttcctggttgctcggcaggatagctagcatgcttcgcccattgatgtctaatgctgaagggccctattccacaactatttcgcccaacacctattcaggcaggctctctgattatattccatctgtacaaccctttctatacttgccacgtgtcacattattctgtgctgtatcattagggtgattttgggataatatttaccacccaagtttgcatggaaactccaggttgtacgtggacttcttgacttcattctttgcttagtcatgtgacgcctgtccatccccatgttattcgccttccaaagcaataagccgacttgaagcgaatcctatctctgccctttaaaatattttgccttaattactttttcttaaaaaattgcacctcaaagaccgtttctgacggttacacattctcccatgtggatttttgagtaaaatgaggcttttggattttttaaaggaaaaaaccaatcatttcaaattataatctccaaaaacctttcccacactctcatttttcctataaatacttcaaagaaacttcatttaggacttttaccgtttcaattttttagagtaaaatcgagaggaatttcttcaagttcttgagctttcgtctcagatcgatcattgtgcggaccatttcttcaggaattgttcttcaaatcatcacaccgagtaatcagtaagttcttcatccatttcttgcatgaatttattttatgattttgcatctgtgttctgtaaatttttggttgaatgttcattgttcttagatgtgaatctttgtttttgtaacaccctgacccttaagaatgccacgtgtgtgcgtttataaactaatttatgataataaactagcaatatagataaaatgtaatttaatataattttactatctactctaaacatgccattacaattttaatataaaagaaatatttttaaaagttcagaacatttgaaatacaattcctaacaactctataccacttgctggataagctgatatgcacatttgatggaaaagattccttagtcatggttgtccaaatgtctctg

SEQ ID NO: 220596 - DNA, 3649 bp, Cannabis indica
aaaaaaaaaaaaaaaatagtactatatataattgataatttgaacaaatatatatactagttaccacttacatttgttcggacatgattttgtccgtgattgtactttcacggaatatattccgtgatgtacggtagccgttagataagcgagttatttgatctgagaactgagattgatctaggggtaattaaggttaaaaaatagtaacgtaccctgacactcatctaatgtaccctgagacccatctaatgtaacacgaaacacattccgtaaaattaagtacatacgggacaaaatcgtctccctacatttgttatggaaaaatctagataagaataaaatttataaattagaagtaatataactaagcgaaactgtcaatgattttttattttttattttttttgatagaaatttgtcaatgatattcattatttaaggaatatagttgtgcagtgttatttatttattgggttatgcaaataattaatgatactataataaaataaatgttctaattaaattaagcatcttatcttttctatatctatgcaggtgtaagtataggcctcctgagtcttattgcaattagtataatgctatattggggagtaagaaaaagaaaaatgataatgcttaaagagaagttcttcgaacaaaatggtggactgatgttacaacaaagactatcaagtactgagaaaggacctattgagacaacgaaaatcttcacagcaaaagagctagaaatggccacagacaattaccatgaaagtagaatcattggggaaggaggttatggaatagtttataaaggaatattcccaaataacaaggtggttgctataaaaaagtccaaatttggagctcaaatagtcccagctgaacaaattgaacaattcattaatgaggtaattctgctcatgcaaattaatcacagaaatgtggttaggctcttaggttgttgtttagagacagaagtacctctcttggtttatgaattcattacaaacggaactctttttcaacatatccacaataaaggcaatgaatcatgttcctcactttcatgggaaatgagattgaagattgcaactgaaactgcaggagcattagcatacttacactgtgaaactaataccccaattgttcatagagatataaagacaatgaatatacttttggatgaaaacttcatagcaaaagtgtcagatttcggaacatcaagactgattcccatggacgaagatcaattatcaactttggtgcaaggcactgttgggtacttagaccctgaatacttgcaaacaagccaacttactgagaaaagtgatgtttatagtttcggtgttgttttaggagagttattaacagggaagagagccttctcttttgataaattaaataatgttagtcaagtcctagcaatgtccctcctctctgttaaagataatgatcaatttaacgaattcattgatcataaaatcttcaatgatggaaacatggaggtgattaaagaggttgtagctctaacaaaacggtgtttgaggataaaaggggaggatagacctactatgaaagaagtagctatggagctagagggattacgagctatgtcaaagcattcatggacaaatgttggtgatgaagagtctgaacatttgcttggggagaaacattcaattaatcataataattacattggttatgatcttgaatgtggttcgagtggtacaacggctatgtatgatagcatgcaaactcagctcatgctcaatccatttgatgatggacgttagatttgcatcgtctaaatattttgatgtcctaagtattgtttttattaactagtttttgttttgttagagttgttgaatggtactgctttagtgactaattgtacttacaaggttagtataaatagaaaagtcttgggaaaattgtagtaaactaagctttaaataattaaacaattagtaatgacaagcacaaatcacgaacaataatcgaaaaaaaaagaaacggggatgaacagagtatggaaaaactaaaaacaattgaagttgttaaacaataaaatcaacgccaagatatatactattttaagtctgatagatcgatgtgatctatggctctactccagttctggtacaccaccaaattctctttatttatttattttttaaaactcaaatcctctttattgattgagcaagaataggtataatacagtcgagatcgattctctgattagttctcttaaagtatgtcaaccctcacactcttaccctaagaatcttcttcatcaacagatcttcttacaaaacccaaatctaatctctctcttttctctatatctctctttaacactcaactcaatctgatcattcttttttgaaatgataaatgtttgtggtatttataggcttaagatcaatttcctaaagtcggtggctggaagaaggttaagttgttaagttagttagacaataactaacttaactaactctcctctgagtaaggtgtccacgtcaggctaaggaatagtgcatctgggagcgagtatgagggcttctagagtcacggtcgaaggcactctctaaaagaccttcccgaataggaaagagccagctggagtcaactattggggaccaccttctaggagaaacaactagccatttgaaactccttttcaaaggaggactagctttcctgaagacccttctcggtaggataaaaaagccttccaggacctgcatccgcgagttaacaactttccagaaatgaaataacttcttggagaccttttctatttggaagaactattccacaaattctacctagttacttcaaattaaacgtatgacgatgaagaaagaatgcaaccatcatggttggtgttctaggaatctcactatactaacttctgagattgatcaagttcaagcaatgcttgaacttgtttatgaagaccttagtcccaacatcaacaagattatcctctatcctggccttctctaaatcaaccagatcttcttctatctatatgtttactcttttcatgataaactgggttcttacaaagatggatggatgactggctatccgaatacgtagtcactctccctttgattttttttaattcataaagaattcgtcgaagccataatacttccttgaatgcttcctagttaccatgaattatgtttttgttgtagaaagagtaaccacagactgtaattgggcctttaagcttatacagttatgatttgttaagaaaattatgatagtcagtagtcctgtggtccgtaagagaaaatattgggtaagttgtgcaatcccacaccgcctaaggaaggtcaagtaggatgattctgagactgtgtaggtatgggactacacagttaaagatggcttaaatggattgattggtacaacaaggtgcatcttatttttttggtaccctatcttgaaagaactccactgttaagcgtacttggcctagggtgatttcaggatgggtgacctcttgggaaattttcccaagaagtgtctgagtgaggacaaagcacactggaaatactcgtgttggtttgtagggtcagtagtcattccatgaaacagccaaagtgacgtactcgtgtat

SEQ ID NO: 220597 - DNA, 2997 bp, Cannabis indica
ccaggctcttggagcttgcttaagaccatacaatgccttggtcaacttgcaaacatgagtgggtttttcaggatcaaaaaaacccggtggctgcggcatgtacacaatttcctcaagagggccataaagaaaggcattggaaacatcaagttgtttgattggccaattaaaagagactgcaagagttatcaagattcgaacagtggctggtttgaccactggactaaatgtctccttgaaatcaattccaggggtttgagagtacccttttgcaacaaggcatgacttgtatttgtctagtgacccatctgcattgagtttaattctatgaacccatttgttgcctactaatgtcatggagggatggtatgggaccaaagtcgaagtattattcttgcctaaggcatggttttcagtttgcattggtgcaaaccactttgggtctgcaagagcatgctttaggtttgctggttctttaggcaatagggattcgggtaaagggtaggaggtggcaagataagcttttggcttagatattccagacttggatcgtgtttgcattgagtgagtattactgctgctggtaggatttgaggcagtgtttaaagatggttcattggaaataataggtgtgggatgtatttgattggaaggcattgagtgaatgcaatccaaggcattaatttctaatgtaagacaagaggtgtgctggtgtgagggaggtacagtaggaaaaataagaggaacaactggagggttcatctggatattccctgatgttgcaggcataccagtaacagcagctggtgcatgttgcacaccagaatttggtgtattttgtacctcaaaaaatgtggaaatggaattagtaggcagtataggtgttgaaaatgttgcagtaggcatagatgagttatgagaaggatgtacctgatgtgaaattgcagatggaaggccaggaaattcctcctcattaaattcaacatttcgagctacataaagtctgccacttttatgttgacaaagatatccctcgtgaaccagagagtagccaaggaaaatgcatttatcagacctgaagttcaacttatgagcattatatggtctgagataaggaaaacatgcacaaccaaacggtttgaggaatgtataatcaggtgctttatgaaatgagcactcaaatggagatatgtctcctatgacagaagggggcagtcaattaatcacatatgtggctgtctgaaaagcattccaccagtaagacaagtcaagtttagcttgagcaagtaatgtcaacccagtttcaatgatgtggcgatgctttctttcagcacgcccattttgttcatgatcatatgggcaagagtgttgaaagtgaaccccatgttggtttagaaatttggccaaggacctatattcacctccccaatcagattggacacttttaattggaaaattaaattgttttcaacaagtattttgaactgaagaaaagtaggataggcttgagaatttagggtaagaggaaagatccatgtatacctactatagtcatctaggaaatggatatagtacctatacccttctttggatggtatgtgagagggaccccataagtccgtgtgtaccaattctaatggttgggatgctctagactcagagagagagtaaggtaacctatgactctttccttgtttgcaagcctcacaaaattgtaaggctttcaaatttggtggtatatgtaactggttgaggatcttggcaagggttcttggggcagggtgcccaagtttcatatgccacaaatttacattagaattttgtaaagtaaaggcctgaacaggaagattggaacatgaaaaattactttctttattgatagaagagttattacagagggttatagctgatgtagcagctatattattacaattggattcttattctgatctagagctaatagcaggtgctattggaggcctaggtgcagatgtagcaacatgacattgaagattgacttctggtgtgacaaatgatcgatgagacaatgtgtataggccgtttttaaccctccccttgagcaaaatagtccctgtgatcttgtccttgacaaaacaacaggtagaatgaaattcaagaaagacatggttatctttagtgagttgaagaacactgacaagatttttggtaatatgagggacttttaaaacagattgtaattttaaaggaagactagaggagggtaaagaagtgttaccaacatgggaaatggcaagtttcttgccattgcctacagtgagagcatcgggtcccaagtatggcatttcagaatccaaatgttccattccttgtgcaacatggttagtagccccggtatcagcataccaatcataatcatcaaaaactcaagtagagtgttggatgagtaagcttgaggattttcatgttcttcaatttctacagaaaagccttcgagtctcccatctgaggagtgacagaattcttgtcggatatgtaatgacaaacggctgctgtgtgtccaggtttgtgacacacttgacaaagcagtcttggaattgaaggagtgccacttctttgatttcttgcagggactcggttcatgttaccatacgatcctcttagctgggaattatagaaccgatgaggggcaccagaagtatttcgttgattgttaatgctgagattagcagtgatctttgaggaaagataattcacattaaagtgcctttcaatcctgctctcatgggttagtaataacgactgaattgattcaaaggaaaggttatctacaaggcttgtaacatgaactactacaggatcatattcaggtcccaaaccattgagtaagtgcataatcaaatcactttcatccatcggatggccagcagtggataaagaatcagctaacaacttaactttatcatagtaatcagatatagagagattacccttttggattgttgataactgagactt

SEQ ID NO: 220598 - DNA, 2467 bp, Cannabis indica
taattggataaatatatttggtgtaaatttaaaaaaaaaaaaagtgtgcgtttcttcctactttcttgagtctaattatatagatatatataccagataaatattaccaacaaaacatgtacacttagtaatatgtttaaactttattttaagtgttttgatttttgaagattaaaataaaaatcttatatataattaattaaataaataatattattttagtagaaaaatatttattttaaaactctataaaagaaaatataatagaatatatatatatattttttaaaaagaataaatacaaatactcaaagtttttagaacaatttatctctcaaaaagttttaaacaataaattaaatgcaaattgtataagaaaataataataatattttaaaaattaaaagaagaaatttatagatttttaaaaattaaaagaatatatatatattaagaagaataataataatattttgaataataataatatattaatttttataatagaatttatgatgagattgtaaatgttattttaaattttatacacttgacttggcatgtccacatagtcaagactaaggacacatggaatacaacttgtcaataagaggacgaagtctccttacacaacatgtcaactgttaagggttctagagcaatcaagtaaaactgttaagcaataagtgaaaggagttgagcaggtcgttaagaccctgaccaaccatgtctggccgaccaagggaagtgtgaagaccggccagagaaagcttgtaggccagccagggtttgagcacaagctagtcggccgaagaagtgtctgacagaccaagaaaggtctgtacgaccaaggaagcgtgatctttgcaaggaaagatgtacaaagaatctaataaggatggtaggcacataaaaaggctgacatacacatagaaagctggcagacacataccgaggtagtaggagcaatacctggccgtccataagagagcataggctggccaggccctaagaaataggactggctagctaacttatgtgcaaaactccaaacagcagagcaacttgcgagacaggcctaacagcccacgaaaataggaatttttcctctagatattgttcctatttcctaggaattttgttatccttttttgtaacttaaataatagataaaaagatgttaatatctctattctaaagggatatctctacctatttgaattaggatcttttctaacccctacactatataaagggcattccatcattcatttagggcctaagtcattccacaagctacaaaagtcttctctcatgctcttttaagcctttcacacgtgcaagcctctctctctctctctcccaatcctcacattctattaatgcctcgaagacactaagtaaagcatattcttaagtccttcacaagaactcatcaattcttgatctgtaacacattgttcccacaattgttatactgaagagagccatagcgagaaatcataaggctttcacctatgatttgcatgctattatcttaaaagtgaatacaattgaaagggcagtagatcattacccgccaaataaggggaaaacctctataaattgctatctgatctttactatttattcttttatttacctgcgatgattgtcattcataaataaggtccgctgtaagttgccaaattctgagtcaatattttggtactttcatcgagagcctttttttaattcattcacctcgttctgatcaattaccatggttctaactagaagaactcccccctcggatcctcgtaaggatcccatgatggtaaatcccgatgttcgtgttcctccaatcacaaaagggcctactaatctggataacactttcaatcttgccaatcttgcaaatcttattgataggccgtgattcctcacatgatctcatgcaaaagagcaaatcaatatggaacaacctccacataacacaactagggctattccacgatgtttgtagaagaaacagggccaagaattggggaaccagtcattggtgagcctcacttggcccttggtggtgatattgagttggctaggctcagttataggctaggtcactcaaacaggacaagaagaaccacgagctgccggatgcgatgctttcgcctagcagagatgcaaattcctaaggtggatggatcactaggaggccatcttctaggcccgttaggtagaactaaattgccttaatagggaggctaatgactcgataaggcagttcaataagagaactactgaaagaggttaggatttcataagagatcttttataaaagagactcatagatagatcaggcagagtctacaaacaggtagacaatggacaaacaatccaactaggttcctcaaacacgaggaaaaacccttccctacctggtgtcacgggctcacctttttaggcaacggaacacctgtgcggc

SEQ ID NO: 220599 - DNA, 5081 bp, Cannabis indica
aaaaaaaaaaagcacaaattcaagacagaatataaaaataggtgaactcaagtaaatcgaggtacgagtttgagtaggacacaaaatagtgagactacccttacaaaattgttaagcacaatctttattttatttttatagcagagtataacttatattttgaaaagcacaataaaatgtgccgggctaaaaaaaaataggctcgtattaaaaagaaaaaagaaataagtaagaaatattttttttatatttattaattaaaaatatcttcatattatatttcattaaaatgtatcttctttcgtgattgggctgtccaatatattttcgccctacacttaattatagcacataagttatagtataatcgagacttcatctgtaaaatgtgtcaagaaatgattggtgacgtgtgtgcttatgtgtcactatgacctgtcccatactttgggaagaatatcactgaatattctctatgtacgaattgtacaattctgttaggatttggtagcatatcttcctgtgtaatattctctttgtaatctccctacacctgtcaatatcttagctgttggattgtaaatggtaatccttaaatatcaatgcaattgcctcatgctcattgagctgagtattacattttctggtttcccctgttttttatcttggtatcagagcattataggccaacgccatggctacagacgattcatctcagactccgaaaacacctgggcaagtttcttcaatcggaggtgcttctgcaacccaaacgattggttcaagctcgactaactcaacgatggctgctcccttcaacaatactctcagccaaccgttcaccgtgaagttagatcgaaacaactttcctttatggaaaacaatggttctaaccattatacgtgggcatcgtctggaaggttttctaaatggttctaaaccatgcccaacagagtttcttacctcagaaaatggtgctgaggaaggaatccccattataaatccagatttcgaatcttggatgactcatgaccagcttttgatgggctggctctttggatccatgactgaaggcattgcatccgaggtcataggatgtaaatctgcagccaacttatggactgcacttgaggatctctacggagctcactcgagagctaatatggaggatcttagaaccaaactccaaacggctcgaaaaggttctttgtcaatggctgaatacttgaggcaaaaaagattgtgggcagacactttggctttggctggtgagccatatcctgacaacttattaagaggtaatgtcctttctggtttgggtgccgaatatctcactattgttgttcccttggaggctagagttactatgtcttggcaggaactttctagcacacttcttagctttgacagtaagcttgaaagattaagttctttttccaccaactccaagcaattggatcatcctactgctaacatggctcaaaagccttctggttataattccaactcaaaccagaacagaaggccaggcaacaactactcacatggtcgtggtggtcatcaacattcacaaacatcaagaggtggaggaactactcgtggcagaggtagaggaggccgcaacaataactccaaacccacctgtcaagtttgcggaaagtacggacattctgctgctgtttgctataataggtacgatgaaacctatactgggcaccctcctaacacagatccttctcaagacaagcagcagcaatatgccatggttgcaacacctgaagttcttcatgatgagggctggtatgctgatagtggggcaagtaatcatctaaccgctgaagctggaaaaatgacaggaaaaagcgattatggtggtaaggataaagtcactataggagatggcagtcaactggtcatctctcatataggacacagtaaactagacaccctctctaattctcatttgattttaaaggatgttttacatgtccctgccataacaaaagacttgattagtgtttcgaaattaacacatgacaacaatgtctccattgaattttttgctggtttttgttgtgtgaaggatcaaacagggaaggtgatactgagaggagtgcataaagatggactctaccagctggaaaaaccatcaacccgtttcaatacctgccaccaatctcatatcagcacctattcctctcaagttcagccatccagaaatgtagtttcaatttccctaaaggatacttggcacagaaggctaggtcatccatccttatctgtgttaaatcaagtgttaaagttgtctaatgtcaaaagttcaatcaatgaaaaaccatgtttttgtgatgcttgtcaattcggaaaatcacatgctttgccctttaataactctactagtagagccacttctttacttgatgttatacacactgacctttggggtccaaccccaattgcctcgcacacaaattacaaatactatatacacttcattgacgatcacagtaggttcacttggctttttcccttgaaacaaaagtctgatgccttaccagcttttaaacaatttaaagctcttgttgaaaacaaatttgaaagaaaaattaaattggttaggactgattatggaggagagtatgaggctttttctgatttggttgtcgaatgtggcatagaatttcaacactcttgtcctcacacatctgcccaaaatggtagagcagagaggaaacataggcacatagtggaaatgggcttaaccttgttggcacaagcccgcatgcctctgaaatactggtctgaagccttccaaacagctgtgtttctaattaatagactacctacagctgttttgaaaggcaagtcaccatatgaagttgtcaatggcaaaatacccgactataaactgcttaaagtttttggggtatcttgttttccttgcatcagaccatatcaaaaacacaaatttcaatttcattccataaaatgtgttaatttgggttatagtgaagtgttcaaaggatacaaatgtttgagtccacatggtagaatatacatatcaagaaatgtcattttcaatgaaaatgaatttccttttgagtcaggatttcttaacaattacaaaccagaaactgttctaaccatgcaaacaccacattcctggtttgttcttccaaatgctcctgtcactacacaccagcaaaacactgatttgtcttcaagtgtagaggccacacctgattccagtgcactcccttcagcatcagcttctcaatcctccagcagctcacgggtaagaatgccttttagccctgaaactttcccaaatgtacctgttactttcaatgatccagcagaaataaattcacccatgtctcctactgctgaggaacaaacacagggtgctcaggtatcaacaactcaacaaattcatcctatgattactagagcacgtgctggcatttttaaaccgaaagtttacatgggccaagccaagtttgatttgtctcatcatgaaccacttactgtcgaagcaactctcctacacaaaggatggaataaggcaatgaatgatgaaattcaagccttaaaaagaaacaaaacataccacctggttccctactcaagtacctacaacattgttggcaacaagtgggtacatcggattaaatacaatgcagatggttcgtttcaaagatacaaatccaggttggtggcgaaagggtttcatcaaagaccagggctggattttggagaaactttcagtccagttgtcaaggctcctacagtgagaattgttctcactattgctgtaaccaaagattggatgattaaacaattggacatcaacaatgcgtttctcaatcgagtattagaagaagatgtttacatggttcaaccacaaggcttcgaatcccctcaatatcctaatcatgtgtgtaaactgaacaaatcaatttatggtttgaaacaagctccaagagcttggtatgatcagctcaagaatacacttcagcaatggggattcgaaaattctaaggctgatacatctttctttatcctcaaaaagccactgtttgtcataatgttactaatctacgtcgatgatataattcttacagggaacaacacaaaagaattagatcagttcattgcccgactcaacaaaatgttttcactcaaagacctcggatccctcaattacttcttggggatagaagtctttcgagacagtacaggaatttatctctcacagggaaagtacataggggaacttctacaaaagacagaaatggctaatctaaaatccagtcctactcctatggtcgctggcaggcctctatcattaaacgatggtgaattgctgaattctccatctacctacagaagcattataggagcactccaatacctcagtcataccagacccgatatatcattctgtcaacaagctgagccagttcctaaaagcccccactactgctcattggaatgctgcaaaacagattctaaggtatcttaaaggtacaatgtatcatggactacacatctcacctagtgaaaatctgaatttaattggattctcggatgccgactgggcttgttgcccggatgacagaaaatcaattgctggctattgtgttttcatgggagattccctcatctcttggtcctcaaagaagcaaacggtagtcgctcgctccagcaccgaatccgagtacagggcactatctcaacttgctgctgaattatcttggctgcaaagtattcttaaagaaatggccatttccttgtctgccatccctgttatctggtgtgataacatgagtgcaaatgcaatgactgcaaatccagtgtatcatgccagaaccaagcacatagagcttgacgtacattatatcagagacaaagttatgcaaaaacagttataagtcagatatgttccttctcacgatcaaactgctgattgtttaaccaaggctctctcaccaactcgatttaagtttctaaaagacaaacttcaggtgaaggagtccccctgtcgtttgaggggaggtgtcaagaaatgattggtgacg

SEQ ID NO: 220600 - DNA, 4827 bp, Cannabis indica
tctctctttacaaaaaaattaagagcacttctcctatagttttctatcttttacatgattaataaaagtagtatatttaatttggatattttgtactttattcagagttaatttattaatgatttgcatgttttaacaaaattaatttcttgttatttttctgttaatttatagttatcttttaagctattttatagttattttgtagttgtttttattttgttgtttaggtgttctatactattttttttttatgtattttttttttgtacagttgttgttcagtttatgtctattttttgtgtatattttttgtttattccaaacaatatttttgttgtatatatgtgcatttgttttattatttagttattttttagtttatagttgtttttaactatcactaactcaaaaggaaatgaaaaaatgaaagttgaaagaataaaattgtaacaacaaattccatgaaaaaaaaataatgtaacaataaaaagagataaatgaaaactaaacataaaatgcataatattatatttcacctaaattttataattatgctccaatgtactaggagtaagataaaatttattttaataaaaaggtgtaaaaaaattaacaaaaaacattaattttttttaaaagtatataaagactatattaaatatataaataaaaatataaaaatattaaattacattaacgaatggaaaaaaattaataaaaaagtgatgtttattgtagtataaaatttgacttatgttatatttcgttttaaatttagcacaacttttggcatctacaacaaaaactgtcatcaggagcgactattttcgttccagaagatttttggcgctactaatcattcgtgatgttttatttctaatagctcgtgcctgaaaatcaatatcagaaacaaaatatagtgacgtacctaatgctagattatttggaacaaacatgagttgttccaaaaaagtaaaagtcgttccaaaaaattaaattgatagcttagcttttacacattatcaggaacaactgttttgttattggaaacgaaattgtcattcctgaattcattttttagaataattacatttatttaaattaaattaaatatttttttaatatctacacttttttctattaaataatttctttaaaaactaatgatttttatatttaatactaaaatagttcttacattgttttcagatttaatactaaacattgtttatatatttaaaagagtttatactaaaagagattcataaatgttcatactaacagaagtaataaactaaacatctaagatgtgaactcattatcatcaccaccattctaattcccacgagtctattgcgaaatataggttgtactcttaggatctgtgatggtttttacatttgtgacatcgacatcatttgtgatatctgtgacgtttgaagtacctgcgacatagcagaaaatattaaggagcttgctaaactaataactaaaagaagagaatagcaaaaaatagagttcaagagaaatttaaggaaaaaaagagaatataatttagttgcaagtgaatcacaaaccctcttattatctatttgactctccaaaactctgggtagtaaggtcctcgccagggatgaagatctagaccagtcaaatagaatggttatgagcttgcttgctttctacacaagtaaagaatggttaaacaacaaacttaaaaatacaagtaacatacagaatttatcacaaaatgcaaagatggattctgagcaaactgctggttctaaacaacgatataactttgaaagacatgaaagtgttttgtctagtgggagataccaagacttgaatacattttggttttcatcagcctgcagttcaataagaaatgaacgaaattcgtgagatgtttaattcttcttactatgaaaaacagtaaaaggtattatgcactctaagaccaagaatatgattgattgaagactctctcttattttttttccttataatttgaaagcattttgcatttatagtaggcgtatctctattatgtttcgatgccaaaatacacctaactattcataaagaaaagattggtagaaaagttgttttcttagctaatccaaaccaaaggactaaaaatgcatcgatgcaaagagctaaaataaccaaatctatgaagtactaaataagtcattaccgatgacgagttatatttcttagtggccttaaattcgtctcttctcccccagctgttacgaaatgcatgtccgatacgatgtctagcggcctgtttgtcgtaatgtttcttttcttgcacaagagaaccggtgctcggtgagttatttgatgaggctgatgatttcttatcagaaggaataaagggacaggacatgcgatcagcagtgatcaaaaaattgttgcagctcgtattttttcctgagtattcaagaattacattttccccctacggacatcaatatatagcatatatatattatcaagttttatttgttcaaatataagaaaattattagaaagaaaagaatagatatagttacctgttaggaggaggtgagataaaaaaaagaagcgaaagatgagatgtagttcaggcattaagagaatgaatgataataataataattaataattatgataaggaagaaagggatatataaatgaggggaaggaataaaaattaggccacatgatatgacattggtgatggaaaatcactcatacacgtcccttttctttctatgtttgggtgtgatgtctcatctgactatcataaatatggcccaaccaccattgctttcaaataaaaaaagtattaacaaaatgaaatgatctactcaaccctcaaaatccgggttaaaaacttagaccattttatttttaacggaaaaataccccaagaaattggtatttaacaaatccaaaatgtaaccaaggtgatacaaatgattatatgtaactaataattatcactcaaaaacttcacatgttgattctaaactaatcaaagactaatacagttggtcactcttgaggcctctttataactctcaagattatagtaagcataatcttagttcaagtttccattacatttttataatcaacagtatccctttcaacaaaatacaaaatttttttaaatggcaatgatgattatatgtaacataacatctcaattttcaaacaaatagttagaaaacagtcacttgattaatcaggcttcatgtaattaatttatttaatatatgttgttttttagtaaaaaaaatgtcaagatacttgacagtttcttataagtcatcataattcagtacatgctcaaagcaacaagtaaactgaaaacaggagcacaataaaaacccgtcgtcaagtagtaatctatttagcctaaaagagacacaaaagatcaattatatgaaacttacacccattttggatttggggtatcgcaatctgcacaaagttgatttccgtcttgttgcaagaaattttccatcctttgttgtgtacctgtaaaggatgatagaaatcagaagtgatccagagattgctttaacattcttaaatgatacattccgaagagtataaggagacatcatcattatgataaaacacgcaaatgagagcaaatgttaggttttatcaggtgattgatccttcctgttattccatttacttcagaatcttaattcatttggtatagtctttaaagaacttttattatattgcgactcgaactctgcaaagacttgaacagactcaaataccaccccatgaaccttatcaaatgtttagaattttgttacatattcatggaaatagcataaaccctctgaattctacctcaactaacgaatgatctttgttattctaactgaaaagaggaaacaataagtttgaaaaccaaaaactagaaattgtcttataaaaattgctatgaggatcaaagtaccagaaaatgccgattaatcattgtggtactttcaacattctgtttctgaacataagagatcatacaggcaggcaactgatcctacaaatgtaaccaagttaaatttcaattcactaactgcacatacattttttgccataacagcaaaaatgtacaaccacaaacaatatgaaaaaccctttaacatccagagggaatacatcaatcatatcatgctaatataaataagagctatatactagagaacatacaaacaccaaaagaaagctaaacaagagcattcatttccataattaacatttattggggatattaaaatcattgtttggtcaataaatataacctttaatttatcataaagcaaatacctgaaacatcagttggaccaggattatgatgaactctcttttttttgaaataatcccttttaacaattcatccaagctttatgaatgcccacaaaaaggaacatatagctgccaattacaagaataattttattttgctaaattcactttctaatattgtcattttgacaaactaattatacacagttctacttccttacacatctaattatagccaaaaccaatatcagcacattgtttttctaattcagccatgtccaaaagttaaaagcagaatcagtagaaataaagtagacagcaagtcgtagtagtagtagtagtagtaatagaaaaacaacctaatcacatcaagcttcagcctcaataggcttatctgcaagaagctatttcagtaatgtttattcaaaaattaattagtgatcttttctccagttcagactaatggaatgtaagtaggaaaagaaagttcatgagaacaaa

SEQ ID NO: 220601 - DNA, 2451 bp, Cannabis indica
accaagaaatgccgttagatagacacttttaatatataaagatatatttagtcataaaattaagtaaaatagtcaaacgtgcaacaatgtgagaataactaatcaaagattaaaatattataggctaataatagcatttcacaagaagaattcccctaacctaagaactgaaaacctatttatctataattacatattaattcataatttaagttaaaattaaaaggaagtttccttcatcaagattggcaacttgcacggcagcagtagctgagcagaaatcaattatcataatcatgttctctggtcaaatattttagtcgttagaagaaagttaatgactactaaattcaaagaaaaaaacagatggttaataacgactaatttttctttataataataattattcatatgagagtaaataacattttgaatcttgtattttgtaaaaaaaattaattgtactttttatttattaaatgacaaatggaccctatatatatcaaaatggtacaaataaaatcctgaacaaattttttttgaaaataaaatttaataataattcgatttaaaagtattatgacaaaattgtttacattttttatatttgtccgtattaggaattttcttcaagttagttggctatattacaaaaaaaaaaaaaattgtcaaaaattaaactcaagatcctgtttctactattttgaaaaatacaaggtctattttattattaaataaaataaaatgtacaatcattaacttttacaaaacacaatttttgaaatggtatttacccagtaaaatttttagtgagttgtgcttttagttttaagggagaaaagtgacacacttgatttctggcacagcagtccagttaaaataattactgtggctcccttaattgacacgtatcgacacccctcatatagcaataacagtctataaatcccacataccattctttctaaaatctcattgatttaggtttctcttttgggccatcatcacccaccagcatattgacacgtttcccatacaatcccatttttgaaatcctcttgggtcttatctccatggccactttttcaattttcactgataatctctcaatgttgatgaacactaaggtccctattgtctgtccataaatgaagaaattttcttatggggtcatgtacttattttagctaatagacaaatcatgatagaataagaaccctttttgactataattgatataatttagctaaggccaattacaaaagaggattcaagtttattaaacaagaacagaaaaataaagtcatgtaaagtgtaagtaaagtggtattatcttgttaattaactttccagtagttttggtaatctgtctgcttgtctttgaatatatttaaccgaagttggttggtgttttctttttcttctttttgatatatataatgaaaagattttaaaataagtttgatgtaggtgattagttgtatagtagtagtagctagttatggtgtaaaaatgtctttaaatcactcaattctaacacgttaaagtaccatttgaattgagcttttttcattaacttttgtttttacctttttggtctttaaaacaactttaactttaacttcagtttactacaaatatatgtatgatacatgttttaggttatgaaaatacactactaataataatagaaaactcttcatggtgctttctttaaaacgggagcacttatatatgcactttaaattttttttggcattataaacattttttttataataatgtacgttgtaattatttatgatattataaaaaaatttgagatatttaaaaaaattaacacactaaaaataaaatttaaactgttacacagactccttttatattgtatatgcgtgtgaaatagactatctaatcacttctttttatattataaattattatgaatttctcaaaatattttcggatattttaaataattgttgacctcccttttagcttagtcaattaaagtgattagagtaattattatccgtattccctgatgcctgctacgtggaaatcacggaagagtgccaccttagactatccacattccgtatgtactttccgcataatgacatcacaaaggatgttatattctagaaggtagtcaaggatccctgatgttagcaagtacggctggggctccaggaatcaaatcgtccaatcgccattacacaaactcagagtttcttagattccaagtgttctagaaaggtaataggtgagaatgatccgagacgcacctgactcaatgatcccagagcatatttgacactatcctacctggagctcgaagcaacgattacataccttctgacacccaattagacattgtcccctgtatcagaccatggtagtgcgcgtacatgcctctgaagccccctctttgtccaacgacttatcttg

SEQ ID NO: 220602 - DNA, 2214 bp, Cannabis indica
tacttgtgagtagatctaagatcttggtaaaataatttccaacactaatgccctagtgtacaaagtggtcccatggggacaaaaatatcgctttcccgctgcatgctgcaggtgctagaggtagtctggcacctcgcacccttgtttggtgtcaggtggtccccggttggaagagggtggttacaatgtgtgttctttgggcccacgtgcgtggtcctcagttgttgtgagggggtcctcaagtacatgctcgtggtccttggttgcatgcggggtggtccccaggtacaggttgtaggagagtagttatagcttacccttggttcggtctttaggcctcacaggtccattatcgccgctacttgtacctccttgctctcaatcttcagaaggtgtggttgtacggtcttcccttgcacaaggaggtagaagtagcggcaacaatggacctgtatggcctgaagacccgaccaagggtacattgcaaccactgtcctacacacatacccaaggaccaccgcacgtgcagatggggaccgcgcacatgaacctggggtccatcctcctacaacctgcaactggggaccatctgacactagacaagggtacggggtgccaggctacctccagcacctacaacatgcagcaggaaagcgacatcttgtccccatgggaccactttgtacaccaggccattagagcctataaatactcccatttcaaatgtgaagggggttggaaaattatttggtgtaactcagatgttgaattcaatatagagaggaatatctagacatcttttcactttcatctttgtcttatctttatcacatttttgggtaaccttgtattttccgaccactaacttagttgacgagttctctctgtcaacaataattatatagtatatgtacataaaataataaataaataaataaataaaatactaaccatgttttaggtgggtttcaaattttgagttttcaaaaatattaaactcgaacccggcccgatatataatcccggatctggtctactaaaattgaaacccattttttctagattctttaggtttcgggcctggtgaattttttgtttcgggtataaatgtgcaccctttaatttattacaatataagatatatttatgtcattattgaagtagagttttttgcgactaaaccctctcaattatcactctacttgcacttaaccctctaagctcaaattttgacggtaaaaccctccaaactacttgactgtttgcaaatttaaggtgtcatgaactttctatagttaactgccaacatagactactcatgtgtacactcttatacacatgacacgtttatattggtacacctaatattattatttacaaaatataaaaaatatttcaaattttataatattttttattttataattttatttaattttaaataaattttgaaaacaattttcaaataataatattcaatataccaatataaacgtactacgtgtacaagagtatgcatataagcagttggtagttaataactgaatgccactttaaatttgctactagtttagtaatttagatgattttactgtcaaaatttgagcttaaagggataaatgcaagtgaaacgataattgagagagtttagcgcccaaaaactctgttgaaatataagatatttagagtttttccacttatcaagtcacaccacagctcgttacatccgatgctcaatcggcgagacctccgtgtttgtaggaacatccaacgaaccttcatcacatgctcatcgcttgtgatagtggtgagatcaagcacacggtggtgctgcaaaaattttttgcatgtgtacaagaagaaattctagatgatgctctttgtaaatggtttgtgtattcaatgtatctttgttacaatctttttttttttcaaaaagtttggttccagttttagatctgagaagaaaaaacgcagggaagaagaaaggggaataaagtgcagttttgggaatttttttttattagattactagagtttaaaaaattaattaaaaaaaatttttcataatctttatgattttttttgaaaactgaacgttaaaaaaactggttctattttatttttctaaatctcattatatagttttgttaaaataaatgtttatattcttcataaaaatgattagattatattagggatattggcggctaa

SEQ ID NO: 220603 - DNA, 1722 bp, Cannabis indica
acagtaaactttttgtaaagtattttgtaaatcggatcccaaagtattttgtatgaaatgctataagtatttaatcaaataagtaaaattttaaccaatcatgattttcacaaacctcgttgattagcaacgagctgcacagtacgtttaaaatcacgtaaacatgcctatgctagttagggtgttacagaccagtttcctcagggctggccagcctgctccctacaagtgtttgaccaaccaggaaaggacctggttggattctttgtacaattttacatgtggactgcggattgaactgcaaattgagccctaatagcccaataaagtagctgaaaaatatctatgtttaagggcattttagtcttttgtaattaatcaatttgatatacaaatatctaaggatttaagttgtaaatgagggtttaagctcccctatatgaagggccttaactctaacctaaaaaggacctaagtctaattctagcctccaaatcattaagttctagaacctcattctatgcctaaatctctaagtgtaatatctcattctctttctcactctctcacacgcccatatagcattctcaacacttgatatttgccatctttgattcctactctgtattcttaaggaagttatatcagatcctacctatagtgatatgaatagtattatcatacggtatcaatacaactaaaaggggagtaggtcattacccactaactagggggccaaacatctataaagttctgcgtgttctttactttcaagttctaattgtgtaacacgtggcaaacatcaaatttataagatcctgctatccattgatcaccttttgaggtcagcagtttggtgctttcattgagagcaagtcaatatcatatctgatcaaacgccatggttaacacgagaagaactcttattgcactatctgggtcttcgggtctccctcaagacccacacactgtagatcctaatgttcatgttccatccgtaattgagattaacatgagcactgtagatgtgatcaatcttgcttccacaataagtactttgaatttggccactacagctagccaaattgatagaaacatcctggtggatctaaacagtaggcccttgcctctaaggcatgaccttccattggcgcctaccaataaaggaatgacttttggggaacatccccctggaacaaaaaccagatctcatctctagtactatgctggagagataggagttggaattgacaagccacatgtggacttgggagaagatctcgagttagccaagcttagagaagtcgtcgaccaagtcggcctagttaaagagccacgactgtttattctgatgtatttgctaagtaaagacgcgaattcttgaggtggatggatgaccaagagtacatccttcaatctcaccaagcaaagctagatcgccacaacagagaggtcagcgacctgattaggcagttctactagaaaactgatggaagaggcaaggatctaatgatagatccactccaaggaacactatgccaaaaagttctaatggtgagaacaaccagatcccaacaaccagcggcatggggattcggccagggatctcaagcttaacaacaaccccatcatccagcctttggctgacaagctacctgtaggagagcatgttggaatttattttaccaggatcttagatctactcacaagtatgttgtttaa

SEQ ID NO: 220604 - DNA, 3181 bp, Cannabis indica
tacatctttgtctcacttaagactattcagtcgacgagttatagatatactctattaagtccgcatttaatgagttaatccattaatatctttttttttagcatgattgcctttatattcgttaattcgtattccccaagggtgacacttgtcatcctttgaagtaccagtcgaatttcgggtataacacctaagtttatcttctagttgctgattaatacctaaataattttttttaaggtaaaaatacattttgttacacttctattgcatccgtaggtacctaaccattaagtgacaggtcaatacctaagtggcagattctaattggcccaagtcatttatttttttattaaaaaatttaaaaatagataaaataatattacaaactaaaaacatgattaaacacttataaaataaagagataattttgaaataaaaatataaaattaaaacaaaaccctaaacttattcaatcacacctctctctccttctttttcttcttcctctctctctctctctattacagcaaccacttgcacatctaatcaagcccattcggctaccgttgaagaaaatggaggtcaccacgagcttgggaagtcctgaaaacactttcttccttcgctccttcttcttgtgcatctctccttctctctcgcgtttcttcctctgtcagtctcccttcacttcgttgacgttaatggcgaagggaaaaattagtacctgatagaccacattaccaccataagcacaatgagatgtctctcttctacgtctggccctcatttttttgggtagtcatcttctccttttatctctttaaattcccttatctcactactgactcctaatttgtataagagatactttgttttggctttatgggttgaacttcgtctatcctcataccattgtataccccaaaattgttaaaactcaaatcagtagtgaatatcccaccatacaattatctctttaaattcccttatctcactactgactcctaatttgtatgagagatactttgttttggctttatggtttgaacttcgtctatcctcataccattgtataccccaaaattgttaaaactcaaatcagttgtgaatatcccaccatacaagtccatataacgaactttatttttcaggattttgggttggaatccagtaagagaggaagagatgggtttgttttcttcatatttgatttctttgtttactttcttattggaaagggttagggaagaggattggagatagatttaacacattttggtttaggattttttggaggccattggtgagtgaaatttgtcaaagtgataatgtgaaatattataatttgtaaaataacttcacttaatttactctatgcgactgtgattgttgtacaatgtaaatctatggtcattttacgactataatggtcatttatggtcgcacagtgtaattcatagtcgttttggggaccatacaagataatttgctaataaattttattgtaaagttatttgcgaagaaaaaatttcatagaggctatttttataaaacaatccattggtgatttttttttctgttcaatgaagatggacattaaaatatgtttaataaatcaggtttattttgttttaattatgttgcttagtttttaataaattacgcttaatttttatacaatatttgaatgatttttgtaattttttttttaattttaaaacaatttttgaatgtttaaatcaatttttaaattaaaactataattaaattatttgaaccaataagagattgacatgagaatagtgattagctgatacttaacgattatgtacctacagatgtaataaaagtgtaataaaaagtatttttaccgtaaaaaatttacttaagtgttaatctgtaattaagagataaaatttaatattatcggtttataattcttaattgtagaaaattttattacttatattttgcataaggatttaagtgttacaaaataaataacacttaaatgaattacttttatatctatccattaatgttttaaagttttagctgccattattatctctttaaagaataacataatgaattgaaggagcaaattttgaaataacttataagttcaagtaattttcttcagaagaaaaagttcatgagaaaaactattggcaatgatcatagttccttgaaaaaaaatggactttatttattatttctgtattttggttgaattgaatgttgacaatgcaatagtcggtggtcacttgatcgactgactcactcacttcactactagctagttatttggttcattgttgcaccaccacctaattaatattattctttcactggttagaaggaatgagctttcataatgtactatctatcttattatatattaacaccaggcatagacaccaccactaaaagtgggatccatgattactctaataatccctactcttcactaaaataattattttaaaataaataaatgaaaatggctctccatattgaggcatatactcagggtcacccacatagaaccgaggcaccagttgctcccaaaaagaatatatacattttaattagttataatatatatttgtaataaaagataatatttatagatatcatattagcttaagggtttatttagtacgttgtattgtattgtattgtattactattatttaatacaatattatatttggtaatgacttgtattaataggttgtgtaaaataatatattttcaataaactcgatcttaacaccgactccgagtcaagttcggatccggaatctggatccaaggttcgggtccaagtccgagtcaggtctgggtctctagatccaggttgactttttgtagatattaagctaatacgaaccatttgttatgtactaaataatacatcttatattgtattaaaaaatttagtggtaatatataattaatacaatacattattttacttaaatatagtgttgtttattatttaatataatacgatcattatacggtctacaaaatgaatccttagtgtaatagttaagtaagactccatatataataaaaataaagagcttttttttttttgaaatagaataaaaataaagagtttaaatctggttaagagtatgtcccctcactttaaattctattccaacat

SEQ ID NO: 220605 - DNA, 1692 bp, Cannabis indica
gccactccatagatgtatgtagttccgccactgtagacaatgaaaatctaccaagccagagaagtaaactcaagcggagcaaagaagcaaatatacttttaataagtggacggcttaatacatctaaggatgttgtggtaggaaatgaccaaacttctgctaaattttgggatcgaatcgcagaatacttcaataccaaccacaaaggtgaagaacgaagaactggaaaacaatgcaaagatcattggggcaagatgaatcaaaaggtgacgcgtttcaatgggtgttataaacgagtacaacaagcacatcatagtggttagtctgaagagcaaattactgaaattgcgcatgaaatgtataaatatgaaaataacaattctaattttttgtatgtaccctgctggagattgctaaaggatgagctgaaatggaatacaaccttttcaaccacaagaaggtggtaagagaacaaagctctccgaattaggggcatatacttcatcgtccaatgcggaaatgagtgagcatgaagttcatgaagtgtgccctactggccaaaaggcggctaagcggaagggaaaggaaaaaaaaaaagaaacacatactgcatttatagatgttaatgcacggaaaacagttgctttagaaaaattggtggcgataaaagaaaaagagacggaacataatatgatgataaaatatatggattatctcgtcatggacacatcacacatgacggcggaacaaaaaaaagatcatgaaaatctatgtagtcatattaagactaatattttaaagttgtaatgttatgtatttgtactatttttattaatatttattattttatttagttaatatttttaattttattttaaactagtgtaacttaaattttctatatttaaaaatttctaatggttgccaacaatatctattattatttatcattactcaatgccaataatatcatttataaaagacctatctatacattcatatttagaagtttaatttaaaatttataacaaatatggcatgcatgccaaatataattaaaaaagaaaaagaaacatactctctaaaaaacttgaaataaattaagaaaccaaacaaaaagacaaaaagtttaattaacaaaagacaaaattatttgacccaaatttcaacaccaaacttcactcctttataataggtaatagataaataatgtaatataaatagatgtgattaagttttggtcttaattgatttctctttttaatgatatgaaaatttgttgttttatgagattgaattcttttgataatatcatcaatatcaatgtgaaggcatagaaaaaagttctaattatccaatggtagaggcattggtaattaaagagagccaaaaaaaattattggtaatcacttttttttgatgttttttcatacattttattttatataggattgtagtagttagttaggaagtagacacctaacttttaattattaagttagttgggtacttgtaaatttaattaggttagttgagcacttacaattttaattacttctaaattagttgagcaatttaacattttaacatctataaatatcagattttagtccccattttaatcaatttttcactataatctacttatatttatcaaccttatacttatgtattgaattcaccgttgcgttg

SEQ ID NO: 220606 - DNA, 2664 bp, Cannabis indica
gataggtgcgatcaattattaatttatcttggccccacttatctttcatccatggcaggtatggttatgcgactagactcttatcccgatcgcatcatctcgcaagtttgagtcatgcgaggttaactctttaagagccatattattgacacgtcatcctttttttttttttggtaaaaatatgtccacatgttaatctttcacgagactctactcgtatttctagacaaaaaattcccactatataacacatattaatactctttattatagtaattgatataaatataaaactaaagtataacacggtgacataacactctaaaatgattatattctatcttattcctttttctttttcttttttttacatttttaagtaatatttattcatgagaaaaatgattaatttaagaaaataaattaattaatttaattatgtatagatacctaaatttttgggatattatatctttattatatcatattagaccaaaaagtggtacatttttaatttatcaaatcgcaagtgcattgtattgtagtattgagattgttaagaacgaagtcaaacttatgaaaattgcatgaaatcgaaaaaaaaaaatacttatttaatctaaattatttaaattctaacctagttctaaaaataatgaagtttttagtaacaaagtaaaatatttaacaggttaaaatggcaagtaacaaatatttttaatgatatttagaaaaattattaagacttcagaattcacctaagtgtaataaaaatatttaagatcatactgattctcataatataattagaaatcaatctaattattttctaactaaaatagattttacttcggtttaaaattaattataacttctaaccattaaatgtgaaacaatttaaatataaatatatagtcaaagaatattatttttaataaaataaagaatcaatcactaatgatttctaactataaaaaatacatgatattaaaaatttttgaaattatttaaagaaacaaaaattataagtgtatatcataatattgagaatcaacataaaaataaatacttaactaaatatactatgtttcatcatccaccttaataataagggagcttagaaatctataacaaaattaactaagaaaaattataaactagcactgagagcgtagagtatttttttctagatttttctatctaaaactgcctgaatactaaaaatttaagcttctttttataggaagataaaatgataaatgcgcaatttaaacttattacaaattgtatagggtcaaaatacaattacttataagttaaatctggattttccatatgtcactttctgattagttagaaaaaagagcaagtttgacatttgggtgacacatgttggtatgggggaagaaaatgtttcgactactttaaaaatgagaccatgcggcttaaggatggagaaccgcatgcttggcacgtgcaagacacacccgaaccgcacaacactgtgtgcctcacatgcgcgtggttgggggcaggagacagaggcgtctgtggcgcttgatgtattggaaatcttttactaagatatagatttattaacatgtatattagattataattttataatctaacatcctaaatatgaatttcctaaaataataaaataaacacataaaagttatagaaaactttacattgatggcagcagaataattatgactccttccattcagatctctaacccttgatcctttttatttcagagtatgatcaagatctgaacttggattctctttcagttgacaatttaaactacacaatcttcctcactatgttgagtattactttgaaatgtgtggacaatttttcaacaccaaagaccacaatttttgtgtgaataaaactcaagagaaattcgaaataataaatggaaaataataggctttcttttgattcagtttgtcagacaagagagagtctaaaaggtattctatgaatcaaatgccattgtgttctatttataggaatttattaagtttagggttagaactaaatgggctgattggaaagattcaatggcttgaaataagggaaatttacaccacatactgtatgtttcccatttatttcaattatactgtgatacggtagtttttttcttttttactgcctatttttatactgccttcttaatttgtgtattctaatattgttttgttgatggatcggaagagctaaaaaaaccagggggcagaagcaagtatttgctgcagcgactgcctcactggtttatcatgtttgggttgtgagaaatgcagtgctttggaagggagagcaggtggtaattgaccatattgttgcacggataaaagagaaattaagaataagactaaccatgtttcaacctcagaagataactagcaaagatagagattggatacaatccttgtaaaggatttattgtgcattttacatactgtataccgattgtaactagaatacttgggccttttcaggtgccattaggatgtacaaagattggtttatgcaatacacatctctgatttatcaaaaaaaaaatattgttttgttgataaaaaattttttattcttttttgtttacacgtgtaagccttgagttttgcatgtgtattattattatta

SEQ ID NO: 220607 - DNA, 1454 bp, Cannabis indica
agatgagttttgccaggaatttcgaagcccggtggctgggtcatgtaaacttcttcttgtaaatcaccatttaagaaagcgttgttcacatctagttggcaaactgtccatccgtttgacaaagtaagaaccaaaaccaccctgatagtaacaggtttgactactggactgaaagtttcagtgtagtcgaaccctgcttgctgatgaaaccctttcgctacaagccgagccttgtactggtatactgtgttatcagggttttcttttttcctatacacccattgacatccaatagctgtctttccaggaggaagcctgactagaacataggttttgtttcttattaaggctagaatttcatctctcatggccttattccagtgttcattgagtaaggcttcttgaatacaagaaggcagtttagaaaccagaaatactttgggtttgtgaatcccagattttgatatggttttcatgtgatggttgttggctttgctaggatcatttgaacaacctgtcatgataggatgctgaaccacattagcatcaacattttcagatcgaacagcagcagtagtagtgccatcaagagcagtggcaactggtgcagcaatgaattcatcagctgctgtgctgacaccagttccaggtgttaagacaggttcattaacttcagtagtgattggctcagcagatattgggaagcctaaacctggtatgagattaggctggggacacacagcaaaaatagggccctgcaataatggttcacctgtagcattaagagaattttggcttggagatccattgttagtagcacaaattggagaaatattatctattgaaacatgctgatcaaccatttgattattagtgacagagtgtgagtgcacaaggtcattgattgtgtaaggctgcctataatgagagcattttggaattaaggccgatctaggattgtggatatctgagatgaatcaagggaatcatgatccacaatagtctcataaggaaaggaaaattcatcaaagactacatctcttgagatgtaaagtcttccattagaatcaaggcatttgtatcctttatggttgagactatatcctaggaatgtgcaaggtgtagatctgaaatcaattttgtgtttgttatatggcctaatattaggaaaacacttgcatccaaaggttttaaatgttgtgtagtttggctgtttgttgaagagaatttctaagggtgacttgtggttgagaactgaggtgggttatctgttgtgtatatacacagcagatctgaaagcttcgtcccataacttgaggggtagggaagcttgtgccaacaaaggcagaccattttcaacaatttgtctgtgttttcgttcggccaagccattttgttgatgtgtagtggggaaagggtgtctacccatcggtttgtagagttttaatagattt

SEQ ID NO: 220608 - DNA, 2425 bp, Cannabis indica
ttatttatttttctgcaaatattttctgcttgttctgttttgtcactacaaaacaagtttctgctgtagcagaattactttctgcttctgcagacgcataaagttttatattttcttatataattgacatttgcaaaaacacggtttttcactctagaaagaaggaatgaagataccaacaattctggtggatatgtgcctagaagtgaggatattaatgatccaactagtgatgtaccattagtggaattagaaaatagacaactctaaactgcttcgctgaatctaaccgacaaaacactaagttggaaagagaggttgtaactgctagggcaacacaaggaacaaatccttagaatcaacctgatcctggggtaagaagaccatgaggtagacctcgaggttctataaccaggagagagtaaacaaactagggaaattctcaaaacacctaagaagaatagcctgggggtatgagggatgttccattgtataatcaaacaaataatcaagagcaacgacgagacgttcctcaaggatcccaaggatttatgaactaaggaaacgaacaaaatgacgtactagaagcttctcccaggaatgaggaagcaagatagcctcgacctagggatcagggaatccctcgtgaaaatgataaaaaccctggaaatcaacccaggaaaagtgggctacctccaagacaccctcatcgtccttctcgatcagaaaaggaagatgtatacacgtatctaaatagagggcgtgtgtctaacctcttccaaaggagaaggctgatacagaacaaagcaagttctagttcaggacacttaaggtctcaaggacacagtcgatcaggtaggcaaacgcgacaggaaagtagacctcaacattatgctggccaagaaagcatgagcaatacacgaagctaccaatctgagagttacttagaaacaaggtctgtgagtaattacgagcgaagacagcctaatcttcgtgagcacttgaattgaagacacactttataggattgtttggatctaaaatcacctcaaaaaaagaaattaattgctattttagttcttcctccaaacttttcccaatgtagacacactttatgggattgtttggatctaaaatcaccttttctaactcttcaattggtttgagttggttgttatcatcttggattctaggatccaaatcttgtgtttccttctcgactttttcattcagaattaccatcagttgataactagtttttctattttgaagttacactcgataacattctcgagccaataattggtcgcctctaactgttcctactcttgagtgagtaggaaatttcaaagataagtgctttatcaagctcaatgcctctagaccaatcagtgttggtcgacccatcagtacattatacacggatgggatgtcaacaaccaaaaactcttgcatttgtgtcgttgacaatggaggttcacccatagttaagagaagctcgattatgcctaagctcgcaacactgtcgcccatgaacccgcataattcaccatgcaaggtcttagttttgcctcttctaaccacattttcttcaatgtgtctttgtagaggatgttgacagaacttccattatctaccaatactcttttcacccttttattagtgagttgaactattatcacgagaggatcaacatgtggataccgcacatgttctgtatcttctttagagaagatgataggcggttcatttgacttcgctctttttaaaggttttggagcgaatgctaattgctcattttttttacttcgtttatatacctcttttgtgcagtgttactgttttctacgaggtcggacctccagaaataaccaagatatcctcaccctctacaagaggttgtaatcttgggttatttgggttattgggttgattaggcttatttccctgagttctcacatattgcctaaagtatccccgtgagattaaacttttaatctcatctttcaattgttggcattcctcggtggtatgcccaatgtctttgtggaaacgacagtacttggttgaatcttgtttgttcctcgcatgcctcattggttctggtctagaaaatgcgaccctattctcattggcgaggtagatattctcacaagtttcattaaactctatatatactgaataaatgggtacaaacttctcatgctttttctgtttcttcttgtccttggataattctttcgactcatcctttcttttggtatatgatccgctgggattttatttatctttgttgtcacggtgcttgctgttgcagtacttgtgctagatttgtctcccgagccggtctttaacagcttcatttcactccatgcttcctctttatgcacaaaaacttatgctctttcaataaattcataaatat

SEQ ID NO: 220609 - DNA, 4124 bp, Cannabis indica
tttgttggctggtacctctgccactttatggtatgaatgatccaaattgctatttattttgcttagttttttgttttcctcttttatgtttaccaggaatatgtactagcctattgtgtgagaaattttatatttcttatcagatttggtggcagggtcttcttttgggtgtcgacatacagcggttatgcgggagatttgtctcctcaattgactttggaggtcttgacagggaaagagaatgctgtgctcattgatatccgacccgaggcaagacacaagctcttttggcttattaattactttactggctttcatattcaaaacctcatattcttgccatagccatagccattggctataataactatattcataatgtttctcacctttttcaacttgtgattggcttaagattatgaaaaaaaaggaagaaagattttatctcatcacttctttttatatttttatatatagcagttgaaaattttatccatcacagtgaaaaatgtttcacttttgagaagcttattttaaaatagtcaatggctttgtgaaggttttgagagaaagagacggcattcctgatcttcgtcgagcagctcgttatcgctatgctagtgtcactcttcctgaggttggtttacatgctttattgttgttttttatagaatggttgatctagcttaataattttctagtcctagacttctttacacagcttagttattattcttaaatctttgaaatgttttagattgatggatcaatgatgaagttgttcaagaatggaagagaccttgaagactccttgactgctgctgttattaaaaacttgaagattgtccaggtgaggatttaggagcttaacaattttcgttgctcggttttcttttctttcttatttttggaacttgatgtataatggttgttgctgttttcaactatttgtaggacagatccaaggttgtagttctggatgctgatggttctcgttctaaaggaattgcaagatccttgagaaaacttggggttaaggtttgtgttcctaacttgaatttaaggtgttctcgaatacttctccatatggcttgttaaactatggtttgagtcctcatgaatcatattgctagttaaaagtttcaattcaaaattgcccacaaagtgataagatcatttcttttttaatagaaccatatgcaattgcagaaatcaacatgaaagtactaatttttatattgcggtgtcatacatggcagcaaccttacttggttcaaggtgggttccagtcttgggtgaaacaaggtctccggtttaaggaactcaagcctgagtcaacacttaccatactcaatgaggttttttactttgtagtttgtacatttggcgcttggcttaatcttatatagtgttatcgcttcataatcacgtgaaacctgttatattttaggaagccgaggcaattctagaagctattaatccgtctccagtacaagctcttggatatggtgtggtaagatacatttcattattttggttttcactgcaatctttctttctgctaacacaagagatatctgcagggtttggctgcagcattgtatggtctattaggtatgtatacatgatctcatatctatttagttcaagttttgaggatctatctgtgaggtttttaggtgttacctctcttttctgactaagaatggtattatatttgttacagagtgggaaaagacgctacaattcattggcgtcgttggcattggtcaggtacactatatactgtcatagtccctttctacttctaattactttcgatttcgatttttaacctttgtgcattattttcattccaccagaccatttatcgtcgggtggcttcttatgagggtgctgaagatttcagacgagacgtgaagtaaaaaacttctccatatgatgttttacactgttttcatgtttatcttattccctgttatggagaaaacagataatgatgtaataagcatataatggtgtttgtaggctattgcttgctcctgttagacttggatctcaggcgttcacatgggcagccgaaaaattagagacgaatggcattggactaccaacatctccatcttcatcggctgttcaaaaccgggttcttcaggctgctgcaaagcatgaatctaaaccatctgatgcagaaggtgtagctgattcatcttctgaagccacaatggcagggagcgagaaggtagatctatctgaagcatagaaaaagctttgagatttgtgtgcagcaagtataagattctgacttgagaaaccctacaataagccgaaattaccttttgtgtaaaaacacaactgttaattaatgtcctaattcaaatagttcaactgacttttgtaatttgtacatctttcattaataatcacccatccaatttcatgttaatggcaataaatatgtcatcttccattttgaacatgtgtcaccatgggcagtcgctaggcctgtaaaaccaaaacgcatttgaaattcaaggatggagaggagatcacgaataacacgaatcaacgaacttctttaagcaaaagttttcatttttcctgtttcttattcctcaatatttggtcctctttaaagtttgagggtggatataggtttagctgataataataataataataataataataataataattttccttgaataagaactggatgaaaccattcagctaattaatttctcctacaaaaatattccttgagctcaattgtactcaaatttattctccatatcaccatcataattttattttaattacataatatactaaaacaaatcttgaatatggtacttacttttgcaaaaataaaatcttaattagcagaaaaaaaggggtgaaagtggaaaaagcaaaaattggggagatgaaaccaataagtaataacacttcgcgccattgagcttggttaagctctgcaactctgtgtgcgtagaacaatccaacccaacccaacccactgtccgaatcttccctctagggttcaccaccgaatcactctctcatttcaggtatgattatgctattttccttctcattgctttaatatatatattaaaaaattatatactgaacgatattgttccctagggtttttgaattttgcgaaatgaggcaatatttttgctccagctttggttttctatggagttttcagttcttttgtttttgttttttcatgtatcagttgaaatttgaaagttttgtatggctggttattttctcaacattgtatacgtttttctagtgcattttcttttggtggatcgtttgagaatttcccttatgcatcgctctttatctttttttaatctttcattcttcctcagttcagattaacatattatttaggattttttgtttttggacaatgacggctcgtaattgaatatggttggttaacttttcttacagtatttttcttgctccgtcttctccctgaaggagtttatgaaatgctatcaacttattcccaaattcctgctttttggcaaattagtttcattcttatacaattttctgattagtttaaccatagagtcctgtaggaagagatatttctataccattaaatttgttgggatatttaattcgttcaatatggtctttaaaagatatctcttttcttgtgttgtgttctgtgatgacttagttgttttttttaacaatctcggagtttggccttattaacaatcggaactctctctgttttgtttacatgtagaaaaccggattatagccatggttagcgccggatttgaggtgggagtggttcctttcaacccagatggctggggtcccatggaagcaacctccacgtccgccgcctcttctaatctccctctcaatgtaccttttgccccattctctcgctctgacaaaatcggccgaatcgctgattggaccagaaacttcaacaaccaatccaggcccaagaatcaaccctccgattctgcctttgatttctccaacgacgattcattccccgggtacgccgacgacgacgcctccttcagattggtcgacggcaagcctcccccgcgccccaaattcggacccaa

SEQ ID NO: 220610 - DNA, 2373 bp, Cannabis indica
ccttccaaaacattgaaattaataaaaattcacctcacaaatctccacgagatatacaattaaagttgacttgtacattctctttataaatatcaatccaatttggctctctctcaaaacgcttaattagtattcaaacttcatcgggccaattgctagctagctactaagttacatatgtatgacataacctaaacaattgattttgcttaagatttgactaactattataatcaattaattaagaataaaaattacttggcatcttcaaaagatatatatttctaatttctaaagagatcattacaatatccaaacactaaattttaacaggttaaagactatatgttaattaatgggacatgttaattacactacactttgcattttttttagtgttgtcactcataccattacatgaaattaaatgtgtttttatcagatttgtttgtggaatgagttatctatataattaaatagaggtaggcaggtagccaaacttactgtgtctcttctatagaactgaaggcctcatggttgaatttcatggtagggattgcagcaaccaaaacaggtgcaagaccactaccctggtgctctagctgccagcaaacaataaaagcttcaaatccagatatttccaaattaaaacactaatagattgaaagaaagaaaaaagaaaaatgctaaaacgtcaagatcaacacaaggaatagaaaaatgcaactttgaatttatctcacaaagcctcctacaagtagggtataaatatagataccaggaagtcaaccaatgtcataatctatctatatttagttaatcacaaaaacagagcaagcaatctttagaaagtgaatttatttgtcctaaatcttcgttaaatatttcagctatattccaacttcagcaatgtcttaacaattttcagctaaaaaagtaaatcttattttctaagattcgcttctttacaaagtgaatttatttgtcctaattctttgttatcttttttatgcttattgagaccgatacaacatatggcacagtgaaagagccttcatcattccaaagagaataaaaatagaagaaaagtttcatcaacagtggaagaaaacatacataataagctagctaaaggtggacataacatgcccaaaaagaaaacacaataactaaagtcagttgtgttcccacctccaccaaaaaaaaaaaagattttgtagtggtagcggatagagatgtgaactacagtactattccaactcaaaaagtactcttctttagtttctaatacctgcaaaacatccataactctacaatggtgtcactctcatattaaagtatttattttattaattttgaatatttattctaaacattttggaataaagtcatacatacttagcaatacaaataaattgcattcatcttgttaggaaatcttccagtattgcataacagaataagggcacaatcatgtattcgagaagaaaccataaattgattgattatcaaaattaaaatttcaatttcactattctgaaacgtgaatcaaaaagcgattcagtccaaaattacagattttacaaccattaaacttaattaaaaataatatataaagggatcgaaatttcatcgaacttacctttctaccctcgtcaaagaagagaggctgatcacagagagagaagtagagatccttcttcgttagagtacgacaatgataatcagaatcgacaataaccaaaatttttaattttaaaaataaataaatatatatacctgaatatatagggttattttgtgcgagcttggcctgagcagaaacgacaatgttaggggctgagcttggcccgaacggagaagagaacgggagcgagaggagagctgggattggggtggagtgttgcgtcgatgaccagaacttagagaagagggatcggggcgagcagtggggtttgggcgagctttgatcgccattcatggggtttggagttagggcagagtgagagagagagagagtagcgagatgtgtttttgcaaaatgaaactttgaatagaattagggattttgtaaatatctcaactttattgcgactgttagtaacagacgaataaaataaatattttttttaaaaaaaaattacatttcccgtcagtttatattttagcgtcggatatacaatcgacgcaaactactaattgtttgcgtctgttagaaactgacgcaataactcagcccctattttttgcgtcggtcctcgatgttgaccgtcatgttgaccgacgcaaattatgatgtttgtagtagtgaagaattaataagtaggaatttacttggtaaatttggttcacttattggaagctcagcatata

SEQ ID NO: 220611 - DNA, 2870 bp, Cannabis indica
aataattagtttacgaaatatctagatggttattttctgagtaaacttttggtatttttctagatatatttaattaaatagaaaattaatatttaagttgattatattcaagatacttaaatattagatattttttaagcaatttaattaaatagaaaaattatatttatgttgaaaattagcttattaattttagactaacaaattagaataattttttcaagaattattttattttattttattttatacagattttaaaaatgtatttttttaatacattagatttcaagtttagttatataaatttatagaaaattaaatttgaatttaaaattaatttaatcaattttggaccaacttaagttaagtaattttcggaatatttattgaaaattaatattaatgataaaaaataattttatttattttcagatcatactttaaaataatgagctttagtttaaggatattcgatctccattgttagctctacataattcttattttaatgagattcgtccataatagatgttcatttattagtaatttaatgtcgtataatctcaaaatataaatattattctaaatattttatttcttagtgacaatcaccttaatagtgactattaagagtagtgtttacaaagtatgaaaaagcttttaagataagaaaggctttgactctcacctaaacagacaacaccaaattctcatcttgatcgaataaggttgccaaagtagtgtcaattttggatgagttgacactctcgcttaaatggaacacttacttaaatgagacacgtagtatcattgaattgaaaaccttgaaaattaaccttgaaaattatttaagatatgtttgttgtgtattttcacatatttttcctacttgctaaatgcttactaatttttgaaattgtacaatttctgtaatgaactttatttgctttttatttgttgatatttgtaatttctaatataacaactagattgtatcactattgaccgagaacaaatttacgggagctaactttgtcaaatggaaagagaaaattaatacttctcataggtgaaaactctttatttgtcttaactgaagaagttccttagcactgaagaagtttgggcgttcacaggatactttatgatagcaggtaattttccttaaaaaatccacaatcgtttgcatttgatgtgcaaatgatatgtttgcatttgatgcgcaaatgaatttttaattgaagattaagtgttaggttgatatgagaggatgttctaaagttttaataaagattttttttttcggaaaaagaatttcaagaactgctcaaacaaacgactttaaccaaattggaaaatcagaaaatccaaacaaaatattaacttgaaaacgtatcaagctcaaaaaaaaacaatagcgaagaaaagatcgataaaattaaaaaaacaaaataagaaagaaaataatatatccaaatgcatcctaagaaaagagtagattaatcgtttgggtttctttcaaagattcattttactcccagaatctccgatgtcagcaatgtttaaatttattcaaaattcctcaccgcagatagattaaaacacataattttaatgaaaaagtacaaaacttttgtaagggaatgaggttaggaacagaccaagaacaatgcattctaaaatataaattttctacaagaatagtagaagtaaacaaaattgatcaggagtgattaagaggtttgggtcaagttaaaaccaaaagtatctactcatcgtaatctcatcaaaagacctatttatgccaaaaagaaacagcaaataaagcgaaaaaccaaggaaagctcacaattcccaacgaaaacctatcaaacaaaactatataacaattacggtaaaatagaacagataagcggaccagtggttactaatcatttctaacaaaataatttatcaaaacatgaacataaatttcagattaacacgaatataagtcaaatccataagttgaaatataaaataaactgtaaaacaaacaacaatatgaccaaaatcttgttaaaggactccgctggagtaaacacatcaactacataaatggttccatgtctttcttctccaaatgaactaaaaactaaaataggcttaaaattgaaaggccatccaccttagaatccgagcttggtacggcgccagtgcctgcgcttggcattgtacctaatggtgttgtcggtcctcaaccggatccagtgaggaatcggcctgttctggcgcatcttcttcgccagcttcttcttgatcatgaaactcttgtgcgacggcatcttcgctgagatcggcggctgtctggctggcttgcgaggcagcagaagaaaccctagacaatcaaaaatacacaaattaaagagcgaactaaacgaatcatcagagacttaagcactaagaatcatggaataaatccatcatattattgcagttgaatgcaaatctcgaaatgaagaaggaaataaaagagagacgaacctggaggatgatacaagctagcctctcaaagttggcgaagcgccgttttatagttctagatgttgctctagagacgaaaccctaaggatcagaatgggcctcaaaaaagcccacaaatggcatgaccctctataagcgtggccctgattttgtagtttcagaacccaaatagccaaccaaatccattgtaaactgaggaatttaatatagggctatttacaaaaatatgggaaaataaagataagttttgatatatatggcataaaaacttaattacactaaatatggcatttttttaaaaaacttacaaatatgggaaaaagtcttgaggaatgccataaaaa

SEQ ID NO: 220612 - DNA, 2324 bp, Cannabis indica
ggcctaaaatctttgacagtgttagaacattttattttggaaccaaggtaataatagttgaattgatttctctgagaatattacctgaatccaaaaatgatattactgcttcacttatgtcatcaccaatagcctcccaattgtcttggaagaaactactagagaatccatctggacctggggcttggccacttggaatactaaaagctgctgcctttacttcctctgtagtgaatccccgaagtagtaattttgattgctctgctgatacccatgctcctttagagattacactattcttaactttctttctattcaccattttagtcccaagcaagtctttgtagaacctcagaagtgcaccagtgatgagctctggttcatgtacccgctgtccatcttgtgcttctatcgagaggatgcggttttgtctaattctatgcttaatgcaagcatgggatatccaaaagttaaataatctatttgatagggagactgtttctgcaatcctaaaagggggaaattcgtcggttcagggagatgatagatggatttggactttagaaactaatggtagattctcatgcaagtcagcctacctggcccaagctgttgacagggctcccccttgtgacgttgctccttcactttagaataggctttggaattgtaagatcacaggaaggatgaagaccctctggtggtgtctcttatctaaggtaatccaagtgcgagctgagatctgtaaaaggtttcttattgaggatgttacatgccccttttgttagacagagaatgaatctattgaacacccttttctctcttgtaatgtggctttccacttgtggaagtcttctccttgaggaatttacctagtttgtggtactggaatttgattatgggaccaggtcaaattcatctgggaccctaaaaacaagggcattaatgccgatgaggtgttcctttacgcatcgctaaccgtggatactatctggcggacccaaaacgaaaaggtacataataatggtctagtcgatgtttataagtgtgttgacaatattcgctcctcttttgcaggtcaccatgcttttttgttcccctgcgtaccaccgcgtcggctggatgcctggcgtactcccccccagggctggttgaagctcaattttgatgttaaagtggtattggacagcatgtgttcagcggtcgtggcaatggattatctaggtagggtgatctgggtgcatacttctaagctggattttgctgatgctttaggtggagaagcggcgacttgctgtcttgctctagatgtcgcgaaacataatggagttaagtatattattgtctagagtgactcgagggtagcgatcaatgctctcaatagggaggttgcccattgggagattgagaactacgtctctttttgtcttagatcctctccttattttgttagttgtatttttaataatattagcagaaactgtaattttgctgctcataataaggctaagtgggcgtttatgcaccaaaatttcggcagtatttacttgtcctctatcttggaacacctgttttgtaatgaccgcgaggtctaactgcgtttgattataatataagtatgcttttcttcacaaaaaagactaaatataacacaaactaatttttttactaaatttaataaaaattttacatctttcattagagatgatctttgttgtattgataatttgatacaattcgagagtttttacaaaaaaaaaaagaatatgcattaatattgataaattttagctaattaacaaagaaacatttgtaacacaatcatgcatactcttgatcataatctatattaacacattaccttttagaaaatgaaaagaggtgcaactaaagatatatatttacaatactatgcaatattttcataaattttaaataatttattataccaaaactatagttaaaataacttattatatatatttttacataagtgcacctttgtacataaattattaatgtatacttttttatttgtaggtgtaccacataatttttttgataaataattgagatatatagggtcatataaaaatagatgtactggcattttcattgtgtttatataagtatgaaattagtagaaattactatatagtaaataaaaattaatatttcatttacaaaaatatctacataaggtgtggacaatatctataccttttatgtgcttttaattaccaaaataccttttacactatctgttgtcgagtgaatttcgcaacaccgaattatattgttttgttaatatcaaagagaatttt

SEQ ID NO: 220613 - DNA, 2308 bp, Cannabis indica
caaaatattttaaatccaaagtcaaaaataggaattttccattggtgattggtcttaagaagggtatttctggccacccaggaactaggagttggggtactcagacaaaattgggaaggcctgtatgaagttgaagatgaaataggcttcgagacctataaactaaagtaaatggacggacccatagtgcctcgagcttggagtgctgaccatctccaaaaatactaccaatagttaggagctcagtattcaaattcatctttactctgtaagttaacttgtcgcggacaaagtatacgcattatcccacataaatttaagttaagtgacccaaaaaataattttttaagtcacttacggggtactgaggcataacacacacgcagacagtaaaaaaaagcaaatagataaagaacttgaaatataagttgtcaaagacataataataaaaggcccaggttgggccataaagatgtctcccctaacagaataaagataataaaaactaaaaattaaaatattgtcctgagggggcagaagtaagcaaaatgacaaaaaggggggacttaatcaattgattcatggtggaagatggggacccctttgctcggccaagactgcctccagcttcttgttcttttcccaaaactgggtcgcggtagcctcaagatcaagcagaaagtggagacgaggtttgaacttgtttgatttccagcacattaaaactctgtccttaaagcgcttctcgtagtacttgcaggtcactaaagctaataaagcctccctcgcagccttggtgacttccttttgggtctgctcccataactcacacaactccttgagttcaacagacatgttggcggtagtttccaagtcagtctgatgtaactcttcaagagacatgagcttcacagagagttcctggatatactctcgagcgtcttggaggtccttcctgcctgaggcaataatatcatctttaacctttagctcctcttggtggtcccgctccatgagagtcttctctgctagagcatcgttgcatagggtctccatctgatcctctgaaaccctgagcttcctcatgaccctgtccatgccacccaactccaaaatggtgaacccttggtcgatcaaggtctcggaaagccggtcggcctctgcagcaatctggcaacaaagagaaacaaggttaggacttcaaaaagtaagattaacaaggagggccttgaaaaaaaatacttactgagttatggcaacactcatatcctggatttgatagatggggtaagaggaagcgaaggccacatacctcattatgggaagctgggtcaagtcatctgtaaagtgacttaccatctcggaggcgaacggtgccaggcttcgacccacaaaatggttaaaatagtcggtcatgggatcgagactcaagtcctatatctccttggtatactcacctcggaagggcccaccttgagccttccttagccacttcttcaaggtctcaacctcaccatcacccttggacagttcatccaccgcgtaattgtgtttggcgatacgaagctggaccctctcctcgtcaggatgagcgggggtcgaaagaatgcttggaggggcaggaaagtcatcagctttagctaggatcccggagtcagtgttgggactgagggtggttactcgcttaagcttcttggaagactcagactcagatacaacacccttttatttttggtcgagtggaggaacttcttcttcctcttcctgaatgagaaccacctccttgttcccagtaacttccttggtaggtgcccctgaagtcacatttgctcgaggatgctctggcatctccaactcacggctacgggtgtgggccagaatggcaagcaggtttccatgggttttattgttcaaagtaaatagaaagatagaatagcactaaagaattacaaatgcaagtataatgcaaccaaggctaatcctaccctaatgatcaaattctgccctagcaaattcatctgacgacagaaaccaacttcaggtcatgtaagaggagtggtccaaagggattggaataggaggaccaggccatccgaggacccaagaaatgacttaaattgaagaaataaaaactcttggcattattgccccaccgaaaatgaggcatctggaatctatacaatctcatgtcaaattctactagccttaagttagcataatcctaaactgaaggaacaaagtgaatattcaaatgacacttacatgctctagaggtactggcaccggggaccctagagtttggaactgg

SEQ ID NO: 220614 - DNA, 3399 bp, Cannabis indica
attaattaattctaaaaaagaaaagtctacctattagtaacctgctattacaggtcaaagaaaaatgtaaccatatggttataataaaaatgtaaccattgaatagtcacccataattattatattcaaaactcgtatcacatactttgaatattatttaaatggtttattcaaaactttaataacatctctatttattatcaaattcatatttagtaatactatttattagtagtcatacatgatagatatcaaccactttattttcttaagaatatttgatatctaataattattaatctatatattgcttgaattcaatacaatataataattcaaatgtcgatcttatgaagtcaatgatcaagttatccttctctttaatgaatattttttgaactaactcatatacctttattaattactataatcaatttaattttaataaggttaaagtttctcacttaataaaatttcatattcaatatcatcttatgtattgaataattaatgagactattaatgtatgttattgaataatcatattttgactcctaagtttgaaattagaaagtcctaaatttttcattattttctttcataaggatttgatattctatatgtcagaataattactaatttaaattagttggatgttcaaaccttcttggtatatctttaattcaataaatctcattcattgaaatttatatagttttatagaaatatgattgaatttagaaatactaattgttgcatttaagaacaatctagttttcttaaaaatcacttttttcaatgaatactacactcccactaaaataattattacctttgaatatatttgatcgtcatgactataaaaatatatttttgactctttaaaaattatctccctttcaattttcataattattgagatttaattttatgaacaatttcaattatttactctcaatctcaatgtattctaaacacatcctttaaaacagttttaatttatttaaaacatatctcatattgatttaattataatctatttcactaaattgattcaactattgaatgtttagatgtgactatttaattagacaaactaaataaatgtttatgcttctactaatgattccttaatgaatgatgagctggtaactcgcagtcagaatgagctggcgctagaacgggattttgcgagtacgtgagcattgtttgtaactacacacttggcattccactcgtttgaggagtggcatgaagtgtgattctaggaaattgcactctcgaagcataccgagagcctccagaagggtaatattgtccaaaagatgttatttgggcttcttccagattgatgtacttctgagccctcttctgaaaatcttgaagactagttgcaccttcctgttgttattcattctaggagggagttcccgtccggatcctagcctgcaatccatcatctactttctttgtcttggaagtctcctctttgaacctcttgatgaagttcttcaaggtttccaaaggtagttgtttaatgttagacagagcactaacttcaagattgatctttctggctgcaatgaactgcctctgaaatcgatctacaaattattccaacaatccacagatccaggctctcacttcttgaatcattcttctgcagatcctcccagtgtcagtgggaacataagcatttggcgtcattgctaaacctcataactgtcataaatctgttgaatctagacagatgatcacttggatcagtgtcacctgtgtacatagtcagttcagacattttaaagtttttcaggagttcaacctcgagtacatttttggcacagggtgttcgaaagcatatttaaccaagatcttacttttactaaataagtatgttgattattactaatctaacatccaaaacatggaaccttaaaacaattcaaattaaacttacaaaatggcaatggaaattaatgtatcattccgttctgtactctcactcttgttttctttctgtcacaaagtgtaataaaaaatgaaaccaagatttcttctcctttgaatgtgttcataataatcttccacaaaggtttgagtatcaccttgaatagtgtggactgatactcaaacacctttgaaataatttttgagagagaatttcttggtgaattttttaaaataagaaagaagagaagagaaaaggttattagacattaggttagactagaattctcttctcatcactttctttatagggattttttcaataatatacacaattaacaatctatttacataaatgactttatacaaataattagtaaatattaacgtccatgttagtaataaataccgtaactcattatacttttctttttttttttttgctttttaaacttgaattttttttttcctttaaaaataatattcatttttctcttttaatagtttttttaaaacaaaaaaaaaatcaattattattttaactaaaaaaaatatcatcgcaaattgtaaataactgacttacacaatatttaatataataacgagttccaaaaattattcataaaatgttttattttttcagatctaaaaattacaatataatatttaaataagtttatttttatagtattttagataaattattaaaatgtgacttataaagaacttaccacataatttattagcaaaatttataagcatattaatttaacattagttgcttataatgtcaataatataccaatgaattatcttttattaattttttttttactattttgcgtaaaaaggaaaccttttagttatttatgagattaataagataccaataagttacatttttataaatattttatttaagataatagattatattatattattgtgttatttaaaacaatttcacattactttttaattttagtaacatttgtagtaccttcaaatttatttaacaaacttatatgttacaataaaataaaataatttaaataacttataagtgagatttttgataaatttaagtttattgtggaaattaatcgaataaagatgtgattaaaaataattcttaaagtttgagaaaatagagatacaagagttgaatgacaaaaaaaaaaagatggtaaaagaaatggaggctgaacgaaaggaggaaaaattaaatagaaaaagagataataaaaacataaagaattaataatttaaacactaaaaacgttatttttttatttaagctcactacaaacgttattaaataaatatatatatatatatatatactagcaaaaagttacgtgtaaggcatgtatactaaattttatgttaatttttttctatgttagttgaaagtgttataattaaaaattaaaaaaaaaatattattagtta

SEQ ID NO: 220615 - DNA, 1694 bp, Cannabis indica
ttgaatttgctaacagatcagtagttcagagaattttactaccaaaattttaacttagaaggttaaatgcaagtgaaatgatagttacgggagtctagccgccaaaaactcaaaaaaaaatattattattatttttattgtttgtattaattttggtatttttatataattcttcgataaattttttaattttttataagaagaaaaaaattatttttaattttttttcaaatccaatattaaattatatcaaatggtatctctggtgctcatcggcaaatagttaagtatgggatattgatttgatatagaaattttgatatttataaagttgtcattcaaatattttaactaaaagataactttcaactatttagagtgaagtaaacatactattactctcctttgacttctactagggtttctttctaacctagtcactgccaatcttatttttctccgaccaggcctgctagcctcatttgggcttaggtgtggctttggtcgggtttgtgattagcacaaggggtttggcatgacggaccctctttcttttcgccactatctttctattctcataatattctctgtccctgtgttctttttcatctctgacttaaatctttgccaatgggtgaagttagtgttggttttgatttgatggagtttgttggtggcgttttaataggtgcgcatgtctgggttgagtcttggatccggcagggagtgggtttgagtcacaagttctaggttgcttgtatgggtgacgacgttggacctcaacaagaggatggggttcaactatgttgagtttttgggatttgcagtgtttgtttctcctatgactctcaaatgtgtgatgcggtagttcgtgagtgtggagtggtgattgtaagagttgatttggttagtggtattagattgacctatttggtttgtttgtgttttatctctatctgtgcatggttttagccatttttctttttcttatgctttattatatttttaacattttaataatggtgttttctcaccgccctgctagattagtaaaaattgttattggtttgaaaaatggaaagaattttaatctctattgggtagtccatgatttatcgattggcttaagttgtttttggaagggtgttattatttctcacggtgtttttcagatctgtctattggccctttttttatgctcttcacttaaaatgaagatggcacttctctccatttgtcacttgtcacttgtatgtacaaaaaggtgtaattcccatatttaattatgtgagagaataaaactttatcatccttcgacaaattaaatttcttttcacatagttaaatttaaatttcatagactctgagagaagttaataaaagacacaattgactcatggcgaaaaaattcttaataaggtactccaagagacgaagaaataagcaaaaggtgccactcttattactttcaagacaatatgagtacaataacaaaagtctttcccaaaggtttttgataaacacttttggggagcaaatgttatacccgatttttaagaaatcaaaaaagtcaactttgcaactttaatcaagacttataaatgtcaaataagttaagaaatccttcttgagggccccatagcacctctaggagacttgaaaatattgactaaccatttggtgccgggactcac

SEQ ID NO: 220616 - DNA, 2109 bp, Cannabis indica
gttacacaagcaaaagataataagctcctaatatgatctgatacaccatcaatatctctaaaaccgtcctctttttgttggattaatcggacaacttctagtcaatcaaactctatactaaattttagaattctttattgtatccctatttgtaaaccaacttgtatggccaaaagttccgcatacaagggctgatattcatgattcaacacagtaaaggaaacaaagacaacataccctgaattatctcggaccacaccattgactgttgcacatacatcaacattcatcttaagctcgcctacctcagggggagtccatacagtctccactcttcttctttcccttctcttgtcttctctttgcccttgaaatcattcacaaattgcggacaccactcaactatcatagctgccttgtgaattgtctcttcatgtttggtattgttcttaatgtagtgccatgataccattaagaaatactcaattgtttctctctgccataccttagacaacgagaagagataatacatcttccttgctcacggtttggatatgttttttgaacccatacatttttcataccaacttagttgatttgcaactccataatacatgaaagatatcttcttttgccctagtgaaacatctttggcagctagggttcctatatgccaaagccaaattggtaggaagccatgagtgagccaattttcacacagtgttttacttccacgagaacctccaccatggtaccgttttgttgtcatcgaattggtcaatgttcctttgtacttctctcaccatttgatacccacttttgattggatactcactatttttgttgtagtgccataaaattttattttccaaatctcatcccgtgcatgtcaattgtaagatcaactcaacataaattagctcaaataaattccaaatcccatagtccattcatatttttcagatatgtaacataaagctccgcatgtagacttggcttatcatacactttaaagtgtattggatgaggtagccatgggtcctctaagattctcagacactttccattctttattctccatcgatatccattcaaaataattttctttcgccatatcaaactctgccatacaaaagatgcatgcgccccacatttcgtgttaacacgctaccatttggataataacttgatgcaaagcgatgttggaaggcggatacatctccatattttttttgctagtagtgcttgattgaacaattctaaatatctgaattccaatctatctttttcctttgatttacaaaaaacataccatttttaccaatgcattttcttcttttgtactgatgactcccacccaaaacctaactgccattttatgaagattattaattgtattctttggcaaccattcgtagctcatagtataatttggagtagcctatatgatcgctttaatgagtacttcctttccagctaccaaaaacatagaggctttccaacactcagcttgttccacactcagttcttgatgacattgataaatgcatgtatatatctattaaattttgttattttctctccttattattattgaatttattctttagacctttgattagtgcaattttgatttttttaggattttggaaggctaatcatttgtttggagtattttggaatgattttagcacactttggtagaaaataaaatttttttagagctcgatttcacaaggcataacttatatataaattttgacatctttatattcagaagtggattttgacctacgcatgaaagttctagatcttgctcttatctatccaaaacatcttgaatcatctaatttcgagttgtattgagcaatttatggctaaattactatcaaagtgcacgacacattttttcataggccgcaacccacaacactcgggccgcgacacatttatgggacctgacttggatgttcaggccaggctacgacgcacaattttctaagttgcagtctacaatgctgattttaaaattttatttagtttttaattacagtttaagtgagactataaaataatttttctaaaattaattagagatttggaattacc

SEQ ID NO: 220617 - DNA, 1669 bp, Cannabis indica
tatggtatcagagcaaggaagacatgcttcctttcaattctgatcttgttcagattatcctcgtcgtgtgttcatcttccttctccggcgacgatcacggtccgtagtgaagaattcatttctccattgaattcttcatcgactcctcttctcttctcttctttttttttcttttgttcatcatctgccatgtctaccgatgatcaagaaacaagaatcgtggatgaaacttcaactcagaccaacaatggcgaaaatcaaagtcagctggctgatttgggagtcaacacacaactgattaggtccagaagccaaattgaagatccctccgatccatatttcctgcaccatggtgataaccctggaaatattctggtgtctcaattgctaactggacaggacaattatatggcttggagtcatgcaatggagttagccatctcagtcaaaaataaattgggcttcctaaacggttctattcctaaacccctatctctaatcatgctctttacaatgcttggattcgaaacaataacattgttatttcttggatcattaactcggtttctaaagaaatttcatctagcattttgtatgacgaatcggcctctgctatttggaacgatcttaaggtgagatttcagcaaagaaacggtgctcacatttacaatctcagaaaagacttgatgaacttaaagcaagaaaaccaaaccgtgagtatgtacttcacaagactcaagactgtttgggaacaactaacgaatttcaggcctagctgcactgcaatggctgcacttgcggtggagtcaagaagttgcaggaccattacaacatggagtacatcatgtcgtttctcatgggattgtccgacttctttgctcaagtcagaggtaacattcttgttatggaccccttacctgaaataaatagagcgtttcacttagtttcacaggaagaaaatcaaaagggaggacagaatgtaacttcagacccgaatggtagtatggcttttgcctttcaaggcgaaaagaacacatctaagcctgaatcttcaaaaaatcagcaaccgaaacgtgggaggcccttctgcacacactgcattatgcatggacacaccatagaaaaatgctataaaatacatggctaccctcctggatataataaacctggaaaatcgaaagaagctgctgcaaatcaatttcatggttcgaatgaaaccagttcaaataatgcagatattaacacagtgttgcctcagttaaccccaactcaatatcagcagctgctgggacttcttgctgctcaaaattgcaatcaacaaccgactgatccaggaccatcatcaggtaaatcaggtattgtattaaccaattgttctttcaatcctgaaataaatagttggattgtcgattctggcgcaaataggcatatttgttctgatattaaatctttccaaagtgttcacacaataaagccaactaagctggttcttccaaacaatgaacacatcattgtaaacaaaagtggtaatgtttttcttaaccaagatttaatccttcgtgatgttctgtacacaccagtttttaaatttaatattgtctcagttagttgtttaactaaagatgacaaccattctgttaaattctttgctgataaattctatatacag

SEQ ID NO: 220618 - DNA, 2401 bp, Cannabis indica
cttagcactgtaattttggaaatagaaaatagaatcaattaggaccacccgatcgataacaaacaaacaaaatacacgtgacatgttttctcgtacattcttgttctcttatcaacaacatcctcatcacttatatcaatcacatatatgtatatacatcaatcatttttctaaaccattacatatcaatcacgttttttaaagagttggattaattcttatatagttagttcctatcatcaccttaattgtattaattaatcaattttataagtagtactatttagtatttaatatagagtctaattaaaaaataattctacatgggctaattttgtattagttaagggactatttcaaaaaaacacaaaaataacaaaaaaaaattacaaaaatataattgtataaaattttaaatatttttacaattttatttaaatacactttattgattatcacagtacatatacctagatttacctattgaaaataaaagcatgcataaacctcaaatgtctttatgcaatttaaggtcttagcagaaaacaaattagagaggaagaccaaaaatcttaaactgattggggaggagaatttcaagctttctctgactttgtcaaatagtgtggaataggtattttaatcatccttgatccccatacatctgctcaaaatagcatattagaaagaaattataagcacatatttatgatgggattgactattagtattgggttgatgcttttcaaacctcaatgtatctcataaatcgtctccctacttcagtgcttaatgatgagacagtacaatttttatttttatttttagtcacaataaaatttgtgactaaaagtaaaaaagttatgactaattataaatcagcattcctatgttatgactaaaaagtctatggctaaaagtaagtcacaaaaatcacagtttgttatgactaaatgtgtttttagtcacaatacttattataaatgaaattaaattagcgacaacttgtatctaaatgctatgttgtagtcacaagtaacattttgttgtgactaaaagtcacatttagtccaaaacaaattatgttgtgattaaaagattgtcactaaaggtagttgcatgagacaccatgtgaggttctgtacttaaaatcaacagattactctttccttaaaacatttcatacaacatgctatccctgtctaagaccttaccgaagtcacaagtttcaattccaattaactaaatgtgaatctagggtataatgagtctcataaaggatacaaatgcttaagttttactggtaggttatacatctcaagagatgtagtttttaaacactcatcaaagtaaaaaaaaaaaaaatgttcatgtcacagctcgcacttcctggtttactctacctactgtccaaaattagtctagcactaactcacaaactgaaccatctgtcatgaatacactagttgatacaagcattcctgaaacttcctatgcaacacaaccagaaaaagtctcatgaatcctctcaacatagccatgttgattttataggtcatttttttgttgacctcaatcttgacactgccaatggtgtagatttgagatgtactaattctttagacaactcaaatgtcactcaaatagatactatttaggaaactataagtaaccaaggcctattcatctcatggtaataagagccaagtcaggaatcttaaaccaaagtataactagtaagacaaaaataaaaagagagcataatagaacctaacttagtcattgaagctttgaagcatgcaagatggagaagtgcaatgtctgatgaaaacacattcttgataaaaaaaaacttggaatttggttccaccttcaccttcaccttcaccttcaccttcaccttcaaggaaaagtactacaatgctgatagcacatttcaaaggttcaaagctcggttggttgctaaagggttccatcagagacccaaaatggattttggtgagacttttagctctataattagagctttaacaattagaattgttttgacaattgttgtaactaaagggtggaaagtaagataactcgacataaacaatgtcttcttcaatggaaagcttaaaaaagatgtgtacatgacacaacatcaaggctttgaagacccaagaaaacctgaatatgtgtgtaagctgcaaaaatatatttatgacttgaagcaggctcctaggccggcctagtttgatagcctgaaacaaactctggtgcagtgggattttcaaactcgcatgtagatacctctttcttcattctcaaaacatcttaattaattattatggtgctcgtctatgtagatgacaacctctgttgaactttaaaagtttattataagactaaataaagc

SEQ ID NO: 220619 - DNA, 2317 bp, Cannabis indica
taaaataattaatttattaattattttaattcactcactttggctataaatagaggattttggaggccttttgaacacaccaacacatcaacaccatctacgccacacaccacatcctacattctactccattactcttcttttattttctctctttcttagaatgtattttctttgtaatttttattctaagatagttgtgagcttctaaacatcttaaggttgttaagttggaagatgaagtaatatgtaactaaataatacttatggtgtattgatttcccattatatgctttaaagtttatggaattttcttcttcaaatatgtctttcatctttaatatcatgtattttggattgttagtacatactttcacttcgttcttcattgtataaaaattataatgtactttgattaagtgtagttcattagattgttcacatctaattcttagaatataaaattatatttttgcctaaaaataatatctttgatttgttgtagtttcattaactcattttacaactaatgctttgaaattatacatttataagtgaagaaaattcctatcttatgaaaatactttgtgcttaaatgaaaaatatattttgaaaatgatagtttgattgagttcaactatcaagaaaacttgggagtcaatacactataaaatattattaatatatattgtggattttaaagtcttaataatcttttctctaccatttattcatcaaatctcttttaccttgtttattttaaatcttatttattttcttttattttatgaaacaaatctcattaattatgtggagctaggttagagtgtaattgattttgagtttaaaaaagtctctcttaaatgtaaattaactcctttgggttcgaactcatacttacatgaacactatatttcatatctgattcgtgcacttgcgagtataaatatttaaattttatatcaccattgggttaataacactcaacatgcaaggaagggacggaagtccctagtttgaatgggcatttgctgcccaagacctctcgatcctcttacgatggtttcaccaccacaccacctcactgtggtcgacttcgaaccaagaccttttggtccgactacctacgttgcatgcgtagcatgaataaggggccttattccctgtaggcgcatgaaagtgaagacccgtttgggtctagggttctttgatcggagagagaaagaggtgaagtgtttgttttttttttctaatttgatttttattttatttttctttaattttcttagttaatgaaaagggataattcaaaccctaagtaataatggccagctaccattcaagggataagccaccacatctcactaacaaaaatgaccaaaatacccttgatgcttaaacttaagctaaaacaatccttagggtaaaatggtcaaaaaccataacccggcccaaactcagtattctattcatatcaaatatttatcccactaagaaaaaagttctagacttacccatgtgactctagcgaccatccatcgcatttacgtcgtctccgagcaaaaatcataaaatttacataattcacatataacacaaataatacctctagagtttaataagatatttggaattgagaaattataactctaatgcccatctctaataattagacccataattaaataaattcatgaataattataaaaatatcaataattaacactaattgcctttcctaatccatattctaaaatgcgttcattacaatcagtgcacacctttatggggtgtgcttggaagtagggcattagctttctagaagctaagagcagactgtaagttacttctccatgagtggatatcgatatttggcatcgataagccttttgttgatgtaatatacagggtactatacaccatcttcttcttttgtgaggacagcactcacaacatactttgtgactgctaggtacacgcctagctcttcattgtctaggggtttagacaacataggtggttgggccaattgtttcctcagctcatggaatgcattttcacattcctctgtctactcaaattttttgtttcctctgaggatgttgaagaaggatacacatttatctatagacttggacacaaatttgcttaatccagcaatgcgtcttggtaggctctgtatttccttgactgttaagggtgacttcatgtccaaaagggcttggattttgtctgggtttgcttctattcccctagcgttgactatgaagccaatgaattttcttgagcctacactaaaagagcatttgagggggtt

SEQ ID NO: 220620 - DNA, 3910 bp, Cannabis indica
gcataaaacccaacaccaacaacggcaataggcatggtaatggaaagaactacaaattaactggtaatgtcgagcagcaccccatggaaaatgcctataaatttaaaactttctcagtcctaatagacaacatagagacaatctatgtgacaacttagtctatggtgtcgtacaagaaaccatctcccataaaaaaggatgtcaacaaaagagataaaacaaattttcgctgctttcatgtggactatgaccacgacacaaaatgaatgtaataatttaaagcggaaattcagtttttaaataaaaaaaaaaaaaaacccccgcacatatagaagtatgtcaaggctgaccaaaatgaaaaggctgcccaagcagacaataaccagaactaattgatgcccccgctagtggacatgaatttataggtaatcattcggggtccacatcttgctggagactcgggcaaagctagagaaaagtatgcccaagccttgcagtatgaacaaaacaaagcaatcttggtcgtggaagaaaggaaacctaaaataccacgtgtaggggagccaacagtaacattcacttaagtaattgctagccatgtcatcttcccagacaacgaccccttagtcgtggagctgaaaaattgaaaacaagatggtgtcacgaactatgatagacaatggagcttcctcgaacattctatttaaaacaacttatgagaagatgggattccaactgaaagacttgatccccttacacccagctcatgtatggtttctctagccagagtgttgcacctatcggacaaatccgcctactgctcattattagacaagctcggagtagcataactgtaacggcacaattcttggtaatagatgtcccttcggctttcaatgtcatgttaggccaactaaccctatatgacttaaagactgttacatcagtttttcatctgtgcgttaagtttccaacaaaaagttgagtgggatgtctaaaaggaaaccaaaaaattgcacaggaatgctataagcttgctctaactaaggtcaagaaggaaagtaccttcaactagagttcagacaaggggaaaagcattgcttaataggaagtcgccgaaggcggggacaaagacatggatccccaacttggggaaacaaatgcaaatgttaggccaatagaagaactggaagaagtggaaaccaattaagatatctcggccaagaaactcaaaatcagtaaaggcttgctgtttgtaataaaattatctttaataaaaattttgagagcaaacttgaacatttttgccttgtcacatgaggatatggtcactagtgacaccactgtaatgtctcacgccctaaacattgacccagactttcatctcgtccagcaataaagaagactattggacaaagaacgctcacaagcactgatagaagaggtagagagactatgcataaacaagttcatcattgaagctttctaccctgcttgggtggctaacccgatactagcgcctaagctgaacaagaaatggcaggtatgtaatgattttgctgacctcaacaaggcatgtcccaaggactgttttccacttccatgaattgatcacgtcgtgggtgcaacaatcggacataaaatcttgagctttatggatgcttatttggggcataatcaaatcagaatgtatccactggaccaagaacataaaaatttctgaacagatatgggtctgtactgttataaagtaatgtcgttcggtctgaagatcgctagagcttcttatcggaggctagtcaacaaaatgtttaaaaaccagatcagacagaatatggaagtatatatggatgacatgctcgtcaaatccaggagggatggggggcatatagaggatcttaatgaattcttcaaaatcctcagaaaatacaacatgaaacttaatcccttaaagtattcgagttgctgtcaccaaatatgatgtaagcgctgtgctgataagagaggaaaataattccaaatccatctactatattagcaaatgactcgtcgaagccgaaggtcgatattctctgattgaaaaactcacttacagcctaatcttagccacaaggaaattaagggcctacttccaagctaatcatattcgagtttacaccgacaaacctttgcgccatgtattgcaaaagcctgatacctctgggcgaatatgaaataatcttccaacctcgtacagtggttaaaggacaggccttgacagactttgtggttgaatgtacatgcaaaaaagagggaacacaagggacaacccaaagcatgtataagagtccctacaagaaaagaataaagacagacctacctagaagttacatgtaaacggatcagcttctgaccaactttatggtgtaggaattgccctcatcacatctgggggcaacatctgcacggagcgatcaaatttttgttcaaggcctccaacaacgaaacagagtacgaagcactcatagatgggctaaaacttgcttgggaggtacgcatcgaatacattgagatctgtaccgattcacaattggtagtaaatcatgtctcaggagagtacatggcaagtggagaaaaaatgatggcctatctaagcaatatacaatacttgctcgcacaatttaagggttagaccctcaagaaaattccgatggaagaaaatacaaatgttgatgccttggcacggctcgcgagtagcacaggagcttataaggccaacttagtcccgatctaattcctagaagaacccaacatcaattgtgcaaaagaagtccaaatgatagataccgcaccaaattggatgacacccatcgcagcttatctcaacactggagaacttccaaacaatagatatgaagctcgaaaaatgatgagactagctgcgcattatatcatagtttaaggtgtgatgtatagattaggcttctccatgccattacttcgatgtgtaacaaatgaggaggctgaacgactcttgtctaaggtacatgaaggattttgtggtagccacgtgccaggacagagtttattgaagaaaatactaaggcaaggatatttttggaagaccatgatggaagattaaaaagcctatgtaatgaaatgtgataaatgccaaagattttcaaagatcccctgtgcaccccccaatgagctaatacaaatgcaatgtcttttgccttttgccatatggggaatagacctgattggacaattgccaaaagtcaagggcagagtacaatatgcggtcgtcgcagtggattatttcacaaagtggataaatgtcgagcccttagcaataattacatctaataaagtgttggattttgtagtaaaaaacatcatatgttggtttggagttttcgcacaagattgtttcggataatcgcaaacattttgatagcaagatgttcacaaatttatgtgcgacacatggaatcataaaaagattctctatagtggcacaccctcaaacaaatgggccagtcgaagcagtaaacaagacacttaaggacactatgaaaaaatagctcgaagaagctaaagggaattggtcggaggaactacctgaggtattgtgctcgtactaaacaatagaaagaacaacagctgggcaaataccatttgatatggcttatggttatgaagcaatgctacccatagagttagaacctccatccaacaagagactgacctataatcaagaagccaatcacgccatcctggcataatcacttgactaaattgatggaaaaaaagcctcaacaaacctaaagctagtagctcatcaacaacaggtggctcggtacttcaataagcaagtgagggcaaggaaattctttgtggaatatatggtccttagaagagtgttctt

SEQ ID NO: 220621 - DNA, 1597 bp, Cannabis indica
atgatttttaagtttattcaaaaaagaatatgctcctttgttattcttattattttcctactttggttatactgacgagagccatgttgatcatgatttgtgcatattgttgtttcacgatctagtctttgtgtcatcatagatagttcaagtttgcactcacttgtaggtgaaagcctagaatcgtacaggaagtaaattaaatctgagcccccggtattatggtggttatcaggtgctatcagtttttggctgtcgttttctatgattggtattgagagctataggggtctagtggacagtgtgatatgtatttgacacttgattttttgattatttatggtctcactactttgtttatccactttgataatggtaatgagatgttttatatctaaaagctaactatgcatgaatttttattaaactaagggttttttgatattagttgttttcctactagacttgataagctcatcttctattttcttccatttcagaaactcaatttgatgctgatggatgaggatggtactgttgaggatggtttgaaaactgattttgtatttaaacttgaatggatggtttgaatgatttaaattagttatgtactagtaagaaatgaagaatgatggatgctagatattagtttggtattttattgacttattaagtctatctattcggtgactatataattgtggggatattattgttcttttatattgttgagtggtcctaatttagttattagtatttttctataaatataggagttattttactatttttgaataaatattttgtagaataaattaaatgatcatataagtattatcttcttacaaggataaaaatgtgacttttgatccccttaattatgaatattacatatttgtcacagtttaggattcggatcgtgacaatgaaagtattgcttctctttttttttaatattttttaagaagaatatcagagtacattattgtgtatgaaaatccaaaaccaccctatatatagtatatgtgatcatatataaatttattttatatctatacttatacgggttattggattcttgtatatacaagcattaaattgatatcatattcacttgatcatgataacacacatatatatacatatcgaaatacagcaaagcacgggcacacacacatatataaacaagtgaaagagtagtatactgctatataattagctagggtttacatgctatcattaagtgcagatatgaaaaaggaaaacaaatatccatgcatgcaaaaataatatgttggcgtttttgtctttacagagtgttcacaagtcacatatataatatatatgaattcaattcttgtcaaagatgcagtatatatatatactagatgagagttacgtggcgagccacgtaaatattagttttattttaagttctagtggtttttgtttaagaatttagtgactaattgtaaattatgttataaacgatatgttttataaaactaaagaatgtcataattgtgttataaacgattttcttatgtagagtttaaattttatattgatgattgttatttagggtgggtatgggtgt

SEQ ID NO: 220622 - DNA, 2578 bp, Cannabis indica
aaattataatattattggtttttgttcaattataatttaaaagacatattttaaattattaggtttgaacgaaatcacgtagtatcaattatttttattaatttttttcataaattcaaaacaaaattgaagaaatctggtaaaagttatagtgttattaacaatatacacttacgctgctaaaaaaattcattaaatttatgccgataattaatttaaaactttggtactgcgattatcattcttgattttgtgagattaagggtaaatagtggcataaactaaaattatttttttaatgacaaaagttcctaattattctatattgtaattttcgttcagtttcacttgtatatattctattagtgtcttaaacatcacacattttaaattaccgaatttgaatagaaacatacaatatcaattactttaatttttttttaataaatttaaaacaaaattaaggaaactaaatgaaaattataatattaaggaacaaggttgtttggaaaaagaaacattcctctattaatgacgtgcttacttctgcacaagtagctcttgatcactggaataaagcttaagataaaatttcgttgtcatcaatgtgtttggaaagcatcggtgatggcgctgagtcatggactagacccacaaaaaacacaatcaagattaatgtaaatgcagcactctttgatagcgacaacaagtatggtttcaaaattgttgcccgaaaccatcttggtcaccttgttgcaacatgggccggttgccatagcggaagatatgcagctgaagtcattgaagccatggggattaaagaagctctcaattgagtaaagaccaataattggcaacatgtttaaattgagacggacagtcttgtttcagtacaagctattcgaagcaaccaaacaatgaggtccactttcggcattttaatcaaagactgccaacttttgttatctaccctcctaaatattaatttatttttcattagacgatcagcaaaccgagtagcacattatgttgctagacattctcggtatcaatctgatcgtagcatttttgatatttctatttctaataaactcttacatcttttatattcagaatgttaaattattgaatgaatttgatattttatctcaaaaaaaaaaaaacactttatattgttgaaaaaaatcattaagtttaagacacaattattactattgattgtgtgagattacaattatgaaccaataaacgacagtaaaatttaagtcgacaaacgacatagaaaatacaaaaacgacatcaaaacaaatttgttaaaataagttgacagctgtgggatttgaacccacgccctttcggaccagagcctaaatctggcgccttagaccactcggccaaactgtctgttttttattctcagttacatatttaatatataaacattaaaaaatctagaaattagagataaaagtcaactcaattatatttacttgagattatcaactaattttgactttttgaaatttactcactcaatccagaggtggccggcggcgagccctgatcggagtaatatacaatagcggtggcaaggctacaacaatcgaaaaatcttctctttactgttaattgtttgaatcgagactcaaaataagacaaacaaaacaccattatggacagcagcactgctcgcagaagattggattgtatttctcatcaccttttactgccatatcaacccactcattttcttcaaccagtgagtttattgtaatctccttttttagtttcttacattttggttggtgatttcctgtgtttgattattattattattattgttatgttttgtgagaaagggtttagtcagtaatgggcaattggaaagtgaagtgtttgagcctgtgatcattggtggtatggttttggacattcatgccactccttcaactcctgcaagtccaaggaccactactcctggaatggtacacaattattcatttaatttctacttcaatcactcttttaataatgtatttatgtatgtatatatgttgattctagtcctttttaatggctatgaaaaatgcattattttcatgttgttgtaatgcccatttggattaatggctgccatttcattgtagcttaaactttgttttaatggaatggatttgcaatttctattagaggcatttttcagatagaataaattgggtttttgcccatattctctatgaactatcatattttgcccctcaaatttttcgagtgtcaaatcgtaccccttttgttaaagcaaataaaagttccgggggcaaaatatgatagtgatcatacttccggaggtaaaattgttaattatttaatagaaatttaacgaaatctaataaaagtctcatatttcagtaatgttcaaagctgaggggagaaatatttaacatcgctaataatttgggggggcagaaacttattaaggacaaagtttagagcggaaaaatacttgtttattctttcggataataggttcttgttacaatatatgagaattttataattctttcctttgggatctttt

SEQ ID NO: 220623 - DNA, 2580 bp, Cannabis indica
gggggaaagaagaaagagaggatccagaatccgcagcccttcctcgccgatgacaataaagagtcattgccttcgaagaagcgttccaaatctaatgagagccggaagcagcatcagatggaagagaagcttatctcttccggtatgagctccaagatactcaaagcggctctggctcaacagagagaggttgaggacgaagaggtccttgcccaaaaccctaacaattccctactgactatcgtcgaagagccggccaaggatgatgatgatgaagtggaagatgatattgataatttttctgggttcgatgaaactcagagccgctatggcgattacgaggtgagttttttttcctctttcagacccatgtttgagtagggtttctttgtttccaaaattatatatatgtatgtatattataattatttgtattgttgcaggaaattgatgaagaggatgagaaactactcgagttattcatgtcaaaagatgcagttccacaacgtactcttgctgacattattattgcaaagattaaagagaaagatgctaatgtgtcttcaggttggaccatcactactcaactttaaagaagaaactcaatggattcaatatggtttttccccttgatctacattttctagaaatttatgttaactcatttgcattttttttttctttccaaattgcagaagtaaggcctatgcctcagttggatacctctataattgatttgtacaaggggtatgcttagtaattacttttttttattattattttatttttaaaatagagttatttatgttcacttcatgtactcatggctaatgtcatatatagttatgccatagttttattgaaggtgagtctgaacctgttttatgcagacttggcaagtttcttagcaactatacagctggtaagatacctaaggcgtttaaacacataccttcaaccataaactgggaggatattctgtatttgaccgagcccgagaagtggtcccccaatgcaatgtatcaagctacaagaattttcgcgtccaatttgggtgtgaagagggcagagcgcttttacaagcttgtcttgttgccacgagtcagagaagatattaaaaagaataagcgtttgcattttgctttgtatcagtctctgaaaaaatctatttacaaacctggtgcattctttaaaggaatactatttcctctgtgtgaggtaaacagactattcttctacttatcaagtggctgggctccttaagcaattattttttcctagttcattttttgtttttgacaaaattatttttttcattggcagtcaagaacgtgcaatctaagggaagctgttattattgggagcataatacaaaaagtttcaattcctcttcttcactcaaggtttttatatattttgttgtgttttcaaagttgtcccctcctctttacatagaaaattacttttcattggatattttaaacaagctttttatatatgcttttgcagtgttgcattgttgaagcttgctgatatggaatattgtggtacgacaaggtactccaatacattttacatattatattttagaactaaagcattgttgtatattctataagatgtgatagccatcaatgattgttttttgatctgaaatgtgttccatatttgacatttcatatgtttgaaaaacgtcttgacattgttggagttaaaatacttgcagttactttataaagctccttttggagaaaaagtatgctcttccatatcgagcacttgatgctcttgttgcacattttgtgagattttcggatgacacaagaattatgcctgtaatatggcaccaatcgctgcttgcatttgtgcaaaggtatttaagcattctaggaattcctctttactgtttaacgtgttccgagtaagagtttgaaactggcaaagttattgtttctcttacaatttgttggcgttacttacaggtacaagaatgaactacagaaggaagataaagttaacctgagagctcttcttgaaaagcaaaagcataaactagtgagaaaggagtttcatttcttctattgtcaattcttttcttaaagtaactaagatcaatatgtaatctttattctctggttgaatgtaggttactcctgagattagcagggagctaaataatagccgcaatcggggtgagaaggaggatgatcttatgctaattgatatcctttgtcttgttacaactactttttttcttaattttttattttcgtcgagcatgactaaataattcaagtgtccctataaattcaatgatatgatacaatttattgtttccttaacttcaaattaccttcccctatttctgtgatcaataagaccattgaagaagataggtttgatattccagaggttcctatggaggaagattgatcaaagtacttgccaaaggtattttcttacactccattcctttgtttttggcctcaaatcattttttttgctcagttttgcaaggctcattgtgtttgcagcatgaaaatttcgtcagaatttaatcatgaagatttgttaatagat

SEQ ID NO: 220624 - DNA, 1910 bp, Cannabis indica
agggggttcccccccgaggacttgatgccatgctctgtagaattggcattgaagtttatgaccgtgttttcacgggcatttgttgcaggtttcaaagagctcgatcttctgaggtcgcttctccaagacagcgtgaagaaactgaagctggaagccactacgaaggacaaagaaattgaagatcttggaaaagctaaagagcaggcggaggaaaagtcaaggttttggaatcacgagttgatgaactcggtcgcgaccttgagaatgaaaaggagattgggaagaaacaatatgaccaggctgtctctgattacatctatactaccttgaccaagctgcctgacttcgacttcacagttctcggagcagagggcaattgaaatggtcgatgcatttcgcgccatgtcgcctactaagacccaagggacttgggggaaatcttttccctgaggatgctgaaaacgcgaatgcagatgaagtcgtagatggtgctgctagcaaggtcacggatgatcccagcactccaacaacttagcttttttaatttcttttgtattgtcgaactttctttatagcaagttaaattttaaataaaattatgatcgtaggcatataacttcctttttttttctgaatttttataaaggtaaattagtagcttctgaattttaatattatgatcagttaatcaaattactcttaggtgacgtttgtttggaggtaataagaatggaatgaaaatgaaacaattttcattccatttctttgtttggttgtattttaaatcattgtattatagtcttttcactattttggtgaaatgactattctattttgaaatggacggaaatttatgtattttaaattttgttttatttcattcctattccaattctcatttctatctctattatacttttattcctcccaaccaaaacccctagaggtagtgaaatagaatggaatagaaagaaaataattttcattccattcatttgtttggttgtatattaaagtattggaatgtcattccaatctttttatcaattttttatgcattttaaattttattccattacattcgtattcgtattctcatttctatttttattcctgaatatgcttttattcctcctaatcaaaagccacattaattcttattactttgtcaacatttaatattcgtaatcatactacatatattcttttattattacaaaaaaacaaaaaaatgtaatgctataattataacaatatatatatataggtgatagtatttaacctgaaatttgtgacatgccatcctgaaaaattagctgctgtagttaaagcgtctctccatttgtgtatgatagtatcattgtaacgttgctcaagtttctctaacgcttctgcataacttcttttttgtttacgaacatcagtgggatcaacatggtaaaacacaggcacaacaacatgcctattgctctccacgcattgaagaatatgggccaattcatccaagcaccacgatgaagatgcatagtgtttggaaaaaacaactatcgaaattttagagtcttcgatggcttccaagagagctttcgaaatctcttctcctcgctccagtttgtcatcaatatatgtttcaatacctcccatcttaagtttttcgtgaagatgactaataaaattaaagcgagtatcttctcctctaaaactaataaaaacatcatattttttctgtgaataagagatggtggggagctgattatcatcatccatagcgatctttaagatgtgaaatgtattttcatcatcataatctgtggacaagatttgtgaagaatgagaagaaaattgatcttcataactggttatatatatagtttgttaaatttatttatattgagagttgaaatattata

SEQ ID NO: 220625 - DNA, 1716 bp, Cannabis indica
gcattcctcgtcctcgtgatcgtacttccactacattcatcttcaacacttcggaaaacttcactaagaatttctgtgtcatcgagaagagcattgccaagtgacatgcatgcaagtcttggccaagtgacttgtatacttgccgagtgagttatccttgtgcatgctgagtgacatggccttgagcatgcttggccttgtgtctccttcttgtacatgtcgagggacatgcacttgtgcatgccgagtgacatgcccttgagcatgcttagccgagtgactctttcttgtgcatgccgagtgacatgcacttgtgcatgctgagtgacatgcccttgagcatgcttggccgagtgaatctttcttgtgcatgttgagtgacatgcacttgagcatgtttggctgagtgactcctcttgtgcatgccgagtgacatgtttttgtgcatgccgagtgacatgctcttgtgcatgtcgagtgacatgcacttgtgcatgctgagtgacgtgccattgagcatgcttggccgagtgactcctccctatgcatgccgagtgacatgctcttgtgcatgctgagtgacactgtgcatgccgagtgacatgctcttgtgcttgccaagtgacatgctcttatgcatgccgagtgacatgctcttgtgcatgctgagtgacatgcacttatgcatgccgagtgacatgcccttgtgcatgcttggccgagtgactcttcatgtgcatgtcgagttactctcctttgcatgccgagtgacatgatcttgtgcatgtcgagtgacatgatcttgtgcatgccgagtgacatgcgcttgtgcatcccgagtgacatgcccgtgagcatgcttaataacttttgagcgcttagagaagaaaatacgactatgcattcggagcaactctttgagtgtgtccctgctaatctccggattaatagttggctaatctcgagggttagcattgctaatttttgggattaacaaattctatagtacatctcttaataaaaatttattttggtacataccatctatttcgctatttaggaaagtcttttcgtttattttttgttatgatcatgtaagttgcagttatttatgaacacctataaaattttaaaaaattacgaatagttaccattctaaaaataaggtttaaatatattgatgcatgagtgattgtattttcttaaacgcgtggcaaacaactatttaaattttatttttagtattgtaaactactaaattttttttaaaaatttattgatagtcttacataaaaacatgaatatcgaaacatatatgggtaccaaaacaatcatttttgtagtatagattttaaataaatacataaatatcgaaacatatatgggtaccaaaacaatcattttggggtgtagtatagattttacataaagtaataaaaaattctatggtagactctcttcgtattttgaacattccaatagttttaattttaattttttttttatatatatataatagtttatattgtacttatataacacatcctgtaaattgttgaaaaaattaaaataattttatgcaccagaaataaagttcaaataagggtaactattattttggactatgtgttttgtaaaagttactaattagaccttctgttttgttaaatgacaaaatagaccatatattttctaaaatagttaaaataggactct

SEQ ID NO: 220626 - DNA, 4316 bp, Cannabis indica
aactaattgtatgtcactataagcaaaaaaaaagtattagtgaatcgtaacttaaggattttttttgccactaatgtttaaggatgataagttgttactaaatagttattattgacacttctcgtaatgtttgagattctttaggctcgtttagtatgctttattgtattatattattattgtgttggattgtattgtattgtattaatattatttaatacaatattatatttgatattgatttgtattaaaaggttgtgtaaaattataatatcttttcaataaactcgattctaacaccaacacagtttgggacctcgttcgggtctggtctggatttgggatccaggttcgggtccgggtacgggttccgatcccagtcctgatctcggtccaggtcctgagtccgagtttgagtttgggactccagccctcagatcaaataactcccccatctgacggctgacgtacatcacagaatacattccgtgaaagtacaataacgagacaaaatcgtatcccataatttatatagacttggatatatatagtactttctatgttttagtgcactgttgagggacggagctacattgtatcgtaagggtcctgccccctctccccccaattttctctttttattaaataaataaataaatacattaaattatatagaatttgattcgatacttacttaattgtattaataataataaaacattattattaaacaccagtagtgcttggaatctctagacatatcgtcttgtgatgattagcgatactctctaaaaatattacaataatataagactcaatatttaactgaaccaatatcaatattgacacatttcatggtgctagacaccactagtgctttttaacattaattataacaaaattacacgttagaatcctaaatactaattatgctttttagcatttttgatagtgatttgatgcgaaatttattatatttatttgtgagaaatgttaaaaggtaccagtagtgtctatcatcttctcatgtgtcaatattgttattagtttaactaagtatcgaacccaatatagtttaatgtaataatttttaaatagtatcgctaactaattgtaagatgatatatttagaaatattaagaatcactggtatctaataataatgctctttatttatatatatatgattatatggtagtatggatatatattgggaaatttgatttttatgcattaattggactaaaatgagtccacttattcaaaactattcaaaaatattgactggtcattgggccccatcgggtcctatattgggcctttgtcttaaactcagatccaatttttgcatcacaatgcatcgggcctgcattgggatgcatcgaacctgtatcgggcctgtctagaaaatacattttctaactcaaaaatcacagattaaaacatactaacctttgacattgggtccgtgggtcgcagtggttgtggagaaaggggtcttcagtccgtcagtcacggtcagttgcagtcgtcgtgggtggtggagaagggtggtatttgggttgtgggtcgtggtggtggttgggtcgcgtgaatcctcatatagaaaattggtgggggtttaagttttcctttagagaagataaagaaactgagagagggaaagagagtagaaagacagtggctgtttaaaaataaagagggtattttgggaaaaagagaaatgttttttttttttttgaaggaacctatttgactaatattaatacatataagtttacaaatcaattttaagttaatgtttgcataaaaaaatcaaatttgccaatatattatgttgatgtgcatgaatgaatgaatgtttatgattaagaagaggactcatttgtctccactataaggtgccctagagttagataaatggagctaggtccagctggtgtcactaccatacaaaaataaaaatgaatatattaattaataaaaataaaacgacagacgctccctcgataataaccacccaatgccaatgccaatgacttaatatatttgtctcaacaattcttttgatgggcatccaaagaaagaaacacataaaaaaagccaacactacactactactactagcccacccattcatctattcacatcttctttatttttttctctttacataaaacaaaatatatatgtatttttaacatatatttacttttgattttttttttttaaagtggataatattttttaataatattacatcatattacacctgagttatgtaatatatatataactgtttttaatgatatattgttattattatatatacagcaatatttatgttagaaattctttttaactatttgtaattgttatccatatggttttaataaaaaaaatagtcgtaaatatattttattttacaattttactgcagtcgtactctcttaactgttaaatatttgtttaattaaagaaaaattaatttagttttctattcaaatttgtatatttttaattaataaatatgataaataataattatttaatatgttgtctaatatatatcgacataatttttgagttgacacttaacaactaaaatgatattccctatcgtgcgttgcaagtgcttaatgggagatggaattcacaagacgattctggcttttggaagaaattttggtatttaaaacttcccccaaaagttaagaattttctttggagggctctctctaattgccttctcactcttgtttcacttcaaactaagcgagttaatgtgactaatacttgtcctctttgtagtggagatgttgagaccatatttcatattatggttacttgtccttttattatggcttgtttggagcgggggttgggttttactgtcacgattgaagatgctgaatttggttcctggtttgagagcttttgtaatactcacccaggagatagtattgataaattggctatgattttatggggtgtttggggagctagaaatgacttgctctggaataaaaagtttgcttctgttgaaagagttgtatctcctgcaattacgtaccttgaactttggaaagttgcttagttgaaaaatggagatgtttcggcatctactagccaagcctcggctggttctgagctctggagtaaaccatctttgggtgagttgaaggttaattgcgacacaaccattttttcaagagaaaagagccatgatctggggtggattgctcgtgactttgctggtagaaatgatactctactttcattattagtaactggaaacgatacgttgcatagtatagtttttgcaacaacacctcatcctaaccataatcaggttaaatttaaaatacaaaatgatgacaaaattatattccaaaataaaaaataataatttcttggagatatctttctaacaacgtgtgttagctcaatgccttgcatgtcatgttggtcacgtgttggagcatctcagcatgggtcgaagtgatgatctcagcattgagccgaggtgagagagttagtcttgagccgagatgatgaatgatggaggcttggagctgaggtggtgctttgttaggaggttgatgaggttctaaggtgaagagcaccttgccatgagccgagatggtgccttgtgaagtgcatcttgggatggactaagatgatgcccttatgagaggtggtgaggtgttgatgatgaggatgctaaagtgatgccttttgaggatgcctaagtggtgcctcgtaaggatgtgctagccgagatggtgagtttggaatgggctgaggtggtggtgtgaccatgccaaggtgatgatattggtgcggaagccgagatgatgcatttgttaggaggatgagatgttgatatcagcatggtgcttgggtcgaagtgatggtcttggagaatagagctgagatggtggaattctagtgtgaaccgagatgatgacttcacttagggccttagtgtgtttttcaatcttggtctgagatggtggacttcaatgtgggccaaagtgacaatccttgagctgaggtgatgcttcatccatgaggacctcggccatgggggagatgattagacatggagtcatcacctaggtgcctaggtgattgagatggtatcatcacctacgtgccgtgatggtatcaccacctaggtacttaggtgattagagattgtatcaccaccttggtgtctaggttattagagttggtatcaccacttaggtgcttatcatgcatttgattttttattattgtctttgctatttttgtaaaatcactatataaca

SEQ ID NO: 220627 - DNA, 3215 bp, Cannabis indica
agtgtttcaggggcacaaactgttgtttcattctctcaatggagttgggagttacaaaagaaaaacattaaagttgaatgcagagattcatggattggagtacaaggactgcctttgaatctttggcatatgaatattttcaggaaaataggtgactgttgtggcggactcttggacgtggataaagagacagctgaagctagcatgctttcgcacttaaagacttcaactgatgggcgacgagtacggttttgtactggactcattggtcttagaacacgaaggtggtagctttgatttgaagcttttcaagtttaacaatttaagctatagacttcacgggtattttagtacttgttggtaccaagattttgaccataacaagatgtttggggatggaaaaaactctgtgatagaagagaaagaaagtacagaaggtgatgtgacagtagaggcggttggaggcggtagggacgaaggagaagagatctttgaggtagtcagaggtggcggtgatgatggaataaacaactttgtacggccagtggttgaaagttggttcattaaagaaagtaggaagaacagtgaagctgaaacgattctccacaatcaagtaacggaaacggtgccggagcttgctgagttgccggtggattcaatggtgacctttgattgtctagggaagcatttaattagcagggactatgaagtggttgtggagatttcccttagagcaaaattcgttgtggcagtggtggtaagcatatatggtagggctgataatttctgggactttaagaaaggaagtcgtctgtctccttaaggtctgtggagggatattttagatttgtatgacgagtatttgggtttggtgtatttcaaaattggaagaggggataggattcgattttgggaagacatttggcttaatgattctcctttgattagtgtattccctgatttagcagtgatatcaaagggaagggatgctttctataaaggaaataatagttgacgaggggttacgaggtggatgggtggagagttggaatttcaagtttagaaggaaattaatgaatagagagatgccaagccttatttcattaatgcaaaaggtggaacatgtaaaagtgttgagtatttcggatgatagtcgaatttggaaactggacccgtcgggattttcttgtaaatcagcatttttctagttgacatcaaatccatcgactgggggcttggcttggatgaagaccctatggaaaagctgtgttccatcaaaagttaaggaactaatctcttttttctcaagcttacatacttccgagagaaggctgggtgggagtattgaaggaattgattggcaaacaattttagatgtattcgctaggcatttagagaggccatttgatgagagcgagtcaaagagacagtttttagatttgaaggtaataaggccccggggctagatggtttcaatttggccttgtttcagtctcaatgggaggtaatcaaaaaagatgttatggaagttgttaagtcatttgaaagagagggcaccattcaaggaagcatcagtgaaacattcatttgcctgattccaaagaagcttagcagttgtagggttagagactgtagaccaatcaaccttataacaagtgtctacaagataattgccaagatgctttcaattaaactcaggtttgtactggatgatactattctcgaaactcaatcgacctttgtcgaaggaagacaaatactggattcaattctcattgctaatgagccagtagaagactgtagaattagaggtaagagtagtttggttttcaaaattgacttcgaaaaagcttatgaccgagtcgagtgggacttcttagacttggttttgtgcaataagggatttggggaaacttggaggaaatggattaaaggatgcatttcttctacttcattcccggtcttcgtcaatggtagaccaaggggaaggtttaatgggtcgtggggccttagacaaggtaatccactttctcctttctatttactctggtggcggatgtgctcgggaggatgatgaataaggtagtcagctcaggcaatttattcagatttgaggtaggaaaggagagagttcaagttagtcaccttcaattcacagatgacactatattctttcccaatgatgcgaactcattgcacagattgttgaggttagtggaaatattttgtgctatatcttgtgctaaatctggattaaaggttaatatgagtaaaagtcaattattgagaatttgtatggaggagaggattgtctcaaggcttgcatctaggattggatgtgaagtaggaagttggccattgcaatgtctagggatgcccttggggggttcatctagaaaatggagtttctaggaaccagtactagacaagtgtgctaaaagactcgatggatggaaatgttcatttttatctaaataggttgactctcattcatttagttctatcctttctctctatatatttcctatcattgtttaaagtgtccaagtcagtaattaaatctatggagaagatgatgagagacttcttctgggaaggtagcgagtctacaggtggagatcatttagtggtttgggaggaagtttgcatgccttgaaatgagggaggattagttattggaaggatggatatgagaattaaaggtttacttatgaagtggctgagcagatttcctttagacagaatttgttatggcacagggtggtggtaagtagatatggtagagctgataattattgggactctaagaaaggaagtcgcctgtctcctaaaggccaggcccgtggatggatatttcagatctctatgatgagtatctgggattggtatatttcaaaatcgaagaggggacaggattcgattttgggaagatgtttggcttgacaattcttctttgctcagtgctttccctaacttagtagtgatttctaaggcaaggaacgtacctataaaggatctgattgttgatgaggggttaccaggcctttgggtggagagttggaatttcaagtttagaaggaaattaatggctagagagaatccaagtcttattgcgttaatgaataaggtggaacatgtagaaatattgaataccttggatgatagtcgaatttggaagccagatccgtatggagttttttcttgtaaatcagcct

SEQ ID NO: 220628 - DNA, 1848 bp, Cannabis indica
aaagagttttatttagggcataaaacccaacatgcctttcacacttcagtctatttaataaatagactctccatacccttgctgaaccagaaatcaccttatgaaatcctctatgctcgcaaacccgattatgcgtttctcaaaacctttggtgtagcgtgttttccgtgtcttcgtcattaccagtctcacaagtttcaattccattctatcaaatgcgtcaatctcggatatagtgactcctacaaaggctacaaatgtcttagtcccactggccgcatatacatatctcaagatgttgtcttcaatgaaatggcgtttcccttcaaaaccggttttctgaacaactataacacaccacaacctatcattattcactccacttcatggtccatacttcttattcattgcccttctccctcaccaagctctgtcacctcttcctcgactgatacatcgcctaaggcatctcctgcaacatcctctagcagcccccgtgctcagtctcccattgttcactatgactcacctagttctgtttcaagtcatgacagggacagtgatcaatatgcatgacctgcaacatgaacacaacctgcaacaaatttcaaaccgtgttgagcctactggtgctgaaattgttcaagatatacctactgaacataatgctcctttaccttcacatcctatgatcacaagaggtaaagttggtatattcaagcctcgaacttttgtaagtcaaatgcaatccgaatccaccattactgaaccggttagtgttgttgaagctatcaaacatccaggctggtttaaagctatgaatttggagttctatgctctcaagtctaaaggaacacggattcttgtacctccttcagatgcatacaacttagtaataaatgggtttatagaactaagtttaatgctgatggtacagtaaatcgactcaaagctagactcgtggcaaagggattccaccaaaggcctggaatcaattatggtgagactttcagccccattatcaaggcagcaaccgtgcgaattatactaactatagttgtctctagaggatgggaaataaggtaactccacatcaacaacgcctttctaaacggtgaattggaagaagaagtttacatggctcaacctcaagattttgaggagaaagggaaggaaaattttgtctgcaaattgcaaaaatcaatttatggccaagagcttggtttgataaactaaaagagactttgacagcttgaaagtttcacagttcaaaggcatatacatcattgttcttctacaaagatgaaaaggtaattatacttgccttaatctatgtagatgacattattattacggaaaatgacaagagcaagctgcgcagtttcattactgaactaaataagaagttcaccttgaaagatattggacctttacaatactttcttggcattgaggcttaccgtgatgcttcaggtctttacttgacacaaacaagatacattgaagatattctaaaaaaaagtcaacatgaccaagatcaagacctgcccaaaactaatgactgtaggcaaaccgttgtcactcactgatgggaaacaaatggagaatcatactctttacaggagcaccgttggagcactccaatatttgtgtcatacacggcctgacattgcttacgtcgtgaacaaattaagtcaattcttgcaagctccaactaatactcattggaggggagtgaaacgtgtgttatgatatttgcagggtaccaaaacaaaaggtcttcacatcagctgcagtgacagacttagcattattggtttttcggatgccgactgggcttgctgtcct

SEQ ID NO: 220629 - DNA, 4249 bp, Cannabis indica
aagtactttgaaatgcagatggatctgcaagggataacgggcgatgtacgatgcagaatctttttggccagactcaccaaggctacccagtaatggtatttcaaattgcctctaggaaagtttaattcaaggattgctttctcctcagagttccatgcaaagttttcttcctcctgtcaacttccctcacagttggaaaacctggtaaaagtgaagcaaattccaggagaacctctccgggcctacattagcaggtttctgaccaaagtaacgaaggttagagggctgactgaagatggaagattagcaaaaatactcaggagcattgagcctttgggattatggaaggacataaaaagattgactgtgggatcaatggctgaatttctggaacaagcatatggattcattaagctcgaggaggagtgcgccatgtggatactatcaggcaaaagaaaaatcaacagcataccacaacaaccggtgcatctacctagaatccacaatgtcccaacaattcaaattcaatttggaaaagttccaataacggcaataagaagggtaatggaaagaaaggcaagttcacaggcaacgctgaacagcatcccatggggaaaatgcctctaaatttactgctttgttagttctaacagatgacatagaaacaatctatgcaaccacccattctatggtgtcatacaagaaaccatctaccatgaacaaggatataagaaaaagggatacaactaagttttgttgctttcatgcggactacagccatgatagaaatgaatgtaataatttgatgtgggagattgagtttttgatcaaaaagaatgactcctacttacaaaagtatgtcaaagccaatcaagatcaaagggttgcctaggcagataataatcataaccaactaatgcctccaccagcggacgggcatctacaactaatcattgggggcccacatcttgctggagactcgggcgaagctagagaaaagtatgctcaagccttacatcatgaacgaaatgaagcactgctggccgtggaagagagaaaacctaaaataccaagtgtaggagaaccaacaataacattcactaaagtgaatgctagccatgtcatcttcccacataacaaccgtctggtcgtagaggtgtagattgcaagtaagatggtggcgaggactatgatagataatggagcttccttaaatattctatttaaaataacttatgagaagatgggactgcaacttaaagacttaatcttttgcagtcagcttgtatacggtttctccagccagagtattgcaccctttaaagaaatttgcctaccacttactgttggacaagctccgaggagcataatagtaatagcacaattcttggtaatcgatgtcccgtcagcttttaatgtcaagttaggccgaccagccctatatgatttaaaatctgtcacattggtttttcatctgtgcgtcaagttcccaactaaaagtggggtgggctgtcttaaaggaaatcaaaggattgcacgggaatgctataaccttgttctatctaaggtgaagaaggaaaataccttcagctcgattttagaaaagggaaaaagcatcacccaataagaagtcgcctaaggtagggacgaagacacggatccctgacttagggaaacaattacaaatgtttggccaatagaagaattagaattggtcgaaattgatctagatatctcgaccaggaagcttaaaatcgataaaggcttactacttgaaataaaattagccttaataaatttttgagagcaaaccttgatgttttttcctggtcacatgaggatatggtcagtattgaccccactgccatgtctctcgccctgaaaattgatccgactttcgttccatccagtagaagagaagactactagacaaagaatgtgcacaggcactgaaagaagaggtagaatggctacacacaaataagttcatcattgaagcttctactcagcttgggtggctaaccccgtgctagtacccaagccaaacaaaaaattgcgagtgtgtatagatttcatcgacctcaaaaaggcgtgtcctaacaaactattttccactcccaagaattgatcaactcgtggatgcaacagttggacatgaaatcttgagctttatggatgcctattcagggtataaccaaatcaaaaagcatccaccatacgaagaacatacaagtttctaaacagatatgggtctatattgttacaaagtgatttttttgggtctgaagaatgttggggctacctatcaaaggctagtaaacaaaatattcaaaaactagatcggataaaatatggaagtatacgtggatgacatgctcgtcgaatccaggaaagttggggcatatagaggatctagatgaatgcttaaaatcctgaaaaagtacaacatgaaactcaattccttaaagtgttccttcggggtcagctcaggtaagtttcttggatttattattaatgcttgaggaacataagccaacctagagaaaatacaagccattctggatatgaagtctccaacaaaaataaaggaagtacaaagcttaattggtcagatagccgcacttagcaaatttgtttcaaagtcgatacacaagtgcgttccattcttcaacatcctctgaggtaataaaaagtttgaatggacagaagaatgcgagaatgctttccaataactaaaaagacaacttgtaaagactcccgtactctcaaaactcctagatagagaagaatcgagaatatacttggcagacaacgaatacgcagtgaacgtcgtgctaataaaagaagaaaataatgtctaacatccagtctactatatcagcaaatgacttgttgaagcagaaggtcggtaacctctaattgaaaaacctgattacaatctaatcttagccacaaggaagttaagcccatatttccaagctcaacctattcgagtttacatcgaccaacccttgcaccaagtgttgcaaaagcctgatgcctctggacggttacttaaatgggccatagagtttagacagtatgaaataatctttcaaccctgcacaacagttaaagggcaggccttaacggactttgtggtggaatgtacaggcaaagaggaagaaaatacaaaggataatcctgagccagtacaggagtctctacaagaagagaacatagacaaacctatctggaaattacatgtggatggatcagctactgacaaactttttggtgcaggaattgctctcatcacacctaaggggcaacccctacatggagaatttaaattggggttcaaagcctccaataacaaagcaaagtatgaagcactcatagctgggctaaaacttgctcgggaggtacaggctgaatgaagaggccgcaaagctcctatccacagtacatgaatgattatgtggtaatcatgcggaaggagagagtttatcaaagaaaatactaaggcaaggatatttctggcacaccatgatagaagattcaaaggcctacgtaaagaaaaatgataaatgctagagattttcaaaatctcccatgcaccctccaacaagctaattcggatgcaaagtgcatggccctttgccatatggggaatagacttgatcagacagttgcccaaaggcaagggtcgggtacaatatgcggtggtcgtagtggattacttcacaaagtggagagaagttgagcccctaacaaccataacatctaagaaagtacaggattttgtagtaaaaaatatcattgtcggtttggacttttgcataagattgtcttggacaatggcaaccagtttgatagccagatgttcacagatttttgtacagtacatgaaatcatcaagagtttctccgcagtggcacaccctcaaacaaatgggcaggtcgaggtagtcaagaagacgctcaaaaacaccatgaaaaagtggcttgaaaaagctaaaggaaattggccaaaggcattatcagaagtgttgttgtcgtatcaaaaaaacagaaaggatagcaaccagacaaacaccattcaccatggcttatggttacgaagcaatgtttctcgttgagttacgacatccatcccacagaagactgacttataatcaagaaaaaaatcacgccctcttagtagaatcacttgatgaaattgaagaaataagagcctaggaaagctaaagctagtagctcatcaacaa

SEQ ID NO: 220630 - DNA, 8511 bp, Cannabis indica
taaccacctcaagtttgaatattatatgtccgcacacatcaatgtgaataagctcaaggttttctttggctctattgccttttgcaaaaaaaaagtcttttagccatcttgccttctagacaagattcacatatcgaaagagtttcaacatttagttctctcaaaggaccatcctttgtcaactagtttatgtcatagttacgtttcatcatcatttgaaaccttttgcctcttattttgttgaggcaatgctactctaaataattcattatttaaaaataattgctcacttggcttgagcacataaagtttgttactctgttttgcaaagcaaataggcataccattcttagaaataataatctcattattaataaaactaatgttgaaaaattattcatgcaaaattgataaaaaaaaataatgtcccttgtacattcgggaataaaataaacattgttcaataacaaatatttattattaaattttgaatggactctgccaacacccttggtagacacttgttctccattcccaacatccattgtcacctcctcatcggccaactcccttgacaattaagtatctacaaaaaagaacaaatgtgattagtggctccaaaatcaacaatccataaggatttatcatcctccactttgttagtttcaagaataaatgaattgcatttacctttattaagctcggagagatacttgttacagtttctcttctagtgtcatatcatgcaacaatggaaacacttgccctttgccttttttccttgaacttagggctggcgtttcattgaagtcatcctcgtcccagttacaatcttcagatccgactgacactcctccgtcgaaaatcttctgtctccttatctaactccttctccttttggttagcttctcctacaggtccgtggtggttggctttgttttcttttcgtttcgaagtgaatctaccaagagcatctgcttctcggttgtggtcttttggcagagcttttctctcaagtctccttggaccactttggacttggtctttttggggtcgcgatgagggttccaaacttttttgggttgaagctcttcgcggggaggattcaagggtgttatttgtcgagtactttgatactcccccatcttccagcccacttgctcctctttttcctacttttggtcctcttcacccgattagaggtgctttagaacgacctctcaagagctcctctaacgccctttgcatgtttgtgattgtttcttcaatacgcaagttgcttgtcctcagctcattcatcttctcattatacagtcgagtccgagagctagaactcatcgagtagactcacttttccttttttggccagtggtgtgaggttccgggatcccccagcctcggtggctgtggtggccttataggagatgggggcccccaagcctttgcactccgcctccttcctctagcatgatggaggcaatcgctccatctcgctagttgttttgttgggtggtcctcgagctaattgtttccttatcctactgagggctcatggtcattcatgcctcctctgttctgatgcacctagccaattgctcctcctcctccagctaataaaggtgacgggtcaggccttgaggcgatcagttgaagcccatcaagtcaaacctccacttcctagcgacagtgagagcgtcttggcttttttttttaatgattctcggtaaagaaacaacgctgcttttgcatgtcatttcccacaaatggcgccaaattgttgatggtaagaactcatcaataacataaaaaggacttgaaatggtattttaagatcttaatagaagaatacttgaagtaaaaattcttacaacatttactttctaaaaaaattactattcagatgtttttctaaaaaagtctccctttataataagttcaagggctttatttatagtgagcccttgacactttacaatcttaccagatcccaaaatcataggataccaagtcactttcacacctaataacctagtatctcaggtggtttgatttatcagacatcttaagttacactaaaattacctcttttacttgtatcttagatgaaatgaacattgtctcctatacaattatttattatgtagtcgctatcttgtctgcaatttcttgcttaaacatctccagcctcaatatcttctccttccttctatttgtatgagtatatcaggtacatgggaaccagaggctacgggtgtttgagttgaggaggccgctcgctgctgcatggaggagctggttcgtggaacttcctttggtgaatggagctccccttggtgcatggagaagctggtgcgtggagctccctttgggtgcattttgaaatttacacttggcgaacttctagacataccactaatgactccaaagattacacttaaaaaaatttgggggtcaataaattgtaataagaatttatgtaatttaaattttacatcttaattaaagtgcaaattataaaatacatattttattattatattaaagatacaagagtaaggaatatagattatttgaacattattttttatattataagttattctgaattttaaaattttgtgagatgttttaaatattacaacatacacgaccataagaaaatgactaaaaaattatcatagatgccaagacagtagggatgcgatgcaccctttttaaggagtgcactgtagaagcctcctgcgatatatactactattaaattttcaactggtaatcatttcaaaaagaattttagaaaaaaaaaaatctgtagttcaccactccaaaagtgagttcaagtagactctcttatctgtttcgtgaattttttagtttatttttctttataatcgtgtgtgttatagttatttagaactacttgtaaattttttgaaaaattctaaataatttataatgttgaaaataaaattcaaatattttgtatatatttataatattttgagtatattaatttttgtatatatataattacaatacaatattatttattgaatagggtatgagtttaaaagaattaaaattatttcaaaagaccaaataagtaagagaaattaactttgagatattttcatttcaacaaaatttattatttcttagatagctatattataaaattaaataacaaatgtttacaccaaagatacttaaaattttatatttgtagtacttaagtacataccaaattattcttttagtaacaaaagcatttaaattacaatgtttctgtactaaattatttgattaccaacaaagcaacaaagatatttaaattcttatatttacaacacttaagtaactaaattatttttggaattatttcattaataaccaaaaataaaaaattacaaaaatacaaatttacagtatttttaacattttaaggactaatttttttttctttacttttttttacaaaaatacgaacagttgttttatgattgttctcgaaacaacattgttgtcacattgttgctacaatatactatgtttgagcaacttgaaaataatattgtttttagaagaaaaaataaataaataaaacagtttaaaaataatatctgtaaaaatgtaacaaaaaaaaaatatgtgtaaaagaattataaaaaaggtaggattttaagtattatgtgtaaaaaaattattattttttagatactctgcatacgtagtatcaaatttgttaataatttgagtaatttcacaataaaaaaaaaataacaacttgcagctaaatcctctcaactatcacttcaattgcacttaactttctaagctcaaattttgacgataaaatattctaaactactataagtgtcatttattttttacaattaattgttaatatagattgtttatgtgcacaattttgtacatgtgtcaaatttatattagtacacctaatattattattttaaaaatataaaaattatttcaaaatttgtaatattttttttaaaaatattttatttttattttttctaatttatttaattttgaaaataactttaaaataataatattaggtgtacaaaaaatatacacataagcattaaacagcccatatttgaatgataacttaaatttactactagtttaatagtttggagaattctaccaccaaaatttaaacttaaaaatttaaatgcaagtaaaacgtgagaaggttttaatagaaatagtgttgaaaaaaaatttaccaacaaaatgcggtaataattgttggtaaaaaattctatctagtcaaatggaaaataagatcatcagtatagattgttggtatagtattgattcccatacaattgtttactaaattttggaaagggagaaattagtaggacccacacaccccttaaaaattttctagttatgtaaacaaaataatatgattctagttttctttccaaacaatttagtaaacatcataataaaatattatttccgattattttctattttaaacctttagtaaacacatcataaattctacattttcctttgtagcgatgcgtgcttttttttatataaaaaatcattaaaaggcccaccaaaaaaaggcaaaattggtttccccaatcaaaaatctacgatatcatgagtaaagaattagagtaaaataaattctttcaaaattcatagtgcaagtacgataaacaccttaattcaacttaaataagtagaaaaagaatcggaatattttatgatatcacaacctctccctacaaaattaaaatctttgcaaagtctgaacagagaaaactaatatggctcaaaactggaaattccaatcaacctaaaactcaagtccttcgtaccatcttgaaccacaacaattgccattttcgagactgaattgtagtaaatatagagaacttatagccttctacctcttctaccaccctttctacgggtactgtcagttgggatgggagtgacatcctctgaaacacaaatacacaatgttaacaactttaaaaagaatttatatacctatacatatatgaatattgccactaaagaaatggtagtttaagaaaagaaacacacaagatgagatccttaccaatacggccaactctcattccagaacgagcaagagctcgaagagcagactgggcacctggaccgggtgttttggttttgttaccaccagtggcacggagcttaatatgtagagcagtaacacccaactcctgcacaattaaaattattactaaatattttataaagactcaatgccaaaacttccaacaaccagcaacacaacaattttctgtttacatgtaccaacttcaaatgagagagagagagagagagaaccaaaccttgcatctctgtgcaacatcctgagctgcaagcatagcagcatagggagaagattcatctctgtcagctttgaccttcattccacctgtaatgcaaattaggaataattgaagattttactatggaaacattaccaagcaggattttcaaataaaggtatatcttaaaaagcaataataaaatacacatgacatgctttgaaacccagacaccaaaatgttcgaataatcgtagtcatgtatatgatgtgattcacattaaaagttacaaacatgtaacaaacagaaagcatataacgtcctctcctgaataaaagtttcgatcaagtaaaaaattaaattattgtaattgaaaatatagatacatcctaactagtgataaaaaagctttctactctacaaggtagttcacatcatttgttactgtgagaatcaagaaactgtaaggtgttatatcacatcaaaacagcaaacagaagacattcacatgctttacgaggcaaacattaaacacgagctaaaatatacacattaatgaaattcacgaatagaagtcttaccagtaatacgaacaagggtttctctcccagaaagatcagtcacatgctgcacataaaaataataaacaaaaattagcacaaaatatcatcagcaactacatccacagaaaattgaacaagacttacgatgaatgtatcgttgaaagaagcaaaaatgtgggcaacaccaaaaacatgctctccttccctgacagctgggccaagggtgacattttcttcctttggctccctgttcttcctcttcgaggcctgtaagaaacatatcacaataaaattaacataaaattcataagcaacattaagaaatatttaaaaatttaatctataagaaaatcatttataccagtgaacaatttataaatatagagcaattgcaacattatattataacagtaaagtatattaataaacatttcataatgtgcatcatgctaatttgaatcgctccttatattttctaaacaaaagttatcaatgtaggctacttataggatgattaaaataatggaaacacaacaaaattttcaaaaagattaacatataaaagaaaacagataatcgtgctttgaaacaagccaccaaagaaagacaaaagccagatttgattcacgaaaacttctttaaaatgagcaataatatagtacatcaatatcattatcgtgagtacaacaatctttatttacaataattaagaacaaagaatgtcatactcgccaccaaaccaaaattaaaatacccaaaattctaaataaaaaataaaccttaaatcttcctaatgttctcaatctgcaatttaaacaaaactaaaatcgctttcgagctgaatattgatgtgtatggaatgatactagtgtgcaagtgagaaggaatgaaaatacgttgagaaagcattggattcgtattgactcaccatgatttcgaagctagacgagagagactgagagagctagggttttgatgaagtgtttggaagctaaactagtcgccttccagaaaaccctacggaggaagaggatagtgaggcttcgctttcgattatatatgaaactagggttttgctatattacgaaaaataaccccctcatctccttgctagttgcttattgggataaaaggtaaatgctgttttatgtcattttttttcacttaaatatcataaatttacttatcaaaaaaaatatatatataatttttttaccgctaaactctcttacttattattctacttgtatttaaccttttaagtttaaaatttgcaaatttaaagagttatctactttctacagttaactaccaatatatagactctttatgtgtacacttttataatacacgtgacacgtttatattaatacacctaatattattatttaaataatattttttatttttactaattttatttaattttaatttaaattttgaaaataattttaaataataatatttagtgtactaatataaatgtaccatgtgtacaagagtatatacataaacagatggtgacagttaaccggatggcaccttaaagttgctactagtttagtaatttgaagagttttaccgccaaaaactctaaatatatatatatatatttgataatattgcaaacttcattgattcaaatcattcatcactaaagatgcaattacaaagggtagataaaaactattaaaagtacaatcagcctcataaagagaagatcgtgcaaaagtatgtgtaaccttattagcagatcgtttaacaaaattgaaagaaatagtagtgataacaacaaataatgacttacagacaaacaaaatatggctataaggagaagtcatatatttaaaactttgtaaatctctattgattcctagacaatccgactccacaacaacattagtccacctattagtcatgatccaactcaatgcttctttaattccaatcgcttcaacaatatgtggttgtaagacccttactttattcattgtcttcgctgccagtaccagaccaacaattgtatgagccactaagccaactccaaaccgtcgctcgtgctccatcaacattaactttaattgtaggaaattctggggggttcaatgctcaataactaccacatttgaaacaccatcatttatagtagcaaaatcctatttttgagcattataccattcaataaagtttagtttagctaacgaaatcacctccattacatcaagttgtttggagttccataccaaattattcttgagcttctaaattgcctaatatatcattgcagcttccatgcaatcagctttgttccaaaattgtaaaccttctttaagccatcctacaaatgtcactgcatcagcagaaaccacaggcacataagaggcagaccagcaaccttgagcaaaatcatacctcaccaaaacatgaatggttgtttccggagctgtaaaacaagatgaacaagtagttataatcgacacatgcttgatgtgtagctgaaatcttgttggaaggcaattcgtggaggctctccatataaaagattggactttgggaggaatcttaagctgccataatttgttatc

SEQ ID NO: 220631 - DNA, 2053 bp, Cannabis indica
acccgaagcctgttcaaacttgtggagtaactccaagactcgttgagcctcctccgtggtagcggcacaatagagaaagctatcatcagcaaacaacatatgagtgatgtaaggtgctcgccgagccacacgacacccgtgaatccattttttctcttcataaagacggataagagccgagaatccctccgcacaaattataaaaagataaggggaaataggatccccctgacggattcctctggtaggaataataggcccaagaacatcccctccatgaataatgttgtaagaaatagtcctcaaacattccatgatcatcataacccaatccacagaaaaacccatacgaagcaaaatagcttgtaagaaaggccactccattctgtcatacgccttactcatatccagtttgagagccatgcaaccatttcttccttgttgtttacgcttcagataatgaagaatctcgaaggaaacaagcacattgtcagtaataagccgtcccggaatgaaagcactttgaaactcagaaatgaccttagttaacaaacttttcaaacggttagccaaaacttttgagatgaccttataaagcacattacacagagctataggcctcaaatcgcccataacagcaggagacttctttttcgggataagcacaagattggtagcattaagatcagaaggcatcgctttataccgaaaaaaatcctggacaagtttaaccacatcaccgcccactatgtgccaacacttttggaagaacgcaggggtcataccatcaggaccgggagacttatctggatgcatctgaaaaacagccgctcgaacttcttcctcaaccactggcttaagtaattcgacattgtcctcacgacaaatagatggctgaattttatcaaggatatcatcaccatgagaccccaaggaatggaaaatatcagtaaaataattaaccataacctgaggaaggccagaatcccatttgacccaatcgcccgcctcatttttcagttggtggatgaaattattctttcgacgagagctagctgcggcatgaaaatactttgtgttgcgatccccatcccgtaaccagaactgctttgaacgttgcctccagaatatttctttttggtgataaatctcagccagcaatttcttcgcatcttgatattgagaaaccgagagcatcagtgttacctttgagcagcccaatacgccttttgcagttttgaattctctccttaaaattcccagtcagatcatttccccaaagctgaagaggctcttgtaaagccttcaattttgctgaaatgttactagaaccatacccttcccactgatcccggatgatggaaaaacaagtctcttcacgaagccaagcattctcaaaccggaaagatttcaccgaaccagagtgaatccgaaaactggggtctaaaagcaaaggacaatgatcagaagtggtaaaaacaaggttactcaacctggactgcgggaacaaagtcacccaaccagagttcgcaagagctctatccaatcgaacctcaatcaaattaccagaacctcttcctttttcccatgtaaattgatgcccaacaagatccagatcaaccaagtcacaatcagaaaccaccttctggaagccttctattaaccaagtaggataagggttgccacctcttttgtcaatttgacttattacattatttaaatcaccaataatacaccatggtagaggcgattcttccttcaaaactctcaaaagcgcccaagtgtttcttctaagggcacggttcggctcaccatacatacccgtaagtcgccaatcatgtacctcatcctgatgaaccaccaaatcaatatgattttgggaaaaaccacgaacctcagcatcatttttatccttccacaacatagcaagaccccctccccgaccttgtgaatcaacagaaaacattccttcataaccaagttgagacgataagagttccaatcttggcttagaacataaagtctcacacaaaaaaataaaattgggcttctt

SEQ ID NO: 220632 - DNA, 3087 bp, Cannabis indica
tttttattttgaaagggtatgatctaataattgttaaagtttaagaatcaaaattactaatttacaaagacatgtcaggatttaaacgaaataataagacgaaatctaacagaaagactaaatatttataaatataaaagttcagaaatttttttaacaagccatatattttaagaaataaaatcagttgaaaattcaaaggtaaaatttctaatgattcttattttattattgtttacctttaaactatgaacatagcctctttaacggttcattgcccaccttatgagcttataaatagattgccaggctcatttattcttcacattctgaattttgaagcaaattgctcttgaggctttgtatttctttctaacttgcttagcaaattaattagtatactacagtcgaaaagggatgaacaagaagaatattgttaaattatttatatacaatttcacagttaaattcttgagaagttcacaataatatatcggatttacaataataataatgatacttctatgatatgtcacgtcagttgaatttgacgtttttgatattttttgacgttttttgacgtttctattttttttttttgtctcttacgttttcaaaagtaattttttagttactaataataatgttgataagaaaacaattagttacctttatataaaaaaactttattcttataccatataatttaacatacatttcggttactctctaaaaatttatttgtataaatcttagtaactaattagttatttttaagttatattatggtaaattataattttaaatacatctagataactttaaaaattatttttaaaattaatgagttgtcatttaatataacaaactaccatatttatataccgattattttatatattttttttgttattttgaatattaattagttattatataatataatataattcaattaacttaattctaaaatgaatgttatctaagattaaaaaaaaattataaaacagtaagtaatcactatattagtaactaaataattttttttttcggaaatagcaaaaaaaaaaaaatataggtttctcacatattgaaatattcatattaaaaagtagattgcaatggtatttttttaggctcatccgagtaacaacatgattataaattatttttaaagtttaaaagaaaagagggaaatagaaaagagagaaagagtaacataagagaagggaaaaaagagaaaaataaagatagaaaagtataagtaaatgcattaaaacataccaaaacaaataaaaaacttgaccaaatcatttttaacaatttaatcaaaaacaagtcatttttgaacaattttcgtaaattctttatataaaaatatcctctaactttgaggacacatagccaattaacataattcatctttcattttgaaagtgatagattttgtgactgaaaaagctattgagtcaaggagtagtatcattattgttttaaaatataagtttgtttgcaaacttatatttctaaggatttattcttatgaaagcttgctagtttagaaaatgacccttttttgatttagggacagaagaagataaatcaaatcctgatgtaaacaatatcattgtttaaaattccatatgcaagaacgcatcatcataagaactatccataatgacagcattatttagtttatcataaataatcaattgtagattaacataagtcaaattctccttacttggagattaaccccatgttccgattcaatgactaccccgaaaacagcagaatggcggtaagccggtgagactgagaagctaaacttggacagaataagagataatactactttcagctcggtcatggccatgttctgtccaatacaaattctagtccctacaccaaagggcatgtaagcttgaggaaacttaagctccaagaactccatgctcaaatcttcctggattgaattgttgggcatcaggaccccacagatcagtgtcttgttgcattatagagattggaatttgaatatttactccttttggaactagaatgtctttaaattgaatatcgtgcaaggcgtgccttgtgataaaaactccaggcgggtaaaggcgcaaagtctcttgaatcaccatagtgagctgacaaaaaaaaaaaaagcattcattgtactgaattaagcaggggtttttagtaacataaaagtgagtgactgaacattgtgtgaacttacaactttcaagttccggagagtattggcataaaaaacgccattcttgcaaacttcttgcacttcttcacgaaacacaagtttcccaagctggatatgcagccagcagcaacaaggtctaagatgctgtagtagcagtggtctcatagccagcaaaatatatattcttgcagttatctacaatgcatttttcctgtcccgagtaatgccaagagacgggctatctataccgccataagcttttgccccctcgaatatcatctgcacaagatccttttcatcagcagcctcagttctctgcttcacaacctctaaaatcatagcattgatttgtttctctagtctccacacatgaatgttgttcattgttggaatgaatctgatatataaataaatacatttgtatattaacaacaattatgattgttgctgctcacataaaactaaacattgacaacataacatgaaaatattaaacaatgataacatgttttcgcggctcttcccgaagtgtgcacggcagtctagcaaccatggcgtccccaggataaaacagcctctgtataagtacgatacattctgcacaggaagaaagaaaaaaaaatttaatgttggaaaagatgtgttcttacgttgttcggatacgacttatatagaagtcgatccaagaaaaaacagtaagaaaacggtaatgttatcgttcgtggaggagttggatcttgggagtaaaaggcggatcatcacgtttttaccacttctgatcacttgttaaaattaattaataaataaaaaaataaatctttatttaataaaataatttttctttaaaaaattaagtgacatca

SEQ ID NO: 220633 - DNA, 2661 bp, Cannabis indica
aaaaagaaaagaaaagaaaagccaaaaatgcatttagtctagtgctattgtaactctcatcacgctccatttactaaataatattaaccaattatttatgaagaatttattttattaggtgtggaggattggtcactatttctatgagcttttgatggactcatctatttggatttttattgcatttaaagatttgctagttgcaacagtccctttaataagttcaagacttaagattcagctcaatggttgtaacagaatttgttaattatgttacaatttattttagctcatcaactctctttgccacctttatatatttagacttttaacctgatcaactaaaagttgagacttgagacatttaattgtatagtaagatttttagagagaagttcagagagaagattggtataagaagagagaaatttgtaatgagaacttagtgaggaagatcatttttgatcggagtgtgtaacacattgcaatatagtgaattcgactcaaagcattaccttggcctaagagtaggacaagtcatattgactcagatctgaaccaagtaaatttgattgtgtttatatttatttttacttttttttacattcattcattttgattaggattgtacgtcggtcattttagttggctatgactacatatttttcaacccaatgtaaaaaacggattgcaaaagactaagtgcaacccacccaaataaattaaaaattatgtaatcctactaatagtttggtcagattattcgagctaacccgaccaagctggccaaccattaattttttttttttcaatttcaaatttgttacaaaagctaaaaattaaagaaaatattgaatcattgccaacgattttgcttgctagtcaaaagtaaccaaaattagtcccaaccctttaaaatgtaaataggcagatcaaactcatatttcctcgacaaattaaacaaaataattaacgaaagaacttattgttggaaaaacttattgcaattgaccacaatattttccctctttgtatgtcaaaaataggatacttattaaacaccacaataagcaattatcaaatatcaaccaaagcaccacaagcaacataaaatacacaaatcaagaataaaagtgagacaccaagatttttacgtggaaactcaaagcgggaaaaactactggactgtagtccgctcaaatcatccactattaccaaagtttaataatagaattaccaagttcttctctagtaaacctagaggatcacaacaacatcaagattaaacaatattggatcaccaatacaatcatcatcatcatctcaaaagatggatacacaaatagaaaagtttgagtctcaccaagtgggtattgtagaagagcaccttagagacgacaatcaccaaatcggaaccggtagatttgaagagcaccttgcaaggattcaccacctaaaatttgagctaaaatggatgagaatcaaccacttgatctttaatgcaaaatggcaaaacccctttctctctctagctttctttctcttctttccctctctttttctttctttctcttggctgctcacgatgccccaccttcagccccctttctttctatttttatttgtttcttttagattaacaaatttgggcctaaaagcccttaattggtccaagcccacaacaaatggggcagagccaacaaatctccccctctgcctcagttggtgggctctactacgcgcgctcttcgcctacaagctttgagcttctctttaggcaaagcttttgtcaatatatcagaaccattctcattggtatgcacattttctaagtgcaattctttcatctcaagcacatcacgaatccaatgatatctaacatcactatgtttggatcttgaatggaatgttgaattcttggagaggtgaatggcactctgactgtcacagtagacaatgttgcaagcccaactcttgtaggaactttttcatccataaagcttctttacaagctttagttacagctatatatattcagcttctatagtagacaaagcaacacacttttgtaacctcgattgccatgaaacaactccccctgcaaatgtcatcaagaatcttgaagtggatttcctagaatcacaatcaccagccatgtttgcatctgtgtacccatcaagcataggtttacaactactaaagcataagcacaacctggaagtacctcgtagatatctcaatatccatttcactgcttcccaatgatccttaccaggattagagaggaatcggctaacaacttcaactgcatgagcaatatctggcctcgtacaaaccatagcatacatcaaattgccaactgcagatgagtaaggtattgaagccatttcttgtttatccttctcacttgtaggacattgtttggagcttagcttgaaatgacctgcaagtggagaactaattgctttagctttgctcatgttaaatctttcaagaactttttcaacataagcttcttgagataatcaaagtttcccattcttcctgtcacgggaaatcctcattccaagtatctgtttcgccgatcctaagtcttacatagcaaaagacttgctcaactcttcctttatcttttcaatctttctgacatcatggccaaca

SEQ ID NO: 220634 - DNA, 8361 bp, Cannabis indica
agatcctggtaaaataaattccaagaccaagcccttcaacaaatagatcgagaaaaaaattcttcataagagatttactccctaaagaatatttcttgacaacaaagatgttgcaacaagcatgttcaaacaaaattgaaaaggtcctcaccatgttacaagataacaataaaggtgcatataagtttggtgagtacaacgagaactttgagttggtactactatccaaacactaactaggggacatctcagtaagtactcccactagccaacttgttaattagttcctctaatgtttcaccgtgcaaggacccataaaagagcgtgcacccattgattttcagcatggcctccatcacttcagtgatagttgttgcgtggatagccgcgcagggatagccactacatgatttgaaaagcgaacactaagttgtaagcttttgttacacgtaagaccaactgtatctaaaccacttgctaacaaagataacttcttaaagtaattctttgccagttccacatgcatacaccaggcaacaccccaagaaaattcccaaataaggtctatcaaacttggtgaattgtaagggaccaagaaaatgtaagtttgcgtgttcacctacggagcacctacaccatacaatgctttgaactaggccgtaaaacttatgcagagaaattttagcacttagaataagctactaaacttgcctctaagtcgagtgcaggcatactttggcttcacataaagacaagtaaatccaaatacttatatgtcaaggaaataagaagatagataggatgaccatatgtcaatgataaaaggctttaaggctaaataatagtagtgtcgtaaaacaaagggcctatagacaaaaagcaagaacatgaaagccttaaggctggatataaataaaaaatttgttcacattgataaggtaaaggccttccaagaaccgtatagctagaaaagagccagatagacttcttatagggaccatgtactgggttacggctaaggaaaatatcctgatgggttctaagccatagacaaaactctaggcaatcgtacccaagggtacttgcaagaccatgtcagcgtacaggttgaatatcagcgaagtacaagtctcaagtgtaacaactttgacaaatgttaagtcctaagttgaacatttgactataatagaaacaccattaggtttcatacaaagtttctaagggagccacgtatgagactaaggttgtaaatgcctacagggacataacaagaatcttgttgaagtcaaaagaggacagaaagctagccacccacttgaaaccaaggctgggtagggttccccaagccttgaaaggggcgcctagggtcccatgacttagccaagaattcgccagggtcaccaaacccaggcatgaaccagctagctttatagggtgaaaccttagagctggccaactcccatgattaagtcctagggccaactaggtctcaagcaagacctcccaggttggctaagatttgttttgaatccaaatgtgtgtttttgtttcaaaactcgaatatgtgcctcgtatttttcatggctcaaagagccaagaatcacaacaaagccaaaattgaaccttttccatcaaaaagtcacacattatacattccaaaactgtcatgaggatcaatataccaaagagattacaaactaacatgagaatcaaaaggtttctaaaagcttaaaaagcttgaaacttgttaatagcaggcacaaagaagagatatctaagaagagaagatgagacatatatagagagagaagatcaaagatccaaaagcatgccattcaaaaagccaagacttagctagacaaggttgttggacggagactactctaaacaagacgagagctagaaagccactatctgaccagatgtttgaacaaagacttaggggaaaataatatcccaaaattttccacctaacatggcatgcccacgtaagccaagacagagtagatgtggaatatagccttgccaatagcaagatagggtctccatacaaggtatggcaaaattattaagcaacaatcgaaaggggtgaagcgagcaattaaggaattgtaccaacatgtttggccaaccaagcaaagcccataggccggccatggggagcttgtatggccggccaggatcaaggcacaagttggatggccaaaaggtccctttcacatcaagagagctttcattcgaccaagtgaacctatcctctacaggaaaagtggacgaagctagcctcacttgcaaggcaggtctcctcttggtaaatctaacaggaacatgacctgcaggatccttgcaggcacatgagcttccaggtcctgataggagcatggccgaccagacctcaatttgtagaacttgcatggctaggcagaccgtatcctgtagtgtatggccagctaggattgacctggcatgattctttgtatagaatgatacgtggactataagctacatatgcattgggcccttaacagtccaacaaactagatggaaagtatccactttcaaggggcaatttagtcttttgtatttaatcaatttaatatgttaatatcttacggttttagttgtaaattagggtttaggctttcctatataaaggtcttaactctaacctagaaaacctaagtcccatttaagcctctaagtcattagctcttaactctaagtttgaaaccctagccttcttctctctctctctgctacacgccccaaagggccgtctctcttcctctctctcacatgcctctaaggctatacctatctctcattagagatctgcctacttgatccatgttttgtaaccttacagagagctatatcagatcccacctacagtgatctaaatagtattatcaatagctattaatacaactaaaaagggattagtttattacccgctaactaagggggccgagcctttataaaaatccttaccttatttactttattgttcttattgtgtaacacgtggcaaacactatattaatatgaccctgttgttaattgaccattttttgatggcaacagtgggggataaggtgctcagaagagtgttccttaacacttaagacagtgcagccggtgtgctcaggcctcattaggaagggccataccatgtaactgaagttacaaaattaagagcagaaaatcttggttgttatgatgagaacatgaagctagttctagtaccactgtattggaatggcaaacacctaagaaaatacagccaataaataaaaaaggtttggggaccatataattgcataatgcttaaacataactcttaaatgatggccttccgagcggatctcgttcaagggttcgaaaaatgactcttgctaaggtccaagtgaccacttataaagcagaagctcatcttaaaccattactcttcagtaatgtttttggatagggtatactattaagaaatcttttctattttaattagctaaagatcagaacagatcatgtaataactttttataatttaataaatgtatgttacttcattaacaatacatactgatcaattaatgaataaagattaatcatcatacaaattgtgtcaattttatatttttatttgcaaattacagcaactcataaaactacctaacttgcatgcaaaaaggtccgcccagacccaaaagttgaacaaacaaataagaagcgtattaaattgtaagtgatcaagagtcaatagtctatttggtcacttgacacccacacaagcattggtagagaacaaaaaaacatatagagaaattcaagaaagatattgaaaagccaaaagtttttatattaaagacaaagaagcagaatgagtccaggcttaaaaggctacccgaccagctgcttgtcctaagaaaatataaataaaaataaaccaagtttaaaagccacttggtcagccacgtggtcttaaataaaaggcccgtaaactgatagaaaaaaggagtttttaagttcactccatgggagtcccaggctcttcatgctaagcggccaaagtttgtaaattctggacgacagaagaaggatcaaaattcctgtccttcttattagcagcctaacagatttattcgtctcatccttggccctcctcatctcgcaatacatgaacatgtcttctgatgtatattattcaagataagcaaaggtaggcttagaattagcgttctagaattcataaaacacctctgcagcagtagttttatgatactcaacatctttagtgtgagctgcctactcagcagctaaagcttcctcaagagaagttttctccttcaataaggattcctctttttgcttaagggcctcagtcgactctgtaacctttacctcttggctttgaagaagtatttagagtccttccctttcatcagtgaattcctacactctcatggattcttactcctgatctactcaagcttgggaatggatgacatatcttctaattgttactttaataatttataaacttgttctcaacaattagttccttgttcacctcgctaattttattcccttttgctcgacatcacttttggcctcttctaaggccttcctcagatcattggtggtcattttatttttgagagctgttgacctagctcaggaatagacataagctagcttcagattagactacaaaaaggaacaatgaaataagttaaacattttagacaatataatccgtgcaaaaaatttgaagtataagacttatcctggtaatttctttcaagactccaccgaccaagagttccactaggatatccttagcaccaaagagttgttcgtttacctcgtccattagacggtctaggtaaaaacagagcatttccttagcttttttggttttaggtcgcacgacaggaagagtgacagttggcttatgtaggttgtgccattcaacattagtaatatcatcccaatcgagcccttaaaagatttggaactctttggtgggatgacaggcaggaaaaccttagcaggctttttgaccagaggaggaggatctgagatatctacgaccactactccttttgtctcagaagtcgacactaccaaagcttcttcagtattaggatgggtattctttgagcttggaacaatgcttactaaaggactatctcctaacctttgctacttaataggtgacttctggccaaaactatcactgaccttcctcttcagcatgcctttcaacctgtttgacatatatggacataagaaaatacttggtaaatatttaaacaagtgaaaatagaaacaaagctagataaaataattactacgctgaacttcagtacgagcaccctctcaaacaagtaaagatggagcatcatcatccaaagagtctccatcatcttgcacctcgaccactgcctttcctttgccaataactgcctagacgacaggatgagcagctgcctcaatgtcatctctaatttgaataggttgttgtactggtacctgacttcgctttattgggttcttcttcttcttctttggaatctctcactcaagagtaagatccttagctactttatcattttcttgtacctctttggacaaaaaaatgtccttacttgaagaggttttcagtgatagtcaagagagagatgatctaagcagatgctaaaagttgaagaattgtctgtgctcttgcacttaaccccaaagtgaaagggggaggacaataagatggagccaactgaaatgaaagattgtatacttttatctcctttacaatatagtagtcttagaggaagctggcaatgtttgagacgtctttgtgcatcgtaccgctcagccattgatatttgttttgagaaaaatagaagtaacttaacctattctattgtgggtttggctttaaatcaaagaaccaattggtgttgtgggaagaaggttggctccatcctttttgggcgtatatcatgaatagtgcagccacgtacttgatgcactttgggatgaattaggttgggaaaatcttataataatttgtgatcttcctaaagtatggatgcaaaggtatgcccgttactcagtgtgagattcgaaccacgcacagagtccctcttagaggtttgtagcacttacccaggagttggtagaaaatctttgactttgccaagaaggcctttgtcatagaggttctttaatctcttgtacgtaaggtttgatggaggagagacctattgaggaacctttctctccctagtccacataggatgggcctcttcatactcatttttggcatagtcttggtctagaaacaggacatctacaaactcagatttaggctctctagcctcattatatcctctgaacaaaagaaaaacccaaggagcttcttcctcttcttttgatacctcatcttcattgctaagaggattgtctgcatggatctagccctagtcctcaacctctcagacgtaaacatccctgacatttatttcaatatcatccctaggaggttaagcttattccacaccagccatcacaaagagccgagaatagtctgggtccttatctgaagctttcctataggtttgcattgttatttccattattttacaccttagtagaaggattggctcagaagtatgcctcacgacagtgacaacaatttttcctagtatagagtgttttgccaaaggctcgggacaaccttctggcaatgtgtcagggacgtcaatccaaaccttgtacatccaagtaacgggctggtaacacctctagcctttgttcaattcccaaatgaaccatttgtatccttctctgcttatcgggatagggtaatgatgatgttgtatcacgggctcgggggattctgacaagtcacttgtaacctccaactgatcaaagcttgaagtggatgatttttaactcaatgaagatgagtctgcacagagcctaggctaggtctcgtaaagaagatgaagaaggtcactatcaatcaaatggttacctcccaagtattcacgaaggttcatctacaaaaagaaggaagagaaagtggtacgaaatggatacaagtacacattttttaatggggaaaaacacgtctaatatgccgacttggccaatttaaaagggaagaaatttcattccaataatgaaattcccaaatctaggtttaatgaatgacgaagaacctagaaaatctctagaagccctcgatggataatttcaagtagttcctagcaatacagtgaagaaagctagaaatttgaaagcctatatgtcttgggtgtgtattaacaaaacatcaaaagcccgaaaatttctagtcttgaatcatcgatgaaaaattttaagaatcaagattttgcagagcagttcaaaataatggtacatgtatttaaaaaaattgcatgaaaagaagaaagaggacttactcacaacttggaattgtgtgaatgtgcttgaacgaatgctagagatcgagctttggtaagagagttctttgaaggttttagagagaaaatagagattacaagaattgtgtttgagagtaaaaacaccttaagagagtttagagatgttttgacccattctataagcagttaaaaaggttattacgtaattcaaagttaaaattttgggttttccccaaagaaaatgtaatcatcatatatattgggaagtacgttcgatagcgtgtagcatacaataaccgttagtgcaccaattgaggtccaaatatgaagacaacattaaatgccctagatacaaaagagatagtcaaatcattattcagtaacatcagatcaggagcggtacaaagactaaatgtatcacccatccgaccaactttgtggccgaataagtgcacgtgcgagcaagaagttctcatgcaaacttagggtaaaaatattatcccaatttccgtacaatgtgacatgacatccatctgggtgacacgcgcagaggattttgtaacctggaccagcagttcgcttcatggtctaccgtcaagagtgatttatgacttataaacaacttgtttaaagaagaagctagaatatgtctaactaacatccattttttagtcaactcacttgtgccaaccagagtgaatgcaaccaaaatatattcaaggatactttccttgcatattcaagcatgcaatcacaatcacatccttattttgtgagatagactcacaccaataggagaaaagaggaaacctacttagtttccctttttatttctcttgatttaagaaagtaaataagtttcctaatttatttcttttttttttttgggaaaccaaactaatgtaattattcc

SEQ ID NO: 220635 - DNA, 7440 bp, Cannabis indica
tttcttctactttttttttttttggttccaacatgttttgtgttcttgtcttcttgatgttactgagtgctcatattttggtgctcattgatgaactgtaaggaactgatcaataaatgtattgactttttacgattttattgtattctctgccacaaatatgacctttgctctatttacaggtcaggacgtcctacttatcctggttcatggattgatcaagtttcttggataccaggtattgtaagttcatcatgttctcatggtgatttagtaaattacttatttagagagtttatttaaatgaaaatagtgttttgaaatggcatggtaattgaaagaataacaaacatgacacttgaaagaaacaaatggcatttcaagtatcaactctgttgttgtatttttgatatctggtactagaaataaatttgctgagcttatatctgcataatactttggtaattcactgaatcagttagcttaaatcttcattaagtgttgatggtggttatatagtttcatttcaatgaaatagatctcccatgatgaagatatcaaaatcgttctaaaagctctttgcttatacagatggtccttattctaaaattacattctattgaactaggagtagtgtctatgtgactacacctttaatttctaaaggatatggaggtggagaatacatgcattcggctatacaatgcattaggtgatgctagctaggctgttgggttggagacctgagtagctgggcaagggatggctatatggatcatttcttagaatgatatttttaatctttatgctaaaaatatcaatcaatgagtgatgtcagaattcagacctggtgttggcatgctttcagagctgaacaaatggtgctcaaacgtattacacaaaactattgtagcactggaagtttggacggatcagtagttgtactttcatactgaatggtgttagtcttgagctcagatacatcatgcaggattctgattggagggtttattgtcattgacatgagattatttgactgattggttgtgagttttgaatctaaatttttttggcattagctattgaaagatgatcttatgattggaattggtttggccgaattatggtgttcaatggttttgagatttacaagacaatgttaaaaaagagtgttggaaagtgttggtaggccattgttctaaggtttgaatcccacgaactcataaattagtttcacaaggagaaatttgatgccgctgccactttcacaaaattccattcgatgattaaaaatcagtttcatgccaatttccaagtcttcacactgataatggtacagaatattttaattcaatcttaggtgattatcttacttccaatggcattgtccatccaaattcatttgttagtactccccaacaaaatgaaattgctgaaagaaaaaatagacatttgttaaaagttgctagggctctcatgtttactacttttgttcttaagattttttggggaagctgttttgacagcagcttccttaataaatagaatgccttttcgagtcttgcaatttcaaactccaatttcttctcttcttaagatttaccctcatactcatatactctcaaatcttcccttgaaaacatttggttccacaacctatgttcatgttttaggccctaatcatactgttagaatattatttgtaaaaattagagttccatttagtagtttcctatttgtatctagtagtttctcatttggtttccttactttgtatataaatatatattattctatggaatacaacactcaattcttttcaccattgtttacatggtatcagagcctttttagattcgaaatttgaaaatcgaaatttgggctgttacaaaattagcgtttatagttggagttttatgttcttaaggggttctttttttggaaaacccctttagagtacttttctattttcactgcctactttgataacttacctagctgacgatctcaaaaaccccaaagaccggtcattagaatctctgcgcgtggggctcacgcgccgactgaagtttttgcgcacatccccacgcgtcggcgcgtgtgatagtgtcttcagcgacgttctttttccaattcttttctcgattcttctaagcctactcgcatttgtctcaggttgtaattttgtattttttcttgcctttttcgtgtttgggtgttcattctttgatgttcgctttctatctattctctttcatttgtttttgctttcgagattatggtagagataaaatcagattcgaaattagtagttgtttctgatgtggttctcgtgatgtctaaaatcacggatcataaattgattggttcgaattatttggaatggagtaagactattcaactataatcgaggagtattgacaaagatgatcacttgattgatgatcttccaaagaaaaagacgatttaaggagaatatggctctgtgaggatgctcgcttgttccttcaaattcggaattctatcgataattagataattagggtaacttgtatttagtagattcttatttgtatttagtagtttcacatttagttttctagttttgtatataaatatatactgtacacaattctcttcactattgtttacacataccaaactagatcctcgttctcagaaatgtatttttcttgggtattcttccaccataaaggaatacaaatgctacaatcctctcacgtgtcgccttaatgtctcattagatgtcacattaaatgaagaacaacctttttatcccaatatttcgcttcaaggaaggcatagtagtgatactcattgttgagatacttgtttaactatggtaagtcctgattctaatctgctcattcccattgagtctccacctattgagtctaatctgcccatcgagcctaattttgtgcaaaatatagaccatgacactcctgaaaaggaaaagaggggccaaataaatgtagaaaaagaattgttgatttatactagacgtcgaaacaaacatcaagtaataccgccagctccagatcatgcctcccatgagtccgaactagtcataaatcccaatgtcagtgattctttgaacccaatttcatttgtttctaatcctaaaggaagggagtgaggggtcgcactttatatcctatatctaagtacgtttgctatatctaattacatttgtgaagccttgtccattcctgagtggaagaaatcggttgaagaagactaagtgcgttgtagaaaaatataacttgaaaaatagttgctcaaccacaaaataatttagtgggatgcaagtggttatttatagccaaatataaacctcatagcactcttgaaagatacaagacgaggcttgttgctaaaaggttcacttaaacttacagggtggacttcacaaaaatgttcgcaccagtggcgaaactaaacgtagtaagaattctcctatcaatagctgctaatcttgattggccattgcagcaacttgataccaagaacgcaatggaactttagaagaagaggtcttataaaaattcctccaggctttgaaggaaaatttggaaaagaaagtgtgtcacttaatgaaatctctctatggcttgaagcaatcaccacgagcatggtttgagaggtttactcaagtgattaaaaagcatggctacagacaaggccagtcagattatactctattcttcaagcactcacaagatggtaagaatgtaattctctattctaactggaaatgaccttattggaatggaggagttaaaacggttccttgccaaagaatttaaagtaaaagatcttggttaggtaagatactttctgggcatggagtttgcaagaaaaatattgagtatttcagtctcttaacctaagtatgttattgatctactcaaagagattggtatgctcggatgtaaaccagcagcaacaccggtggagccaaaaggaaagtacaagagaaaaggaaaagagaaacctgtagttaaggggatgtataacgattagtgggaaaattgatttatttgtctcacgctagacctaatatttcctttgcagttagtttggttagtaagtatgtgcacaatccttcgaaagaacacctagaggcagtttagaggatattacggtatctaaaggaagacaccaggaaagatttattgtttagaaaaaatgaagaaagaggtatagaagcatacacaaatgcagactgtgcaggttcagttgaggataaaagatcgccatctggatattgtaccgagttatagggaactcttgttacttggagaagtaagaagcaatctgttgttgcaagaagtagtgctgaagctgagcttagaactcttgctcaaggagtttgtgaactaatctggatcaaacgagttcttgaagaactaaaacttcaaaagtcaagtcctttgaaactatacggtggcaacaaatctgctattagtatagcacactatccaattcatcatgatagaaccaaacatgtagaggtggaccgtcaattcataaaagacaaaatggaagaaaaggaattatgcgttgtttttgtgcctagcaaacaagctgctgatttgctgacaaaatgactatcaaaagaaagcttcgataaccaagtgtgcaagctgggtatgtgggacttgtatacaccagcttgagggagggtgtagaaataatcagtatttattagattagttaaggtgttaatagttagttgaagtgtaattattgtgtaagtttgtacctatttaaaggtttctttccaatagtaaactcaagtgaatatttcttctacatttctacacaaaccatataaaaattagtgaagagcaggtgcataaacacacaagtcatatacatgctgcatatggaagtagcacttgtaaagaatgcttgcaattttatgttaatgctgcctgtttttcttaccagatgtattaagaatgatagagatttgtagatgtacattgatgattatcacaagtttgtgcagcttattgttgcaaaaatagatcaacataccaaaatttaatgtgttctcgtggatatgtataaacatattggtgagctgatattttgcttacttgatatgtgcctatggctttattcagcaggaacatggtgcctgctcactttataattcttcgatctctttcgagaaagtttccaaaattgtgtgtttttttgttagaacttagaacactaatttttaaattttcataaacaggagatgttttttaccttaactgggatgaagtacttcctggagcaactgcagttgtttccacaattgggggctttggcagcgaggaacagatgcttaggatcaatggtgaagcaaatgttgtcgctgttaatgctgctaaggattatggtatgcacagccatcagatttattattgtagcagtttatatcattgatatcagtatgtttttccattgtaatagctggttaatacattgcataacagctccctattgaaagctcgtcaagtttacattttttcagtgcgcagaggacccattggaaacaactaaatgtttgatatgtattggacaactcaatgtcatttcccttgtgaaattctgtcttgttctgcttctagcttgcattagctctttttttttttcttttctcaagaagtgctgtttaagcatgtcagttattaaatccctcattattttcttcttaatgttacattagtttttagtctaattgggaagaaatccagtgcccttggttttgatttcctccttagcatggagtaaagtaatttggccataatttttttaagttcaacaggtaatgacaaaataattgccgtcatgccactgccagaacaatttgctagagctttggaaggaaaggcccttatagcttgatccttgaaactccttgtcgtatcattcaaggagtgaatgataattgtctagatcgacatttttgttttactttctatttgcatcccaccgctggtctgatgtaatttattatgcgattcttaactatggacaatgcatgctatgatactactagtccatgatcagagtattgaggtcttacgtttctttcttttatggcaggaattcccaaatttgtcttcatatcagtgcatgactataatcttccatcatttttactttcatctggatacttcgccggaaaaaggaaagcagaatctgaggttctttccaaatatccaaactctggtactgtaaaacatttcttctccgtttttcttttttctttgaagagtttaagaatccctacgttactagaacttcatagttcaactcagaaaaagatacaaaaatgaaaatgttgatgcttgtttacctttttcttttattttttgagattatgtgctaaataatccatgtttgaaataaagaaatgggagcaacaagctcagtgaagctagtgaaaggttatgtagttttggatttggtcaagttaattagatgtttttggctttgagtcataaccactgggtctgggtcttgcatccttagctgcaacatttcttttccacagtttttcatttacttgtgtattcaaacctctcacaggaattgtgctaagaccgggtttcatatatgggaagagacgagtggacagctatgagattccattagatttggtaggagaaccgctggagagaatactgcgttctgtcgagaacttcacaaaaccattaaactctcttccagcatctgatctgatattggctccaccagttagtgtcgatgatgttgcacttgcagcaatcaactccataacagatgacgatttcttcggcgtttatacaattgaccaaatcaaggaagctgcaaaaaaggtgaaggtgtgagctttgcctagataaaaagataataattagtatacaaatgacatgttgatcaataccttttatatgttttttttttcctaaaatgtatatccttgtaccatcatacattgaaaagtgattcagatttggggtataaatgtccataagattcttgtaaggaaacatatctacaataggatataggataatgatattttattaaacgttgattatgaaataagcatgaccatcatataaattgaaaaagattggaaagaatatttgattgtttgggacacgaatattgtgcaaggtttataatatgctctctattctatttaatagcactaaaacatgtggcattgaactgactcatgcacctcaataccaaataaaaatcatttaaaaaaaaacaaaataaaataaaataaaaaataacaaaataaaaatcaaagggtcatttacagaaattctctagtaatgcttcttagattttcttatttttttttttttttgtagtaatgttttttttttgttagaaaatacgttaaatgtatttgaaatg

SEQ ID NO: 220636 - DNA, 4575 bp, Cannabis indica
aatatttatttggcaaggaaaccacaactagtatcatcaaaggtggtaggcccggtggtcaaggtggtgataagtgtatttggactaaagaactagatgatcatttctgtacgaagtccgcttatctagttcaggctttggagcgtgctcctttgtgtaatgtggctcctagtttatggactaaactatggaattctaaaatcttggagaggcacaaagttctttggtggagcattctctcaggtgctttgcctatctgatcaattattgcatagagaatccagattgtggatgtatcttgtcccctatgtggtgagggtgaggagactttggaatacctcttcctctactgcaactttgcttctcatctgtagagggtttcctcttggggagtgatgccaatgttagactctgaagctcgtatgtgggattaggtaaaattcttatgggatctggagtctagggcaatgaaggtcaaagaaatttttctatatgcgccaattgtggtgggtaggatttggaaatcccgaaacgaaaatgtgcaaaataatttaaattgtaacattaagcattacatttattctatttctttgtgtcatgcagattatagttcttgccattttttttcgccggtgacggttgagcctcctttttggtttgcccatgaaagattgggtcaaaatcaactttgatataaagttggttgtgattcaatgtgtgtggtagcgctggctagggaccaaaatgaatcaattttgtgggtagctatcatattgctcaacttctctgatttgcttattgggaaaacaacgacctgtttgttagcaatggaattagtggttttctagatgtatttttttgtgttgatcgagagtgacttagagatagttattaacgcgctgaaattagcctcttccgcttgtggtattagtaattatgttttttaatgcaaacaactctctaattggtttatgagttgtaattttttatttattttgaaattgtgtaattttatggtcctcaatgtgattaaaaatgaacttttgctaatgatataactaatatggtgaatcgttttgctatattaggtaacattttatgtaatcatttttttattttagttaatataactacgctgatttttttaatttaaaaaaataacaatatttgtctaaaataaatataaaaaagccaacataatggtccacgcccttaaaaagtattgttgggttttaattttaacaaccacttaatttaaaaaaataatagtaaataataaaaggagtcagacttttgacttttgaagttgttgtggtgcgttatgaatgaatgacaatgaattaaatttcatagtatttatggtcatttcttcatggaaaaaatggagaaattatagtattgaccactcactgatcaaagccaccggcttgaattcaaccgaccactcccacttctttctccttcctttctatatataatcatcttcctttctctacaaaaacaacaacaacaacaacaacaaacccctttcaaaaatggagaaagctctcaacagacagaaaattctactccatcatttaaaacccacttcttctttctccttttcctctcaaacccatcatcaatcttctgctctttctgtaagttttttactattttcccagatttctttcttttcaaatgtctttgtataaccctgatttttctttattctaggcttctgtatgtgcagctggtgatagtgcggcttaccatagggcacctgcctttggagacgatatagtcattgtcgcgtaaatttcttccgcaaatgtttgatttgattttagattttgttgatttttcttatttttttagtatgaattttttgtggaacagggcttatcgaactccgatttgtaaagctaagcgaggagggtttaaggatactccagctgatgatttacttgcagttgttttaaaggtaaacaaacccattgaatttggcttttaataattcaccaatacaaatacctaaaattattaatttggagcatatatacttaaatttaacttcaattttacataaatactaagtttaagtttaatttttttgtgcctttatgtgttaattttttattagtttatttaaaatagtttttaaatttaataatttggaccaatctacatagcttgttactacgcaagttacagaaatataacttaagtattattacattcaaaaattaaacttaagtatttatctgtaaccgagagttaaacatagatatttatactgcaaattaacttttttctcatatatttttaccaactatgatttatttttttaatatatttttataaaggaaaagtttaaatccatcaaaatattgaaaaaactaaaaattaaatatgtatttttttggaatttttgagcatttatgaaaatatttctttattttgtgcaacggatcatttatttaatttttaaatttgtaatggtgatacaatataggctgtggtagagaaaacaaatctggacccaagtgaagtaggggatatagttgttggaactgttttgccacctggttcacaaagagcaactgagtgtagaatggcagcaatctatgctggttttcctggtaagttttcaccttttatcatctttatgattaccatctatattataacccaatcacttttaactggaatctatgtatatcaaaagagaagattttcttttttggtttgtgtattcatctttactgtcatgaacaaaattgagttattttattctatggtatatactttattagtctaatttaaactcaatatcagatgacaatgcgtcatgttaagattttcttgatatgagtttagcagaaaagttatatgactaatttggtttgttcagatacggtgccaatcagaactgttaacaggcaatgttcatctggtctccaagcagttgctgatgttgctgcttcaataaaatcaggatattatgacattggtaagccaaaataatgaaatttctatctctagctctcgaatttcgatgtccttcattagattactaaaaccctttttggattcaggcattggagctggattagagtgtatgacagtagacaatattaccagagtcaggaacatgaacccaagagtaatacataacaactcttcttaatctttttaagcctttcttttgattaatcacaccataagaaattgtgttttgtgagctgaatagacatactgtgatctgatctcagcaggtagacaactttgcacaagcccgagattgtcttctcccgatgggtattacttcagaaaatgttgcagagcggtatgggatcactaggcaggagcaagaccaggctgctgtaagcttcatatgtaatgttaacttgcattaattaagggttaaggaatagacagtcgtttacattgtttgaagctaaacatggacaggttaattctcataggcgcgctgctgcagcaactgcatcgggtaaattcaaagatgaaatcataccagtttctaccaaggtaaaagaaaaggccatatacttctctttatgtgtaactacattttctagtgttattttttaagtatttgtctctatagattgtagacccgaaaaccggacaggagaagagagtaacaatttccgtggatgatggaatccggccaaatacagatttgagcactttggcaaagctgaagcctgccttcaagaatgatgggtccacaactgcaggtatttcatgattttgtagtgaaaaaaagttcagtattcatgatatttaatttgagcatagtgaattaaagattggactttgtttcttttctttcagggaattcaagccaggtgagtgatggtgctggagcagttctcctgatgaagagaagcttagctatgcagaaggggcttccaattcttggggtctttaggtatgattttcgggtcatttacattaaagttgaaacctttaactagggaatttttacacaaagaaacgacaatgtaaatgtagcagtaacatgaaaacaatgtgtaaataatttaatggttaaaataatattaaaaacaactgggtgtagttttagtaaaaaaaaaactttaaatttgtaaaaatattaaaaatgctgtaaatttgtatagttgtatctttttcggataattatgataaaaatccctattaacaaaccaagatggctcttttgcttgatatggcgagagtttagtagtcggagttacctgaatttgttagacttgtttttgacagttccctaatgaaatgtttcattctattctaaaaaaaataaaataaaggagctttcaattcatgttgtacctttataaaatgcaaattcggaataattttcaggagtttttctgctgttggtgtggatcctgctgttatgggcattggtccatcagttgcaatcccagctgcagtgaagtctgctggtcttgaactcgataacatcgatttattcgaaattaatgaggcaagggatttcttcttcttttgtttttgtttttggacaaaataactatatcttaattagcactactttatagctag

SEQ ID NO: 220637 - DNA, 2350 bp, Cannabis indica
atttcatttgctgcaattcattggctatgcattttttttaattttataaattaaatttattattcactaaataataaacttcttaatgtatttatatattacattaatcaattaaaaaatagttacatacgttacacaatttaaaataaatcaactttaagaattaactttgtgtaacttatatatctcttataaatatcagttctataactcacttactaaacaactcaacatatttgctttaatttaaaaattatactgtatttaataaaatacaacaacagttggcataacatatttactttaaagtgggaaaaataatattttttttaaaaaaaaatgaagtttgaagaaataataatatacacatgtcttcttatagaagataattaagtcggaaaaatcaataaaaagttcactaattaatcagaaaaaataagaggagaattaggagaaaaaagtttatatagtaataccgcaacacatctactacaatatgtattttataggaaaaattcttagcaattgtcatacacaacacaaacttaacaaatatgcacaaattttaaaaaataaataaaaataaaaaaattctattgaacacttgtaaaatcaacaaaattaaggaaaatattaagactcacctaaaaagtaattgtagcaagaatgatgattatgctcatcaaattaatgaatatttgtgtttcttgaagtgaaagatctttcataatgaaatttagcttctgcaaaacaataaaacaataaaataaaaaaataaaagttatttatttttagaatgtcataggtcaatctttgtaattttttagtaaagaaagaaataaaaaaaaatgaaattttatttttcttaactattatgattgatgataaatagcattgagaagagaattgaagaagatatatgaatgaatagatcattattgtgaaaataaaagttattagtattaagtatagtattattatgatatatataatttttggtctacatatatatagagggttacaaaattagtaaaaaaaaaataggttttagagataataagaatcttaagcatgctccatcaactctttaaaattttcctatatatacattgattgattatattatctataaagttacaacttcatcatcttaaagttatagtaattacaatatatgtaagtgttttttctctacatactttttgaataaaacaataaaagtaaatattaaatttagaagttatattacaatttattttatttcatgtctctaaccagtaaagaaaaaaatggatttattgtgttatgaaattaaaatttaatttgtatttatattttatgtactcttttataagatttgtttccttatgataataattttgtgcactctaatagagtctcttttctttttttagtcttctaatataaaacttgaataattttgtagggatagcattaaaataaaattaatataatataaatagattgaataaaaaatatttattattttgaattaatattattgaaaagaagtaattttttttcttgaataattatgttaagagtaaaaaaaatgatatatcatccctattgaaaaatattaatgactaattatataattactcaaaatatatatacctagcttgcactaatttataatagaaagctcgctgtaatatagtatttttaattttatttttttatataaaaagaaaatactatatttagcaccgcatttaaatataatataaatataaattataatgaaaatagtattgtagaatttatattttataaatacatgtatatatatggtatttcttctattattatcgatccaataatatgcatgcaggctagtttctgggaatgttctcatctctttttaatctaaaccataattgtctcacaaattctatttctttaaatttaagcctttgacaataatagttctgagcatataatttcatgaatataaatactatatatatatatttatatatatatatatatatatatataataaaaggcatatattactggagaattaggtaatacagccaatataggaaaagaacaaaagagttatggaaagcttgtgggaacatcatgtacttattggaaaataatatttcatcagccaaatccattatgttggagaccatccaagactatttatattttcaaattaaataacatgaatataaattcatcatctaaaaacctaaacagagaaatgaaaataaataataattcatatgaaagtgaaaaataattaagaaagaaaataataataccttgttaataatcttcagccttaatgcccacattcttgtttggaaaattattc

SEQ ID NO: 220638 - DNA, 2187 bp, Cannabis indica
tctcagaaaatgccataagtgcatcattagtgtgagaagagggaaaaaaccagtagcatgtttactatgttagtaaatggttactaggggcagaatcgagatacccacctctagaaaaactcacactctgcttaattcattcatctcgcaaattgcggccatatcttcaagcgcaccctaataaggtcctaacaaataaaccattgtgacaagtactatcgaaacttgatacattaggaagattaataaagtggttgattgagttaggaaaatttgaagtaacttacgacttgaggacttcaatcaaagggcaggccttggttgactttttaatagaagaaattaactcagtagaagactctgaaataggaagtgaagcaaaaacatggaaactgttcattgatggagcttcaaacgagaatggctcgggggcaggagtaataatggtgtccctagaaagcttcaaatttcactatgcacttaggtttcagtttgaaacttcaaataacgaggcagaataagaagccttattagtagtactaagaatagctgaggcactaaaagtcaagcacattctatgccttagtgacttgcagttaatattgaatcaagtcttgggagaataccaagcgaagggccagaaaatggccaaatacttagagaaagtttgaaagaacttggaaaagtttgattatttcaaaataaaacaaaactctaatgcagatgccttagaaaaattagcatctcaatttgatctcgacaagttgaacttggtatcgatggaggtactggatgaaccaagtatatgtgaagaggaagatattgacatgatagatgtggggcctacatggatgacaccgatcgtcaagtatctattaaatggaaaacttcccataaataaattttgaggcacaaaaactcttatattcgattcctcgctacacgatggtcaaaggaaaactgtacagaagaggttattccatgcctctactacgatgtgtgttaccaatagaagctaatgaaataatcagagaaattcttgaaggcgtctgtggagatcatgcaggttggcaaagcctatctaaaaaaataatccatcaaggaaactactgaccaactattaataaagacacacacacatgagtttgttaagagatgcgacaagtgccaacggttctcacatatacctcgagtaccacccactgagttaagaatgatgacctcgccacccatttacaataaggggaattgatctaattgagtctttacccacaggttggggtgtcacaaaatatgatgttgtggcagttgacttcttcacaaaatggatagaaaccaaacctctaatatccatcacatgcaagaaggtccttaattttgttatcaagaacatcatatgtaggtttgctattccaattaagatagtatctgataacggtactcagtttgatggagaattattcactgagttcggttaaaggagtaaaataattaaaagcttctcatcagtattgaggcctcaagagaatgggcaagtagaagctgtaaataaaaccttgaaggatactatcaagaagaagttacacgctgctaaaggaagatgggttggcgagctaccacaagtgctctgggcccatagaaccacgaaagaaacaccaacgagacacactccattttcattggcatttggcttggaagcaatgtttcttgtaaaagtaaacattgtgacccacaggcatgaattctacaatcaagaacaaaactgaaaacttcttaatatgtccttggatctgcttgaagaaaaatgcatcgagtcgcaagtaacaaatgctacttataaacaccgtatcaaaatatactttaataaaagagtttcaaagagactctttaaagtatgagatttggtgttaagacgtgtatttacaaatatacaagatacaacaactggagtttaacccgaactgggaaggcccatacatcattaaagctatagttggaaccgaagtttacaaattagcttggcctaatggctcgctaatgaaaaatcactgaaacgacgagcatgtatgcccttattacaagtaattgtgtaatgctatattaatctttgtatagtggtttcttaacttgaataaaaatctgaatatttcacgtaatcataaagttatttctttaaaattacttggg

SEQ ID NO: 220639 - DNA, 2122 bp, Cannabis indica
taccaacaattatgccaacacctccacctcccacaatccaccataagctctgttatctgaaaccaccaacacctcaacatctgatgctgcaggatcttagtacattgacagtggagcaagtcaccacataactccaaatctagacactataaaccatcctgcagattacaaagaaaaagcaaaagtagttgttggtaatgataactctcctcccattcttcacataggctcaaatgtttttcattcaaaatctaattccaaacctcttattttacaaaatattcttcatgttcccaatgtcaataagaatcttcttagtatctctcaattcaccaaagataagaatgtcacccttgaatgtgatgatgtttcttgtcttataaaggacaagagcactaagcaagcacttctttggggtgaagtttgtgatggcctttacaaacttcaactccctcaagctaaatctcaagccactgtcaagtcagcctctaagaatcaaaatcccactgccttcaatttcactaccattagcaatccagtttatgataagtaacaaatttcttctgtttggcattgtaggctagaccatccttctcacattgttctaagaaaagtaatgtccaaagtttcccctaaaactaattgtaacaaaccacacttttgtgatgcttgcggaattgggaagctacatcagtacactttcaaaaaattctagtaataaaacatttgtaccttttgaactaatatttttttatgtttggggtccatctttttgcccctcaactgatggttataggtattacttaagctttgttgatgattttactcgatttgtgtggattttcccaatgaaacaaaaactaaagcagcaaacctgtttgtgcaatttaatgcttatgttcaaaggaaatttcagcttaaaataaaaggtgttcaaacttatttagggaaagaatttgaacctctatagaaaatgtttcaacacttaggcattgctcttgcccctatactcaccaacaacaaggtagagttgagagaagacattaacatcttgttaatgttaatctcactctccttgccaaagctgaaatgactcttactttttggtgggaagctttcacctctgcaacctacttaatcaataggctctcatccactgtcctacagattgtttcaccctttgaaaagatttttcatcaaccccttgattataacattctaaatgtgtttggatgctcatgttttcctcttttaagaccttatgaaagccacaaagtgtcttttcgatcatctaagtgcctatttctaggctattgtcttaactctaaggggtacaagtgcttgcaccctagtggcagggtctatgtagctcgtaatgtcacttttaatgaatctgaatttccatataacaccctttttggcactacttctcaatctctctcttagtttactccaactataattgaaacaagtgcctatattattcctacaactactatgccacctaatcctacacctatgccacctccttctccccctccctcccttcccaccaactctgccaatgagtcctctagtcaatcctccaacagctcattatttgcatcataactcacacttaataacgaacagtactgttgatacaaatttcagcaataattcatctgctttagcactagtcattactcataacattcatcccatggttaccagatccaagcttggcatctttaaactaaaatcttatattgccaccacatccccagttaccgaaccaacaactttaaaggtttctcttgcaagtccaatatggaataaagcaatgaatgtggaaatttatgctttaaaaagaaaagaaacttggcatcttgttattcctccacctgatgctcctatagttagcaacaaatgggtgtatcgggttaaatagaacaaaaatagctcagttgaaagatacaaagctcgtttgggtgccaagggctttcaacaaaccccttgtttggattacatagagacatacaatccagtcataaagccttgtacgatttgtgtaatatttactcttctagctacttataattgggaaatttagcaagtggacatcaacaatgcttttttaaat

SEQ ID NO: 220640 - DNA, 1174 bp, Cannabis indica
caaagtattcatattggataccaatttttgttttgcattcaagactagactaaagttgtagaataattttattatagttttgagtattataataacttgcatacatttttgatactataagatagtattttataagttgttcctaaattttttgtaacattaaattaaaataagatgaaactcgatacttaaatatactaataataatgtaatactttaaaataaaaatagtaatttgggtcacgacatgtaggtcgacataatcacggtgtataattttgtaggttcgacacaaaattatcagagtcatattcgtgttcatgtatgtgttttatcaatttttcgtgctacgggtcgtgttcatatacctgacaattttttcaataaatttaagagcttaatgtacactaacacttacgactcgtaagtgttgggcactaaaagtgtcatttaacataaattttactgagaaaattagactctatactttttttatattgtcctcttttatttttaccctcttttttaaagcctatcatttttacttcttttttaaaatactttaccaattttacccatatcacctcgatatactctccatgtgacttctttatttcagagtattttgggttcaatacatataaaaagtaaaggtatgtttcaactaaatataaaattagaggtagatttagttaattgataaataaaagaggtatatttcaatacacccctaaattgctcttatctaaattgtaatttgttatgtttaaagcccaagcccaagcccaagcccatttggtggttgcctaagatctcaaaacgccaccgtttagtagatcaaaatgccaaaaccctaaacccttgtctttctgaattgaaagttcaatgctttgcataacaaactcacagaagcttttagcttaggaaagaagaagacgaagaagaagaacagtgaagtaaaatgggaatctttgagccctttagggctattggatacattaccagcggtgttcctttctccattcagcgattaggcaccgaaaccttcgtcaccgtcagtgttggcaaggcttttcagatttacaatgtaatttcactctctactttttctttttctatatttaatttacttctcaatattagttactgagtaatttttcttcttcttaatttt

SEQ ID NO: 220641 - DNA, 4063 bp, Cannabis indica
ttggtgggattctttccaaaccgctgtctatttgatcaataggttgcctacacctattttgaaacataagtcaccatttcaggttgtttttaacaagaaactagattacaagttcattaaaacatttggagttgcttgttacccttgtattagaccatatcaaactcacaagtttcaatttcatttagtaagatgtgtcaatcttgggtatagtgactctcacaaaggttacaaatgcttgagttccacaggaaggatatacatttctcgaaatgttgtattcaatgaagacaacttccctttccaaactggttttctgaacaatttccaacccgaaaaatctgtgtgtgttagtgtcccatcatggtcagctttgtttcaatcctctcaaaatcagtccaacactactacactagaccctgtgtgtcaagtccctgaagcagcaacctctgaagcaactctcgactccactgatcctagtcatcaaaatcgacatcaggtattagactcatctgaatttattgtctctcaatctcatgaacaaactcccactgacagagaacagagtagtagcactcctcaattgataatacaggctctattttacaacctgcaatttaggatactgctagtcaaaatgaacctacaactccgaagccttctcaccctatgatcactcgatcaaaggcaggcatttttaagccgaaagtgtatatcaatcaagctcaatggcagtggaaaaatgatgaactagctactgttgaggaagctttgtgtcatccaggctggaactctgcaatgggagatgaaatgacagctttgaggagaaacaaaacctggaatttagttccaagaaagcaaggtatgaacattattggaaataaatgggtttttcgagaaaagaggaattcagatggagtttgcaaagactcaaggcacgttggttgcaaaaggctttaaccaagacctggaattgactttggggaaacctatagtccagtaatcaaagcttcaaccatgaaaataattctgactattgcggtatctaaaggctgggaaattcgacagctggacatcaataacgcattcttgaatggcactctacgggaagacgtttatatgttacagcaacaacgttttgaagatcaaaaccaacctaatgcagtgtgcaaactcaccaagtctttatatggtctgaagcaggccccgagggcctggtatgacagattaaaaactaccttgctcagctggaactttgcaaaatcaagagccgattcatctttgtttttctaaaaagccactggtactgttataatggctctcatttatgtcgatgacataatcatcacaggaaatgatgcttctaaactcacaaagttcattggaaaattgaatgaaatgttttctctcaaggatcttggtcctctacaattttccttggcattgaagtgcacagggatgaaaccggtttgtatatgaatcaggggaagtatgtcaaagaattattaatcaaagctgaaatgcttcatctcaaaccctgtaacactccaatgacagctgggaaacctttgtctaaaactgatggtgaactactctcaaacccaacagagtatagaagcatcataggaggtttgcaatacttgactcacaccagaccagacctatcttttgccgtgaacaagttgagtcagctcctgcaatctcctacaacagcacactggagtgcagccaagagagtgcttcgatatttgaaaagaacaacctatcatggactccacataaaaccttgagatagattggcaataacaaggtactcggatgccgattgggcgtgttgtctagatgacagaagaagtgttgctgcctactgtgtttatctcagagacacacctgtatcctggtcatctaagaaataggtcgttgtatctcgatcaagtacagaatctgaatacagagctcttgctcaagtggctgctgaaatagcttagatacaatccttgctcaaagagttcgaatttcctctgccttgtactcctgtcacctggtgcgataacataggggccagtgctttggctgccaaccctatgtaccatgctcgtacaaaacacattgaattggatgtgccttttgtaagagataaggtgattaacaaagaaattgaagtcagatacattccctcgagtgaccaaactgctgactgtcttaccaatagtttgacacaacatggatttcatttcttggtggacaaacttggtgtggttgaaacaccctcaagtttgagatgggctgtgaagaaatgatattttgcctattggtttagtgtatatgagctgtcataactaattcgtgtggtcccattgttgtaacagattattgttataatattccctttgtaataattactttatgattttgtaaaggttattaggtcattctttgtacggtacaaacatgtctataaatacaatcactagccaatgatttccattaagctgatttctcatttcctctattcatttcttttattctcttttgttctctgcattttctctgcactcaaactcttcattcgttacagcagctactagtgcatctgcttgctgtggggtgactgtggggccgtttctaagaactcttctgttgactgatgttctgttgtgcttgctggtgccaagtagggcctgataatatgatagaaaaatatcagttattttgctcgggccatcaactcttaccccttgtgcatcttctattgagagaatcttattttggttccttctggccttgatactcaggtggaaagctactgtgttgtcatctttatcacgaatccaagtgagtttggctttttgatgaagaaaggatagataattagtatgagcatcataataattttgcctcaagcatttttcatgttcctgtaatccagagttgaaaggatccaggtgcaaccgattctgacaatcatctagtgcttctttggctttaatcacaggagcatgaatatcagaaaaccccttcttgtttattccattgaaaatggcctttagagctttaagttttgtcaccacttggtacatcttggtgccttcatgattctgctgccatactcttttaacttgctctgcataacaaggatgttaagaccacattcgaaagtatcgaaatggtttttttcctgtttgcaaattctgatgaaaagtaagtaaagctggtgcatgatcaaagataccttcatataagaatatagtctcaggcctaggaaaagagtgaatccatctgtcattagctagtacccgatctatttttgaatagattctagatgaatcttgttgcttattacaccatgtgaagaaattccccgtatattttatgtcctctagttgacaataagccacacagttcgggaaatcaggtgtaaggttgtgtctaactttagaaccaaccctttcatcttttgcgagtatgtcattaaagtcccccatcacaatccagggatcaagagtggccatatccattagatctttccagagagctttccttccttctacctcattgaaaccatacacaaaagtagtaaagaacttcttaccatctaaagtagagacttcgaggtggataagttgacttgtgcatttgagtatgttgatggaaacagaattaggattccaagctactattattgtccctcctttatgccaatctatattactacatagtaaagcaccatcctgagaacatatttgagtacaaggctccaagcttggaagccttaactaaaccaaaattgtgagaatagatcaattgcttgaccatgctttgcttttgttggttgttgactcctaggacattccaacttagtagcctatccattttgtagaggaggcccttcccctcctccactctttcccatttctgtctgaccattttcctgctcctcatctggtattgtcactgcctcatcattgttgttcccttgttgatcatctaaacatggaaagaattcccagtcattgtaccagtaacaggaggcttaatttttggtttccaccctttagtaaca

SEQ ID NO: 220642 - DNA, 2734 bp, Cannabis indica
ccaaaattaattaaattattaattttcaactcaaatttaattttctacaaatatacaattgaattcgaaatccaatgtattataaaaatacattttcgaaatcaccttaaaataaaataaaataaagctggaaaaattattctaatttatgttggtctaaaattaaataacttaattttcaacataaatataattttcctactgaattaaatctcttatgaaaaatatcaaatatttatgtgtctagaataaaatcaacttaaatattaattttctaatttaattaaatatatctagaaaaataccaaaagtctacctgaagaatatttatctagataattcataaattaattactaattttttaactaaaatataatatattttgtggtcttgtatcattttatatgcactgcggacagaatacataccatctttttcatcaaaccagtaccaagaatcatcctcagccgaatggttaattggaatccacaaaatgattgcagcatcagcaggtgaaaagagatctcagaccacctcagtatcccagtttcggctattcatttgaaacaaggatcagatgtaatgtcaacagttaaaccagaccctattcctttccttagtcccagcttaaccgtgtccttagcagcaaagatgctactccaaatgaaacttggattagagcctaattcagtagacaaaaagtcaccttgtggataatatctcgctttgaaaatcttactgaccaaagaatcatgtctaagcatgaatctccagccttgttttccaagcatagcaaggttaaaatccctcagattacggaagcccataccaccttcagctttgttccttgtcattctatcccagttcatccacacaatcccacttccattgctattagatttgtttgatttccaccagaaactcgccatcaatctctcaagttctttacaagtaccgattgggaaaagaaagacattcattgcgtacgaaggaagagattggagcatagatttgatgagaacctccttaccagcccgagagagaaatttaccttccaaactatttattcgctttctcatcctttcttttagaaaccccaaaacaacatttttatttctgtcgacaatgctaggaagtcccaaatacaaactatccgcaccggcttcaagaacttgcaacacctcacaaatacgccttctagtatccatcctttatttgaactgaagaatgcagacgatttatggaggttaaccttttgccccgaagctccttcaaaagtttgtaagagagtgagaacccgattagcttcctcctccgaagctttgcagtacacataactatcgtccacgaagagcaaatgtgagataggtggtgcactacaggcaaccttgcatcccgtgatgagtttagtagcttcaacatgtttaataagcgaagaaagtccctcagcacacacaataaagaggtaaggagacagaggacaaccttgacgaatgcctcttgtgggaatgataggccccagcttctaaccactattcatgacatgataccgaactaacttgacacatctgagagttaaaccaatccatcgttcactaaaccccataacacggaggacaggttccaagaaaccccactcaacccgatcgtaggctttgctcatatccagttttagtgccatgtatccctgtcttccgttagttttcctctttaagtaatggataacttcgaacaccaccataacattgtcagatgttcatgtattttggaagaagttgtgacctctcaaggtgcctcccaaggctaaagatttgatatggagggcggcttctaactgtttagcaactaagttcaacctctgtacaaaaaaggtgttgtttgaaaacacttgccccatgtgtggagtctatgccgaaactgaattgcatctcctggtgacttgccaatttgctgggtcctgttgggaggcggctgctgttggagatgctagcagaaataactcttccctgctgtattggttggatttcaacgcacaccgtatggacagtgagaagctaggccgacttgtaatgttgtgttgggctctatggtcggtaaggaatgatttaatttggaaggattgtgctcgaagtgttagtgatgtagttgcatttgcgttttcaagtcttgatcaatatgtaaaagctcaaggtaaaggtaacatccctttgttgtctcctcttaaagatggtgatggttcggagctttggaataaaccgtaaacaggcattaagctaaacgtagatgagactatcttcgatcgtgattttaaacacggttttgggtgtgtggtgaggaattttaatggggagttgatctcggcgtttgctggtgtgaaaattggcagaggctcccctgaactagctgaagccattggcattagagaggccctcggctggcttaaaaatcacggatacacacgggctgaggttgagacagatagcttggtttgtgttgaagctattcggagcagagcaagctttacttcaggtttcgggttgattgtagaggattgtaagaccattcttaagagtttgataaatgtctctatattttttgtcaagcgttctgcgaaccgtgccgcgcattttgttgcccatcactctatgtctttcgctgaatgtatgtttcctattaatagggttcccttagagttgttgtctatcctttcgagcgatagctcttcttaataaa

SEQ ID NO: 220643 - DNA, 1785 bp, Cannabis indica
taataaataaaaaatttagacatccacataattattaatatttataacacttatattatattgtagaaaactttagataactttcaagaactctgccataattaaggtactatttgcttgggaggaataaaaacataaaaataagaacaagaatgggaatgaaaataagaataccaatgaaatagtgtagaatttaaaatgtattaaaaaattgataaacaaattattaaatattttatcatcttgcattgaaataatatttcatttcaactcaaaaaagtataatcatcccaccaaaatgatggaaaattcattttattggaatgatattctaatactttaaaatgcaaccaagtaaaggaatgaatcaaaaattgtttcttttccattctattccactttattattctgacccaattgtcacattttaaagattgaattttccaccaaagaatatgaatgtatggtaaatgaagcacaattgagagtgtgagttgtgtgactaccaaaagcagtgcctgcccaatagcctggagctctccttgttttcatgattaacaaatatttgatcattatttgttactaatgatttatttattttgtagcaaaattaaaagataaaatatattttttcaagacaaattggtatttttaccaaacttcttaaattgacaaaaaattgattcaacaagcaaatcaagagcaaaagatcatcaggggatcaacaactcaagaccctaatcaaaagaggtcttcaaaatctcaaagtcaaaaagcaatccgaaagtcaaagtcaaaatctactctcaggaaaagtcaactttggatcaaaacatataaatcaagctaggaagctcatctacatcaacactacacaaaatcaaatggtataaatttactttagtcttgttaaagtgatttgcatagcacactagggttcataagtacaaattttggcctactcactaactttttcaataagttttctcacccgatggttcaaaaaaaattgattgaatttaaaaatcacattttgtttaagtaacagaacagaattggaatttttaaaaacggataatcgagtaaagagttatccacgttatagtgccgaaacaatacatgttttgaaactgcctaattttcggcctaccttttttcaaaaggtagtctgtttttcacagaataggtattctgttttaaaaacaatagtccgtttttcccaagattttttttgaaatgtgtgctagcagctataaatggctacttttcacaccaacactatataaacttgatttttactcaaaaataggagttggatgagcatttatatcatatacctaacctattaaagtgagattattgagctttcaagtttaaaatccaacaaacacttttcacacagtttgagcctaaatttttgtttattcatcttaagtgtgtttatttatcactctaggtttctattgtagtatcatacttcaagagtgattttgattgtaatttcaaaaacattttcatattgtgattgaggtgaggttggcaccagtattgtaaataacctggttatagtgagattgtcactacaacagtccgagaaagaggttaatagtccttggcggtgcaaaactattgtaagaggtttagaaacaccttggtgaaaatttcctgattagaagggttattcaagcccgttaacttggctcaatattggaactcaaagctaggtctatagctttgaagactaaggacgtaagtggcttacctctaccgaaccttgtaaaaatc

SEQ ID NO: 220644 - DNA, 4307 bp, Cannabis indica
atgtaaaagagactaagaaaaaagaggaaaagatgacataaacaatagatgtatttttgaaattaaagaattttttgaaaaataaaattgaaaaacaatttttttaaaaaagtttaaaaaaccttactaagttagaaatgtacaaaagatgctaaatttggcatctagtataaaaatccctaaattttttaatttttagaatttctagtcagtatgattctcgatctcttatttttatatttcctctagtttattatcattttttattatcaaggttatttgatgctttggttgtgtaattagtttttgaacgtttatcttgctgtcatatttgaaataatctcattaaaaaggcccaaacatcctcattttttagtagtatgagaaaaatagagtatgagaagagaagaaaaaaaagtctcattagttaaaaatgggtctggtacagaaaagctgtatataggccaagtaaagatgagttagttaaatgagatttaaccaacgatgctaacaacttaactaactaatgtaactaactcaagaaatagaataataaaaagcaaattcataattaagtacacaatttcatataatttgaacgtcatgtcctttgacatgttattttttctctctactgtagagtgttgatttgatcagtaagtcttgttatttttgttttttcgtttcctgagatggcctcaagcagtcgagtgatggaagaactagaacatagatgggatacaatatgtctagaagaagaggaagagagtgaagagatactggaagatgaggaagatggcaatcccgagtttgatgtaagatggagtcttgtagggaaattgttaacaggcagaatatcagattacaaggtcttccaaaatatgatagcagatttatggaagccatgcaaaggaatgactgttaagattctagagcagaactgattcttgtttcaattctatcacgagattgacattcagcgtgtgatcaatggtagcccatggacatttgatcggaagcatttgatcttgaagagactgaaggcaggggacaatccgagaatggtggaattggatacgattgacatgtgggttcagatccatgatttacaatctggattcaaaacagagcaagcagttcagaaagctgggaactacattggcacatttcttggttcggatcctaataattttcatggtatttggcgtgactaccttcgggtacgggtctctatttctttacataaacctctgaagaggaggatgaagttccggaaacgtgatggtgaaacattttgggctaatttcaaatatgagaaagtccccacattttgcttcatatgtggtattatgggacactctgagacattttgtcccaagttatatgatacccctgtagctaaccttacaaagccatacggactctttatgaaagctccaccaagaagaattaactttctgactgcttctccatggctccggcgacatgaagcaactcagatggatactggcggcaagaactctgatgaagatattgaaattaatgctccccatgatactcggcttgatgatagggaggataatcttcaaaggaataaatatggaaacttgcatggatatggaaaggaaattgcctataatttgggagctgctcatgtacagccgaatatggctttaaatgagccagttgttttggtcaaagagaatcaagtcttattctcatctgatatggaattgtcaatatctgagcttaaaaggagacgtgttgggcttgacaaaactaatgacccaactgggcctatagtagatgatatggaacatgataaaaatgataatgaggaggcaatagaggtaatttcaaaaaacggagtcaaggtgggttctggtgtccaggcccaccacgcattatgagcactctaagttggaactgccgtgggcttgggaacccacaggccattcagttcctggaggatatttgtttccaaaagaagcccaaatttcttttcttatgtgagactctttgtaacaaagaattggtgaaccgtgtacgggttagacttggttttgaaggagttttttcagtcgatgctgttggaagaaagggtggccttgctttgttctggaaatcgaatgatgaagctaagttcttgggtttttctcaacatcatatcgattttgaggttagtgttcaaggcatgggagtatggaggttaactggattatatggtgaacctaacagacaattacgacatcaaacttggcagcttctccgaagcctctctctcgaatcaacacttccatggtgtgtaattggtgatttcaataacatagccagcaatgaggagaagaaaggaggtcgtccatatcctactgctttaatctctggttttcaatcggcccttgatgattgtcatcttatcgacttggagcttcgtggctatccatttacttggcaacgtggaaaaggaacggaccaatgcattgaaattcgccttgataaagcagctgttactcatgaatggttagtcatttttaatcactctacactcaccaatattgactacacttgctctgatcatacacctatatttttacaacctgaaacgatgtctactgctgccacattccactgctttcggtatgaaaatgtatggtctcgtgaaccaatttgttcccagttggttgaagattgctggtctaattcgcaagggttatctctgtctggtaaaatagcacaatgttcaattcggttggaggaatggggaaaggaaaactcagggaatttcaagaaacgtattgcccaaagcaagaagcgtatgaccagaatgaagagtcagtcgagttcgtttctgcataccgaattcgaaagtgaacaaaataactatttcgaattattggctcaacaggagatttattggaagcagagatcgaaacagttttggcttcataatggtgacaagaataccaagtacttccatgcctctgcaagtgccaggaagagaaacaatcagattcgtcagctgcaaaataatgctggggtgtggacagattgggcaactggccttgatcaggtaattgttcaatattttaacgatctgtatactgctggttattcgacaaatgttggagttattagagaggttaattgcactgttagttctatccaaaatgaagaactcttgaaaccagtttcttgcgaggaggtgagacttgccttgttccaaatgcaccctgacaaagctccagggccagatgggatgggtccgggattctttcaacatcactggaatactgttgggatagatgtggttaatcttgttcaggatttctttcattcaggctccttcccaaaagagctgaatgaaactaatcttgttttaattcctaaaaagaagaatgttactacaatgggagatttaaggcctattgctctttgtaatgttgtctataaagtgatctctaaagttcttgctaatcgaatgagagatatcattgatcttattatctcagacactcaaagtgcgttcatcccgggacgtcttatctcagataatattatggtggcttttgaagtcatgcactatctcaagcgtaaaacaaaaggcaagaaaggctatatggctcttaaattggacatgagtaaggcctatgatcgggttgagtggagttatcttcaggctgtgatgcttcaaatgggatttgctgaaagatgggttaaattgattatgttttgtgtatcatctgtcagctattctattttgcataatggtcatcgaatgggccctatccttccctctcgtggtattcgtcagggagatccgttatctacttatctctttattatatgcgctgaaggcttctctgctcttataaagaaattcgaatctcagcagcttcttcaaggttgtcgtgtggctcatggggcaccatccattacacatatgctctttgctgatgacagctatctgttctgtcaagcaacacctggtgcagccgtggggatttctaatctactccaagtttttgagaatgcttcaggacagaaaattaatttccacaagtccatgatctttttagtccaaatactaagtgctgaaaatcggacacaaatttgcaatagacttgtcatgcccgaagcatcagaagggagttttgtatctgggcctcccgaacattgttggtcgaaacaaaaatgcagtactgggatttctgaagataaagtattacaagagttaatagctgggatggtaaacttctttcccgagctggtaaagaaatccttctcaaaacggtggttcaatcactccc

SEQ ID NO: 220645 - DNA, 2254 bp, Cannabis indica
ttggattgttcatcctagtcatacgagtgacttgtgcttgacaacggttactgttaacccatgctttggtggtaatcgcacccggatttaaaaattcatatactctattcagccgattgatgtccaataatcctttttcatgtgcccaataaaaaatcataattaataactggcttgtcaaaacaatattatcaagtttattattaagagttagaaatcatacttgcacaaaaatcctatcagctgggctccaaagtatggcatggggcataattcatgaatgtcatttttaacaagccaaatggagtcatcttcgaccccaaatagatcataaacaacctggaattggattatggatggctttggccaccttttgacaaagttttagaacgtaatgattgagctattttgtcgtggttggacataacaatcatggcatgttggcttactcggcctcttagggtgctttggaggctatgctggaggaccgagttaatctttagaggcttgtttgcttctcctcatggattgcttcagaagtttcttggtgggtggttatgtctatatatatagaaaataaataattaagttagaaatgtcattaatcaataaacaaattaaaacataccaagtattttcctatatttgtaaggtagactttcatccattcaacgtagctttttatagcttgacatactattgtgtatgcatcttgggcgtcagacacggaagcagtgcattctccacattgacttctttgattaatacccggcgacaatcttcgtataggtattcatcattgtgaatcgagaactttccatcatcaaaacatttctccttcacaatgtgccacaaagcagccttcagtatcgtcccactaggctccaatcgacagtgcatctaacatggtaagatatgtatatccaaatcaaacaaacaacaatgcagtttgtaaattgaccatatctttaatttttgcattaaattagtttgtaaaataacattaagattacctcttctaaactaccaccagtagttggcggtgctactgatggagcagttgcctttctgacacgcaatggtgatggagtaaagacattgacaacactcgatagttgtgctacgagatctggtggagaagagacatccgcacgacccgatgcctgtgctatgggatcggaggaaaggccagcatgggcatgttcattcgatgctcctccaacaccagaagcagatgcatgggatgtcctacaatgctactatgctgggaactaaccggacaaatgagctcatccactttctcctatagttttttgtttctttactctgtctcaggaacacgtatctccaaatctgatgatacttggttcaacccatccatatttttccttttaaggtgtggtgtgttgaaatatttagtcttagtgatgctaaaacccatggctcgaacccggccaccatgctcatctatccctagtgccaaggtcaacacgtccttcttaccttccacttgcacaactccctcttccacttggttacaaaagtcatcctacaaacataacaaatagagttagaaataaattatgaaacataaaaatacaaatgaaattatactttaaacttacaatccattgaacaatttccatagctgggccctccacctcggcgttcgtgttcatgtgaagtcctttcaatatttcagatctataaaatttggtaatttggtggcctacctctttctccatttgttcttgaaccatccttacaccaccttgtttggtgcgatggttgtaaatatatttttccctactctgttgggccattttcctcctcacttcaaagtctggactcaatctcatagccacaaactctctccattgctgtaaatcaattatgccttcataaagttttggtggcttcttaagaagttggggagccacatctttgaatttaaaaataccatatgttaggggatttttccaaatagtccacctctctcaacctttggaaattgttaatttcctatgtgtcttcggtatattgaacgtggcctgacaaattaaccatcatagttataagtacgaattacaatcaatagtgaagaactcgaataataaaattaattttacctttatgtcatcctataatttgtttttaatatcctgactcacttaaggccacgatatgtctcgaagtggaacattcattcacacccaagttccaatttgggtaaccttttgttatcccaaatttt

SEQ ID NO: 220646 - DNA, 2827 bp, Cannabis indica
ctcttgctcttcaatctcgttcatctcttgggtattggagtacgttattttattaatacaactatttacttgttaaatcacacaccatctgttttacttaaccttaagtcttcttttgagttgttgtataacaggttaccttcttatgatcatctccgtacctttggttgccttgcctatgctttcacgttggacagctcaaggcacaaattttctctgagatctcaggcttgtgcattcattggatacccagtaggtatgaaagcttataccctacttgaccttaaaacacatcaaatatttcactatagagatgttatttttatgaacatatttttttctcttaaaaatacatgttctaatgataatattgatgcggtttttttttttttttctaacgctaacggttcatctagtagtctttcacatgctcctctcaaagttgcggtacctgggcctatacaccctccaccgctgcccgaacatgtggccactccagccattactcctgtcgacatacaaccaccacccgcagctattccagcccctccaagtggccccaacatcaccaaaaagtttggacggacgatcatccgtccacctcatctccaagactacatttgtgagttttctacctcacatcccatttcaaatttcatctcttattacaaattttcttctaagttttgtgctgtcattttaagtgcctatttggtttctgaaccaacttcttattcccaagcttctaaatttcccgtatgggtaaaagctatggatacagaaactgttgcacttatagccaataaaacttggacaattgtctatcttcctgctggccaccatttcattggctgcaaatgggtatataaaataaaaataaaatataatgcctaaggtgaaattgaaaagtttaaaactcgctaagtagctaaagagtactcccaataatttgggatagattatctttatcaaatggacattaacaatgctttcctccatggtgatctaaatgaggaagtttatatggcacttcctcacggttacaaacaccaaggagaccttcctcccaatattgtatgcaaattacataaaagcatctatggtctcaaataagcctcccgacaatagtatgccaaacttagctctactttggtaagtgaaggaacaatcctcttcagatcactctctttttattagatcttctaaccacacctttctttttgaaataaaattgcaattttgaaataaaattgagattaggctagttttttcgttttttttttcttagttggataagcccaaatacaagccatcttaaatttgtaagtggacaaattcaccaacctttgatctaaattgtccaaacgtgaaataattggcatttctatgtgggcccaacacctaatgatggcatcctttgaagtctattatagccacgagttactgaagtagggcccataatccactagatttgctgttgactgggcccacaaacggtttcgtttcgttagcaagtcaatcacatcaaagcccacctttgggttgggcccacatatgttaatgcacaaaaacgtacaaaaccaataatttactatttactctaattattatcaatgtgaaatactcaaaaacacatttattattttttatttttcgaaaactgtttaccatattgtgtgatacagaaagacattagagtacaaatcaaaatgtaccattttattttttttatcaaacttcaaaaatgtctatattaaattccaaatccagctcataaatggtacttgcttagacttctaacattattttaatttacctttctattattttttcttttatttttcactaagtaagattacaaatacaaaagataaaacaatggtctaagttggtatttgtccttaggaatctattcaaattaattggtaatttagggctcacgtgtaaaattgtaagaaaaaaaaaagtgtacttatgctataattagtagcaaagatagctttctttgaaaagttgataatatgttaacttggaaaatccaaagcaatggaaaagtaattaattcttataatcttaattcttattaaaatattgtgaaatggttaaaaaaaacttttaaaattaggaagtaatttattttagaataaataattttttttttttatcttcaatgatatttgtagagtttggtctcttagattattttttcgaaaaaaaatctatgtgtatccaggacgaacccaattgttttaatgtgggggttatatgtgtatcaatattttttagaactaatctttcaacgtttaaaattattatacttaataactgttagtttatgttaattaaatatatcttcatttcatactattattataggccatttagatttgtgatcatatcaataaattattttaaataattaacaaaactcaacccaaaatagcatatttgcaataattactaagttaggttaattagtattctatttaagaattttgacaggtcagaaatcctcttttaaaactttcagaatatagtgtactacgtgttcgaaagatataatttgataaatattaaagtttagagaatataattttatacataaataattaatgaattataaaattaaataaaattagataaatattcttaaatctaacaattttaataattcaaaaaaataaaaattaaagtgacataatttagtacacgacaacaaatttaatacaaaaattctaattgttctaattagaaagataaaaatatatatttttagctcaacacaaaagtcattttcaaaattgtcatattacaaggtttttttctt

SEQ ID NO: 220647 - DNA, 1838 bp, Cannabis indica
cgacattttggttgttggtcaccgttcattgttgtatcatttgttccaaagcattgagcttaggattattgacctatccttcctcaccatggctagcttgggggaggttattttgatgtcccccattgatattatggttattatttgccactggtgggattggatttttcccttctattcaaatgttccctcaaatcaagctgtctttgattgaggtgttctcgcaaatcacggccttcttgcttcccttggagaacggttgttgtggcgtcattcataattgcggagtgcattattatgaacactaatggtgcgacttttagagtcagaccgaccactatccttggcaaagctcactattctttgttgttgtagatgataaggagagtgtggggaccgcttgaagtatggctcggagtaggacgtcaaagtagtgtctgattcggacacataactattttcttgggtaagttagagccttgggggcgtcctttgtttttgcccacgatatgtgagcctctaacgagtgcgatcttcgcgaggtgcgatgcgtcgcctatgcctcctaggtggttgagcatgtggcgcattaccactggaggcggaccgccttggttcttgcagagtggtaccaattgacggatcggggtaccttataggtgacggcatcgctcgaatcggggaaggttagtctctcctttcttctccaaccatgttattattttcacagttaggccttggaggaacagtttgggtcccatgagttccatgaccacctccatgtaatggtacatgggtttcttatgcatttggtaaaggttggtggttccccctccttgatggattattcatggccacatcttctctccttgtgcatccctttcttctcctaggtagagaaggatttcttggtacaggggttggtccccatgcatttgggtttgctcttggagctctctattgtggcataagctttctaccaattggacgcgcataatctcattttcctggaacacctcatgcataggtataaacctgactagtgggcgctccctagatggggatgaggaactctcacaatcttgaacttgcctctcatcttctgacacaggtggcatggggtgctttcttggcgcctgagattctctctccatgtgattgtggagggacaaaggttccttcgctatggggttgattaatttcccttggggctttgagtatctcctcctaattgttcatcctcgtaccaaaaccattgttgtagaaaaaaaaattgatgagtttttcaaggaaaaaccaatcagatttttacagcggcattctcaatgaaagtagtaaactgttgacgcggtatttcgttaagtgatctaaaaagatcgtaaaataaagagaaccacggtgaacttaaatctaagatgccacctaaatttttttgttttttttactttcttcatatttatgtatagatttaaaaaataaaaatatctaaaaataactcacaaaaataaacgagtctatattacctaattaatatatactataccatgataatatttttacaaacaccttgaatttagtaatgaaatacgagatttccagcctaagaaagaatttaaaaaatcattcgaagactatttttctcgtcgttgaacaattataccagattttattttttaaaagggaaaaatgtacgaggttttaacctgacaggctggcattagagttcaattatttattttagtttttttttggaacaattatttattttagtttaatttctgtttctctttctataagctaaacctattcgaatacagattctcaaaaaaaaaaaaaaa

SEQ ID NO: 220648 - DNA, 3003 bp, Cannabis indica
gtatccgagggacgtcttcaccaacacaaaacaagcaaaaaagaactgaattaactcaaagcatgaccaaaagtaagatagtcacaatatttttacttttagtcacaaattttattgtgattaaaagtaatattttttgtagtataatacatttagcggcgaactttttagtcacaacataagaatgataattaataatagtcacaaactttttttttatttttaatcacaaattttagcactaattttttgatcggtctcgagctttgattgtcatgttgaacgacagaaaaaggccattttataatagtggccagcaggcaataactgtggtaatgctaagcatggttcctaataggaataagatcatcatcaaaggtgggatgaggagctttttctttttctttattaagtttgtatgaaataaataataatatataaatcaatcttattaattaattaaaatatgacaatattgccactatatgtaaactaaataaattataataatgacagaaacacaagtaaatattatccataattaaaaacaaaaacacattataataaattcatcaaagtaccaaagcatggagtgatcatatacatatatatagtattacatatatatatatatatatatgtcttcattaagtaaatatatagctagtaatgaagagcataaacattatattgaactacagcatctccagtagaagtgtcaaatgagtaagtactagcatgagcatagccatttgcaaacctaaaaagaccacttcctccaatcacaggcatttctctaaccttatcaacacttggtttctaccaagaatggtgagagtgctcccattgtatttcccttgaattatatgaaaattcatagccataactagggcaccatcagtttgtgaagctaacccataaaacccttgagcttttccaagcaactttgagcttagttctggcccttctgtcaatgcattgtctatcatgctaataaacccgaacccatttttcgatgtgtttttcggtggtctgactattgccatcgcgctagggttttttccgctgtatatgtcgtgccagtagaaccggaagtggcttaacttttggttttttagccctagaagcttcctatccatggctttgacgaaaccatcttcggcttttccaagggcgaaaactagggttagggttagaaggaaagagatgattgtgagagctggtgatgccatggttttgagatttagagaaaaagtagtaattaatgagattaattatgagatttatcctactatagtttacgtatatttatacatggccgtataagttgaggtttcttagttttgaagattattatactatacattctattagtgaccatatatatttagctttggtcttaatcatgtttttgacaaagctgcagaagagtgttatgtgtaagtacgtatattatattttatgttcattttattataaaatattatatatatgtatataataatgttcatcatgaaaacttactgaagacaactctacatcacacgcaatgttcaatttaattgacaataaaagaatcacaaatgatttcatgaagattcaaatttgtgcatgcgtgagtgtcatgattatatattatatatatacacacactacattagtgtgttatttttagtcacaacatatattttttgtgactaaatatgacttttacaataaatgtcacttttaccagcatagtttgttactgcgctggtaaaagtttttaccagcgcatttcgcaaactgcgctggcaaataggttaaaattttaccagcgtacatttacaatggctaaaatctaacttttatcagcgcatttacgcgcagcacttttcattttatgctggcaaacgttctaataccaacattaatttgccaatccctttttgccaacacatcacaagtaaattctattttaccagcgcaataccatcttttgccagcacaaaaatgtactggcaaaaatgacatttcttttagttttagtcacaacaaaaaattatttgtgactaaaatatagcatttagacacaaattatcactaatttagttttagtcataacaagtactgtaactaaaaatacatttagtcacaataaattatttgtggctgatatatttagccacggatcttttagtcacaacataaaaatattaataatctatatttaatcacaagttttgttgtgactaaaagtaaaattttttgtagtgtattatataagataggatcagtgtagtgatctcattattatatatcagactacctgtctcaataagggtgaccttgaatttttgttacaaattaattatcaatcattagtggagtttgaatattttaaatattaaatgtgctgcgatcgaatagatgaataatcaattattttatctgttttgtttgttattaggcatatttaaaatttttggaggcgttcaattactaccgttatgctgccaaaagttcgatagaattaggatcaaatttgatatattatatggtattttgtatagggtccactagctcaaccaccttcaagacatgatatgttgaaggaaaaaggttcaatgccttgtcaaaaaggcggtagagatcaagcagatctataattcacactagagatcatggcactaatccccaagtcacttaaatggatggttaaagaatttttgagggtcaaggatacacatgatataatcccaatttcaatttttaatgtataacaatgaaggattgaattttggaactctcaagaattttttaaaactttaccattacactaaagcattagaaatatcattttgataataattaaattacatatatataggagccctgaaatttaatgttgccgtagactccatataccttaagaccggcccagtatcccactaacccacttttaacattcacatacaaaagataatatttattcccacctattttccatttagacaggaaatt

SEQ ID NO: 220649 - DNA, 1835 bp, Cannabis indica
aaggcaccaataatgatgctaaaattattgattatttaggcacacttccacatctcaatgaggtttgttttttatatggttatcaattttttattgttttcttatgtgtttatctttatgtgattgttttatagttttttaactgttgtttttctattttttaatgtttaattcaaaaactagtcaagaagggtgatgatgatattgttgatgttggtgctaccattacgtccggtgttgaggttgtgcagaagatggtaaatttttgttttgaatgtaattcttttttattgatttattttagtgttgttttgccaagctttgatttttaaacaactctatttattttgtttgtaaaaagatggtatcctctacccctgttgttggtggttctgcaaatgaggatgtgtgccaaaaacatgatcttcaaaatggttatttttcaagagactcctatattacgtcctgagaagaggaaaagaaaggactaactttgaagtctccattcatggagcttacttctggtgatactaaatcaagttcaacatctatttggcctgatgtgtcccaatttaagatgtttaaatatgttgattgcttgtgcccgttagatgataaaattggtgaacatgtggatccctaattggagtctcagtttaactttcggcctggtgaaggtccaagaaaaaagaaatcaacatatgttcttctgttgtttattattatatttcattttctattaatcaagtttattgttatgtaatatagtctttattttattttctagcattacaactaatatatgttgcaagggtaaggacaaaatatctccaccatttcgttttggtgttgagaacgttaacagcaagatatggttccacgaccttcgttaccctaataacttcctaacttcgtttgtaagttttttactgttgttttgtagttgtttttatttcaaaatttacattgtattatttaagctaccccttttattgttcttatctcaccacatagacatcattttctattttctgtgtaagaaaaataagtatgccaaggagccaaaactcaaagttacaacaatcgatttcctatttaacgctagtataagaatgtgtaagataggtttattgccaacaagaatgatatctctattttgtcccttgaccattctattgcgtagtatacctgaggtagaaagatgtcatgtagcactccttggcacttgttcgatcacgttgttatgcctattaatgtgcaattgcaggatcactggtgttattccaatttattctcacctgacataacacctccacatgaccaaaagaaaaagacacatgggagacaagtcaacactaaccgaccagggtagtgtcgtgagctccctgacccttaagatctcagggttgaaagatggactcaaacaagaagagtatagagacttacaagatccacatcttcaaggttgtgaaacaagttcatcatgatattgaaatctccagcagagatgcatggatcatgaatagtttcatcaacaaagaaagagaataatacatataaccaagaccctggctagacctctagctggctagcaaagaatgatagctcatatgccgggtagcctccatatatggctgatcgaccaaaacgtttattacaccctaacaacctaaatgagatgaatattttctcatggactttctagaagactccaaatcatccccatcactcctacaacttcagaacaaatcaaaccacccataaaaatagggattcttcaccaacaagtgacaaccatatttcttagggatagtttgttatcctttttatatttc

SEQ ID NO: 220650 - DNA, 2651 bp, Cannabis indica
aactagataacaccattcaatgtaaacctggttaattcatggaattaaattgagttgttttaaggaaaaaggacctgaagctctatcccctatcagctatctgtcttaataatccaatcaattttcaacttcagaaacacaatcctactgagggaatcaaccatggataatattccagagaatcaagtgtacaatgatcataatactatcaactagcttacaatgtatcatgaatcttcacttgtataactaactgaagaaaaaaacaccatagttaaatgatccactcttaagctactggggcatgttttttcatggtgttcacttgtgtctttgcttctcaactgaaaaaattacagtaagaaaagaactaaacctctcatatattacaaacaaaccatcaatggccccagtttattgtactcacaggggcaaaatacaagattgataaagaaaaagaaaagtacatactcaattcgaactcggctgccgctatttgaaacataacgagtgacattgtcatgtacccaactctcagcagctttctttgaagagttcaagcttttaagcatggtatttggaatgccaacggtgacacgaatattagagccagaaagagcttcaaggacaagtgggtcagcgtcaaagagcttgactttggtgaagttgtttgactttagaagctccaccacctttgggggtggaagagggtgggaggccatggtaccccagttaactcccagtgctgtggccttgtaagaggagccctgaaagccatagagggtcaagaaaaggaggatgaacaggcaacgatttgggtgcattagagagaagtagaagaagaagaagagtgaggagggtttttggtgtaggagaaagacaagagttagtgcgggaaagcttttatggggttgtttcttgtgtttgttgttatgttgaaaatgatttaaggttacagctaagctaaggaacagtgttgtgttggctttgatttcattctctgaaactcttctcagctactttcctatacatttcccatttgggacatatggtatgggcttgtttgtgcttccacacaaataagtgtgtgtgtgtgtttttgttcgaataagggcccattctaataccccatccattcatttgaagttgtattatctggtataatatccctatcccagaagaatgtacaatacatcatgttttaacactaaaaagcttacatattgaggttacattacatttagtcgtaccctttttttttatagaaactcactattattataaatcagaaattatttactacaaaaaaaaaaactaataaaaaaaaataaaataagattgagaaatctctcacgtctaacgaatataatagaatttctattaagaatattctataatttctaatttattatatataaaaaaattaggacccaatttaagctagttataattatattttaataaaatatatacatatattttataaatttatttatgtaaaattaataattttatttcaaattgtaatacatgtataaatatcatatttatttaaaagtaatattattataatatagtattaaaatttatttatttttattgttattacattgatattttttttttggtatttttgacttttttagtgtcaaatctatttattttttgatttcctattatattcttaaataaaagttctctattttcatcctctataacatattttactaaattcatgacactgttttactctaaaccttggttagcactttttttatggaactatttgtttattggatacaaaaacctattccccttaaatagttagagtttgttgtagatttagtgggggaattttgtgacgtcgtaaatagaataagtatgtgcactataaatttacatttttttacatacatttttgagtaagtacttatttagaatatttccaataatgatcatttgatatttctttaatttgaaattatattttacaaatctatttttgctcatatgtaatacgtaattaaatttgaattttaaaaatcagcattattaaaaatataccgctaaatattaaataatgtgacgacccacttattataatgttcacagttttttttcttgatggaacataagttgggcaagaaaaaaaatggggttaggaaacacctataatggttcatggaattagaaataagcttatgccctctaggaaggttagtttagtataggcaatttgttacgcatccaacattgtcatgggcatatcccaaaataagaaaacacgtaaaagaatatacaattgaattgagttttgatgaaataaaagattttacaagagaaaaaaaccacgaactgcaaagattttaaaaacataattttatgcaacaatgttatttgcctacaactgtgtgatgtgtattatcattttcagcaaggtctcattaattaaaagataaaaatgaagtacttcgtcagcgaaaacaaatttggtcttgtaaccatccaacgctttaacttattctcgtttatataagtgtattatattgcagatctagaactaatagtaaactaaaatgaaagaaatttagcaactgattgagagacagaatcagaagcttaaatcaaacttggatgttcgaactgcaaaa

SEQ ID NO: 220651 - DNA, 2060 bp, Cannabis indica
agatcctggtaaaataaattccaacagtcaccacatgtcgctaactacaacaaggcaaagaaacaacaatcaaaagacattaatattgcaaaatgtgttgacaacatatcgctacatgtcgctaactacaacaagacagaaagaaaaataatcaaaagataacaaaatcgcaaatgatatcgataacatatcgctacaagtggccaagggttttaacttccaataacttaactaatatcgcaaaatgttgcaaattatgtcgaataatgtcgctaaccgttagagcttcctagtctaaccaaactatgtcgacaaaaatcgctaatatgtagagaaatgtcgctaaaagacaaataactaggaagaccttgcaatatagtaagacctcgcgaacaatttcgctaaatgtcaataatctgtgaaaaaactaggagttggacagacatcaatgaaaatcaacccaaaacacaaaaatcaaacctaatccaaataaattttcttgcaattaaccacaaacaacaacacaaatctaaagacccatttaaaatcacacaaaagttcagaaacataccttttttttgtcgattttgggggtggatttcacgatttttttttttgttgtttctagtgtgtttttgttgagggtttagagatattgacttcgtccagtttagggatgggcaggcaaatgatggtggttgtgggtttattctggtggatttggtaagagttagagaaagaggagagttggaagagagaaagagagagagttaaatgagagagtatttgaataaggaggatattttggagtttaaggagttttggagtattaaagtcctatgcattttaaagtgggatactaaaagaccatgcacccaatttaagcatggattgtcaaatttcccttctttgtaagggaaatttgataatctataacctatataaaagtgagaatgtctttttgggctatcactaattgaattacacaattagctttcactatatattcaattacaaaaaaattaaactaggtgttgtgggaggaatttggacaacaccgaaatttgtaggagtatttaatgctagtaagaacacacaaataaaacttgcgaatactcacttagagtagcgagtactcaaaaaattggctactatcaaatagaataaaaagcaaaaaataacaagaatacacagaaaatatagtggttcagtcaaatcttggtttgtttagtccactgttgcaaagattttcagcttattttatttgatttgaatcactgctttatatagaaagcaagtgtccctttagttttacataactgatcggttttaaaaccattttacaataaatgagagtattaaatcagaataaacgtcaaagaataaatgaagaacaatttaattcgttcttgctttaagtgtggcaacgtatggaacttgcttagcgcgagttgtctgttcgtattctcgcacaagcttccaggcttttggtgcattttgtatctgctaagtggctcatgggcctatcgtttgaatgtctgcgttcaactaagatcacatagacgtacatctcacttgttcaaaacgtgggacatgcgagtccctaacgagtcgtcaaacacgatcaatcattcagactgatctttatgtaaagaagcgatatttactagttactggagaggactacctagtcgccgcatatgttttgatacatacacgacttgtattgaatcctcttggtcctgcttgtctttgactatgcaagggatagtatgcgactatactctgtcaaggccacatcatctcacaagttctgatcaagcgaggttaactctttgagagtcgttaacaggtcatcctttcctcggggattggatccatgtgttaattttataagagaccctactagtttaggcgttccacagtgttttcataattactgtgcaacctttgctaaacaaagagtttatcataaagtgataaaatttaaactttaataaataaacataaattgtattatatttataaaatttgggatcctttttttttttaatttttta

SEQ ID NO: 220652 - DNA, 1736 bp, Cannabis indica
attatatatatatatatatatatatatatatgattgagtagtgaatagtgaatactgatggaggactaccatttaattgggttcagctttcccaacctccccgtccacagtggcatttttttttttggagagagttaggtgacctgccaactaaaatgcattggggaggattatattttaccacgatgtttggtacaatcaaagaaaagaaaagaaaaattatatgaaaaaaaaaaactgtaaaatttaaatacacataattaattactcaaaaatatgtacagtaaaatgtaaaattggagtggaaaatgatagcaggaatagaggtggactcccaagccaggcacgattattgatattagacactaataatatttagtattttttataattggagatttataattagttagtgatattctttaaaaattatttctgatacttaattataccaataacagtatgataccgagaaaagaattaggtaccaatgatatcttttagcaattcttaaaagaaatccatgtacctagcagtcttatgaagtgtaatattgttgttggtacaattaaatatcaaatcttaatcccataataaagttttagtaattgaataaatgttatgtgtgattttaataaaaagaatataaaaggccaccacttattctaatttaataaaatttataaaaagtcactaattaattatagagcttcatctcatagcagtagtggaactcagcattttagtttttcataaaaatagtagatagcgacaacaagtttttttaagagaaatactaaaggacaatatgattcctacacctttgtataatttaatatcaaatctcatttattttattttaataaaaattataaaaatttagcatattaggttgcgtcccataatgctgcccggtccattttggaatgggaagtagcaccctttattgctactacaaattgatattttcttctttctggttttgttttctatgatgttttggttttcatgaaaagagaaaaagaatcccaagtggggttggaaaaattaggggtgagaacatgaatctcaaattaattatagatatagataaggaagataaagataatttatgattataaataccgaagctctctctattagttctctctttgtgtataccgggactttttatttgtttgattttgttttttgttattttttgggtaagaagagagcaaaataaatttcgatacaatacacagacacaatacaaattttatgggttagaatcagaaaaatttactgcaggtcgaaaacaaatcgacataacttgacacgaaataaaaattgatcaaacacgacacgattcgtttaacacgaatatgacacatttgacgcaattttttaaataaaatataattatgtaaattatatgtttagtgattcaatattaaattaaaaatttaaatttattatttttaaaaaagaaattaaaaatattttttattatatctacacaaatgtctataaattttttaatggaacttaaatttatcatttttctaccacttcagtttagtaatagcaaaacacgttatagtgggtcaacaagaatatgatacgattttttacaggttggattaggattgagaaaattaaacacgattcaaaaatgggtcaacatgcctaacacgaatgtagaagatcagatcacataaattatgacaaaaatacgacacgatgatacgttttgc

SEQ ID NO: 220653 - DNA, 4340 bp, Cannabis indica
tcatatgtcggtacagacttccataaaaaaattgtttcaaacaatgggaaacaatttgttagccaaatgttcatagatttctgtacaacacatggtatatttaagagcttctcaacaatggcacacccctaaacaaatggacaagtcgaagcagtcaacaagacattgaaagacaccaagaaaaaaaaggctcgaagaagctaaaaggaactgtccgaaggagctacgaaaagaactatgtcgtatagaacaactaaaagaatgataattaggcaaacacctttttccatggcctatggctatgaggcaatgctaccagtggagctagaactcccatcccataaaagattaacttacgaccaagagactaaccatgccctcttggcagaatcacttgatgaagataaagaaaaaagagattcatcaaacgtaaagctactagcccaccagcaaaaggttgttcaatccttcaacaaacaagtgagagaaataagtttttgtgagagatatggtccttagaagagtgttcctgaacataaaagacaatgcagttggtgtgcttagacctaattgggaaggaccatatcaagtaactaaagctacaaaatctagagcatactaacttagtcggttgatgaaaacatggaagtagtccaagtaccaaggtactagaatggtgaacacctaagaaaatactaccaataagtgcacaaggttcgatgaccccacaagatgcacgatgctcgaacacttactcttaagtgggtggccttctgagtggacctcactcaaaggtttggaaaacaattggtactcaggtcagatgaccacttttaaagtacattatgttcacaaatcattactcttgaacaatgtcttttcgacagaatgtattgttcaattgctttatgttttaatagctaaaagatttgttagataatctaatagctttatattcaataaatttacgttactacagtaacaacatatatcaaccaataaatgaataaagattttaatcattcaaattgtgtctatctttgtacatttttgcaaaatatggcaagttatgtaattaccaaaaaatacgtacaaagggtttgcctaaacctaatagccagacagacaaaattaaacttgtgaaatgcaagtgactatgtgtcaaacttctactcggtaactttggggtaaactatacacctatacaggcattggtaaacaacaagctcgaagaaaaaaataaagaaaaacattctaacttaagagaaaatactaattttaaaataacaaagtaggataagtctaggattaaaagctacccattcaaaaaattttctaaacaaaatgaaatttttttccaagttcaaaagccgcttggtcgaccatattgtacttaacaataggcccgtaagttgaattggtgagaaaagttagaaaaatttataatgcaggagttccaggctctttgtaagggtcgggcacatcttcaacaactagagcctcatcctcttggatggtggaagtgttgttgttatccatctcagtttcttccttggattttttcacctcataaaaactaagataatcatgtttgttctccttgggataatcaaagtttgcctctagatttgccttcgaaaactcatagaagacatccaaagcagctaattcaaagcactccacctccttttgaagtgcctctcgtttagcattagaagttgtctgcttagattcaagagtctcttgtaagatctttttctcctcagtgaaatcattaactttggtttctaaatttgtgagaaaagtgcgaaggttttctctttcatcttgaagagaattcacttctttagacaatgcctcgatatctacctcaagctacactattgacgacatacctttaatctccttcctcaagtcttcaatgcgcttgttagcagcaaggattttcttaataacttctcccaactgaaaaatcttatgctcggcctcctttttaccatcctgtaactctttcttcaaatttctaatggtggttgtaacttttaaggcagcagatttggctttggagtaagtgtattccatcatcagattaagatacacaataaaagaggattaaaacatgtatggggtaaagcttgtatagaaaaacaaaaggaaaagtacttactcgagtggcctcctttagcattcttcccatgagtagctccaaagacataacctctgccccaaccaactaatttttcatctcgagtagaacattctcctcgtaaaatgtgagcatctccttatcctttttagtctttggattcaacacaggaggagtggctagtagcttgggttgtttgggcccttttccgttgtccctttagaacctttgggtggagcagtagaagctttagacttggcattctttttggccaagggaatagagtcgaggaccacgaccttgagagcatctgaggacacagtaatcaaactcctctcactggtcagctggggagtcttagtgttcacgacaatgctttttggcactatatcgtccaccttaggacgtttaacttttggctcgaggaattactcgacctttttaaagtgtacaacatccattgtcacatgactacccaaaaataaaaggagcacccttctaaacaagcaaagaaggagcatccttctgaacaagtaaagacaaacaaagctaagtaaaaatggtctaccctgcccgtgtacaagagaacccttctgaacaagtaaagaaggagcatcctaatcataatagtcatcctctgctttccctttccttccacctgagtggaaggatgagcaacctcttcaagaccatctttgatcctaaaaggctactcaacggttacttggtcacttttgggagccttcttctttggagtttcctgctcaggtgcaaactcttctctctgtttggacacaaccccctcggtcacttgctcgctctattggtcttcatcagacgaataacgcttgtacctagaaaaatttgccttagtagccagtagcaaaatattacaagcctccgtagaaagttggagtattttctgagccctcttactatgatccagggtgaaagaaggccaatagaaagaaggatatggtgctgaaagctggaatggtcggtccctatgttcttgacaaagtaatagtcctccacatagccacccattttggacatgtcggtgttcgtggtaccagaaccacttttctttgatctgggagaagtagaagtactaatatctattttgcttaggactagactttaactaaaaaggccaattggtgtcaagggcgaacggtggatcctatccttaagaatcatataggacaaacttgacatataggtactttatgtccttagaagtcaactgagttagactgatgtggtaataatttgcaatctccttgaagtatggatgcaatggaaacaacaccctgcttagcatgtggtcccaaccatgcataaaatcatccctagggtttttttcctgtttcccgggactggaaggaattgagtttcccaagaagaccatccttgtagagatagaccaatcttttgtaagttaggatggatggcggtgaaatccaccgagaacccctcaaacccctattgtttacaggtcaggccttagtgtaatcctcttcaacatagtcctagtaagctaccaagacttcaccatcctcagagataggctctccatccccattgaagctaccaaaaggaagcacctaaacttcttcctcttcttcctttccttctccctcagcaacgagaggggtagcaagaataacctcaccttagtcgtacacctctttgacttaaaagtgcccatcaacaatctttccttccccaatcgtaggtctagcttagtttgcaccaattgtagcaaacaatcaagccaagtgtggattaatctctgaagctctactcattgtcttgtttgtttatgctatcattctatgcttgggtagaggtttaaattcaatagtgtgccttacaacatttatagcaaactcagcaatagtagctcccttagtagacaaagttgggcgggcttcttgtagagtgtcagcaaccccaagctggaccttgtacatcaaagaagcaggtttaatgcctccaacctttctttaagtcctagatgaaacgcccatacccttctccacgtatttggttagggtactggtgatgttacacctcaggctcctgagatggtgtgttcacggtactcacttcccaatcttcaaagctagaatttgaaaggttgttactggatgaagatcaatttgcatagaggtgaggatgatctttgtaa

SEQ ID NO: 220654 - DNA, 3935 bp, Cannabis indica
ttaccaaacaaaaatcacaaaatcatttattcctatattcaccttttattaaccttttgtgcttatttttctactaacgtttttgtccataatcacctccttgtggaatcgaccgcccgatctatactacaatcaccgctagtggaagtcatatttttaggcgtacaatcacttccttaggcccacatgcctcaggtcgacttgagtcaatcacaactgctagaaatcccacgcacccactgcatagaagatctctagccttcaaagttgtaattcttagtattcgataaccctaaactgatccgacataaacaaatggttcctcatcttctggttgaaagattaccattttttgttcacaatcaatactggctgagtatttggatagaaaatccatccggagtataatgtcaaactcaaccaacgataattctaccaaatcaacactcaattccttatcttcaatcttaattggcacatatctgacccaccttctggagatagctagctctccactaggtaatagagttccaaaccccacctctaaggtatcactaggcctacccaactaattaactactctcaatgctacatatgagtgtgtagctccagagtcgaataaaatagtataagtaaagttgttaacaagaagctaacctgtaactactgatggactggctgcagcatccgcttgcgtgatagtaaatactcacgccgaagcaggcttaacttcttgtttaggttcttctttctttaattgaggacagtctttcttaaggtgtccaaccaacccacactaaaaacaagctctccgattacactccccaaggtgatgttttttgcaacgcagacactcaagataggagtaagtctaacgtcctcatttggcttggttcccacggaatttcttattttgacccgaaccaccaggattcaggaatgttctcttcttctgctcggtagtagaaacccagaaggcatgtgaacgttcagagaaaataatcacagtagttatataggagaaactaaccttctgtgtaattatctcaaagatcactcttgaaaatcctcaagctcttgaaatcgtcttcgacaaacaagaattcgaaccttcagagaatttttttaagtttgaattttcgggcaagaaagtgaagttagaaaatgacagggaaaagaatgagaattgatttgtgtatgagggggttaaatactaacagttattattcattgggatgtagacacgtggtaagagaatgcttaaggtctcccaatccaacggtctccaaagagcacgcctgcacataccgtggagggtcttgatgatgtggcatctcagagaaataaaataataattacaactatcttttcaaaaccctcgacaagataaccaagagttaccatcttgtgacaataactcactagcctctctctgatagtttacctaatgacacaactgtcaatcgcaaaactaagagcatgtgttatagtgcgaattttttgcctaaaaactcgagatcagtctcctgtagaattgacacgtggatccaatcctcaagggatggatgagttgttaattaatgactctccaagagttaaccacgcttgaacaaaactcgcgagatgatgcaaccttgactgagtctagtcgcatactttgccttacgtagtgtagtataagcaggaccgagaggattcatataagtcgcacatatatcgaaatatatgcgatgactaagtattcttctcctgtgactaggtaaagattgcttctttacattacgattagtctgaatgacaaaaagtgtttgacgactctatagggactcgcatgtcccacgttatcaacacaagatgtcaaataaagtgacttagatagaatgcaaacatcctaatggtaggctcattagcccttttacgaatatagaatgcacctaaagcatgtcagcttgtgcgaaaatataaaacacacctaaaacctgtgagcttgtgcgagaatatgaacaggtagcttgcacccgataggtcgcagttgctgcacttattattagaacaaattaaaatgttcttcatttattcttttacatttattctgatttgatattgttatttattgtaaaaaggttctataaccgatcagttatgtaaatttgaaaggacacttgcgttttatataaaggagtgatccaagttgaataactaaatagaaatcatttgcaatagtggactaagaagaccgtgatctgactgaaccctatattctcttgtgttctttgtactttccagtttttctgttattttggtagtctctcctcgaaatactcgctactctaagtgagtgttcgtagttttcttgtttattttatctattatccatacataatttggtgttgtcaaaattcctccgataatagtaggtttgtgtaattttagctcctggaccttgtattaggttgttccatgtctttatggtacagaatactgaaagatagtgagttaaattcaagttattgaagtccaaacttccatctcggagatcctggaatcaacctaggcgcagggctagggtcccctcccaagttgactgctatgactcagatctactcaactccgtgatgtcatccttcatgccacgtgttaaatatttatgtctacgtcaccagagaaagtttctgggttaacatttgccccaaagtcaatttcacacttgagtggagttgacttgatgacgtgaaccaagcccgtttcgccccaaaaaactagatgggcattaattttgacaatcttagacacttctatctattctgaaagtattcccagctaaattaggattttaacactgttgattagtccttagaaattttgaaaataaattaacaatgaaaaagaggaaaaatcatatctttttttctacttatcttttatctttttctttgaaaaattgagattttctcacttgttgtcgtgacattaggattaaatggattagaatcttaatcctagttgaacatgccattcagaattagagagagaaaggaagaagagaaaagactttttggccttttatttatcatttatcttttttctttaatctctctaatgttttttttaatctcaatagcattaggaattgttgttactttataaatttttattcatattcctagttgtataggaatttcaaaatacacttaaaaaagaaaaagaaaaagatatgattatctatttttcttatcatttacctctttcttagaaagctttaatcgaccaagcgctccatgcgcttttcggccgagatacacattccatccgttctccgaagatggcggatccgctctatgagcttctcttgcgccttgaacatgttgcaaaactcgcgcaagtgggcttcggtgagctgtaccccttcagttattctggcaggggtgggcgcatcttctcatttttcttccaaaaacgcctacaactatgtcaagcgcactagcgcaccaagtaagaaaacagcgggctagctcgtgcaatcaacgaaaaaacccttcgccttagtaagctaagcaagcctgtttgaaagactataagtagctttagaattaggatattagattcaactataaataagtaaaatgagaaccaaaatgacgtcaaaaataattaatctgctaatcaattgctctacccaaaccaatcaaatatagttcattcatgtagttgtacaaaaactttctttttgtattggttccattataactttgatttgggattgtaatcctttaggattaagctattttgacatgttatgatcatttatctatacatttatctgtgtaagatcattagttagattttcttaaatttattttgcaaataaatttgtttgattgattctatatctataatgaactcatgggttcgttttcatgtctacttctatcact

SEQ ID NO: 220655 - DNA, 1898 bp, Cannabis indica
agagagagagagaattagggtttgggttttttgggtattgtgggcgttccctgacattaatggagtcgtgtgcgactgatagagaaggagatggatatttgtgtgtgtgagagagagagatttagggtttttaggaaagaagaagaagaagaaaaagaaaaaaaagaagtaagaaaaaaataatttttttttaaatattaaaattatttttttattaattttacgtggatcaataaaaaatttttacttgtgtgtgggcagtatattgtagcatttaattgaaatttttaaacgaaaaaggtaaaaagtaaaatagaataagaattcaataggttatacagttaaaattttaatttatgtaattaagtgtaaaaaataaatttcattttcatctagttttgccgtgaataaggaacaaatatgatttaagtaaaaaatttaaaaaacaaacaaacaatatagaaaactgtcctaatctggaccgcgtatagaagtctgcttactaacaagaaataacatatatgtacgtgtggaaataatcatacatggcggcctacggggtcgcctaaattatagatgtgttaatcaattaattatctttaattaattaacgaatttgtggtgggaatggacagtggagtcaaatgtacgtgttaattaattactaaacattttccccatccttttgaaaagtataatactaccaaactaattaatgaatattctttaataaaaacttcgtctataaatagatcaactgtctctaaggattattcaaataaatcatcataccataaattgatcttcctctctctctctcataataataataataataataacaattttgtccccgagaaatgaaggtaattatgcatggaaaaatatatgaggttaattaagcatagaattataattattagtatattaatgagcaaacaatcaatgatgtatttaaatattgtatgtatatatgtatacttttctgcagcaaaagataactgtgagtgtgcggatgagctgtggcaaatgcaggaccaaagccatgaaaattgctgcagttgaatcaggtgatcaatatatatatatatatataactttggaacagtatattatcataaattattaattagcattatacgtactctatatattaaaatatattaattaatgtatagaattaatttgataatgcaggagtaaactcagtacagatggcaggggacaaagatcaagtgatagtaattggagaagttgattcagttagattgactcgatctctaaggaagaagtttgggtctgcaaccttagttagtgtagaacaagtaaataattaagttaaccacattaagcctctcgataaccagagagacagcattattctgattaatattaattgctcatcaattaatctcaacattataataattaaaaatcaaaccaaaatgacaatgtataatcatacatgtaacagttgtggcgttcttcatccaaattttcatcatctgaataattttcattattaatttattattcggccaattgggttttttctgcctacttacttgcacaactttcaatgtcttaaattttcttgatcggaatgtagttttattatcggccaatttgatttttttaatttttaaattactacttttttttaaaaaaaaaaaaaattctaaattactacttattttgtttcagtaacgcagatgtctttgttttaatatctttctgtaacggattaatattgataaaagtccgattaatcccccttgaaaatattgtgaacataactttatagtgaagtagtacatttcactaatttttgtttaaaaaatatagggtaattctacaatagacaccccaaaattagatatatcaatgcaccccttaaa

SEQ ID NO: 220656 - DNA, 2245 bp, Cannabis indica
atacttacatgagaaacacacacaaacctctaacattcctcatgagaaatttacgcaagagaagttgctttggcaacatattgttttaatcaactcatttgaaatgaaagaaaaatttaaaattttatttttagtatgccaaatttaaacttaaaattatccaaatatatatataatttgaacatgaatttttatcatgaacttcatacatatttcttatttcatgggaatgatacaaaatcatatctacagaaaaacaacattagcctcacatgtttggtcttaatcaatttaaaaacaataaaaaaataaactttatcgaagcacaatgtctaaattccaaattaacataatacatatgcattaaaagatgtatagactttagttcttattttggctttacgcctgtgacaaatcacataaaggaaaaacaagcagtagtgataattccaacgaaaagaaaactataactaattctgtcacatgcatacatatgctaccgaaaacaccaagaaagtactagaatgcaaaattgattccaacaaatatactttaatggttttaatcttagaaacagatattatatacaatcataacttaagtatagttatatgaaatcaaacgacttcccatgcgacgatataatataacatcaatacaaaaagagaaacaatcatgatcaaaattgattccacttaatgttattatcgaagaacaaaatttataatcataaatggaaaatcaaaaccctaatttttaaaatttccaaattttttgaacataaatcttaaattctcaaaaaatcaatcaaaggtggttctgataccacttgatagttactttatcactcataaaatatgcaataataatattcaatttatagataaacatattacttataattgtaaatgtataactatagatctacaaaatacctttgttaactataaatcctcattaaaagatagaatgtaatttgtgaactaacatttgagagtttatctccatgattgatattaaaaaagaatccacaaaaatatttaattatcacacttgtcattgaatagttgacagctgttcttttttataaaggtttatagatgttatctcagttataggtaaataaataattaaaagaagggttatttttgtaaattcactatgaaaagcccaaacaattattctcttttttataaaggtttatagatatgaattatatgtgaactattatgaatgtggaatgaaataaaaaattaaacatgtataatggaaaggatttaaatacctccagttattgatccgcaaaatttgatttacaacaaaaaatcaaaaacaaacttaaaacgggtaatcgggcttccaagctctctcttactcactgttgactcaaaaatttggacagagatttttgagccacacctgattgctagattggcgagaatgaattgtaagtcaagtataaatagagagacacaacaatttatagtagtttactccctgttttactacagtaatagagctacgtctacttagagtttttattctcataggatggattacagaaaaatggctaagtctagatgctctaatttctagagagataaactagagagagatgctctaaccttatgactacttttctgagtttgaaaaatgagctagaggagctcttcttttataggtaaaggagatcctattaaatgtgaaaaaaaaaataatccaaaaaatatggaaggatacatttaggctatttttgaccgtagatgatgatctaacggtaaaaattaactctgaggttaatcgtcaatttttggagtatgggtcgcaacggcgggacctgctctgggaagttgtagcttaaatttgtaactcttggggtgaaatttggagttgatatcttaataattgcgattgaagtgtgacacttaacttgatagatcattaaaataacttgaaaactcaagttgaatcgcaccaatcagatcaatattgagtgagttatgcccattttactgaaggttgttcatggcctagtgcccaggttgacatgagtgggaaaacgtaccaaagatgtattttttgatgtttaagtgatattttgacatcacttagtccattggattctaataaaactgatcattagttctcagagatgttgttattcagcgaaaacgtgagactcaaaattgcctagttttcaagtgaatcaccttttcaaaaaataaaaaatatgaagttgtgaatt

SEQ ID NO: 220657 - DNA, 2547 bp, Cannabis indica
aacattaaatgttatttctgatctatattaataagtaagtctaattatattgaaatgagttttatttagggcataaaacccaagaccacggaccttataatatagcccttcctctgcttgatgccgtaggattttaagataccgctgacataggccccaatcgatctaaccttagactcgattagctcagcctcaaaagtaacactagggtcctgtagggtctttgatttacaaggcttaggagacatgatttcaaaatcaaggtcacttggttcaaaagcaacagtgacttcgagtaaaaatagtggtcttgcgagtggtatataacctaatattgtgggtacaggccaggctacgtctcgtaaaaaatgatgcttgcgcttaaaaatctcttgcaggaatcgcctgtaacgactggcagtcttttcttggttcgacttaatcagttggtctctaattctggcatcattcacttctaatttggaccgaggttggaaatttttgggtttatatggggaggctaagtgtttaggatattctgattctaaaaattctggagaataaacttctgaaccagattgggacatttctacaaaaaaagaagaatcccagttcatggatgaaatttattaaaccataggcttaaagaatatagtaaacctaaaacatgcctaaaccctaaaaattacccaaaaagcatgaaccctaattgataaactgaagggagtgacaaaatgcaagataatcataacccagaaaaactaaaacaaaaaaaaagaaaaaaaaagggtaatgagacacttactgtgtgaagtcgagtagtcaggtgttggaaaattctgtaaacgaagacgtgatgaacggtgtgatgaggtttttgaacacctggagtcaaagatcaactgtgaatagattcgcaggaagaatgtcaaagataaagatggcatgcaaggtctcagggaattgacatgaaattttttcagaaggcttgagtatttgaagaagatgaaaatggtggataaatggattcttaccgttttataccctgaatttagtaaccattagatcagaatacaaaagatccaatggataaaaatagaagagaactggaaaagatggttcattgatgctattgatgtgcattggaaccataaaactgccaaaatcaaatgcatgcacattttcaaaaagaattatgacaaatatacccttggtaattacttaaaaagcaccttttactaaaaagggactttttaagggtaattgttatacctgaaattcagctggtacctcagaaggcaacacgtgtcaatctcggggaatatgaaccaacaaatataatagcaattatattgataaatattaaatggaataactctttaaatgcgagaagtcggtagggtatatttataattcacaggctgcacagttttagcgagacaagtatataagaactattgacttacgtattaacgagaaactatttagtgtcagaagacataaccgcaaggaggacatcgataatatatagcgaggcatctacctcgcaatatgtagagatgtgttggcgaggcaaactggttgttagaacacttagcgtatgatatacattatactaactacgtgtaataacttgaaggacatggataacgaatagcgagacatccatctcactataggaaggcatactcctggtaaactccagctcgcggctagggttattgttgctattgagaacccccaagacatgattttccagtctgcaaggccttatggtcaaagagcagtccttaagttttctcagtacactggtgctcatgtccttggttggaagacttgtgaataaatcaagttgttcgtgcaccaagcgagatgcattttgtagtgtgtctgagtccacatcagcattgacccgttaaaagtagtttaaattacaactgtatgattttcaaataataattgtatttatttacgtggaacatgattatagcccataattttgggaaaatatcattgtgggacttgaatttgaatgtaattaactgccaacctatgttattataaatagggacagaatgtacgaaaaagggacgaaaaatccttgagagaaaaaagacaatactctgattatacagaaccctagttctgtatcaaaaaagtcttcataagattgactcgtggactatgcagagttaactagaaaaccatgtaaaaaacctggtgttatttctactttattattctttcttaaatttctgataatttctgggctaatactatcacgaaaataggcttattatcgttaaaaaaaatcagtgttaacagataatttcatagcgtatctatatcgtggaacatatagggcactctatataattgagagtgcattccaaatctatagcggtacaaggaggaattaattggttagggattttacttggtaaattctagatgtacttattggaagctcggttatataggcccatggtccccacactagttaagacaatactactggtaagacttagttaattaattttaattaat

SEQ ID NO: 220658 - DNA, 1551 bp, Cannabis indica
aagcttggtttgtagtagtggaagggttattataaatattatcaatatcatcctgcaaattcttaattttatttttaagattatctttatgctttctctaatttttcatattattaacacaagtatcttgatgactaaggaatgacttaagggaagaaatataatcattagtgttagtattagctacccaactgtctttgatgagttgaaaaaatttttgctccatgagccaatggtttccaaaaaggaaccttttattatgcttgcaaagatgagggctatggtgatattcaagcttaatggctctatggtcaaagccatataatggaagatggacaaagttagcatcaggaaaaataacatccaatgacttattaactataccccaatcgaggcgttcaagggtgctaccatgcttctaggtaaagcgattaccaacaaaaggcaggggacataaatcatatttagcaataaaattttgaaagttatgaatagcatggggaggggaaactagcactatttttatcattgaaacccaagtaatcattaaaatcccctgaaatgagccacggggaaaggggtgctacatcaaataattggtccaacaatgtccaagaattatttttactacaaacataagggtaaccatagaaacaagataagtgataatttatattagagtcaatagtaacatagcagtcaatttgatacaaggagtaggataaaatattaacattaacaacatcattccaaaaaaataatatgccccctccaaagcccttcctaggtacctcaaaatcattataaaaggacaacttagctttaattaaaatactactattacaactagtttaatcttcatcaaaaacgtaatttgaggtcgatgttgtttatccaggagggagagattttggaatgcttaggaactctcgaatccacaagcattccaacttataacactcagttttcaggacgaagttgctgagtcatctgttcatcagaatctaataaagatggaaccacaacaaagtcagaatttgaagatcgagctctctttagcatgctcctgacaaaagttcccacttgacagttctgccttgtgaaagaccttttagttccaaatatgtacattgtagaagctcgagtcttggcctgatgggcgcaaggggcagtcccctagtcttttctggatacataggacctttacctttataggtagaggttatcacactttaaatcatggcaggtctataaacaatgggacaagtaatagaactcatgacaggaacacaatggaataaagaaatgttgtctatctagacacaaacatttcttggagttgggttagtggagtacacagtggatgaggcattaaccaaagaagtgttggcaatacaaggaactaagtgttgggttttgtgacctaaataaaactcatttcaatataatcagatttactaattgataaaaattagaaatcattttatgttgcatggttaacatgatttatttcatgattatctttaatgtataaattctattaagtccaaa

SEQ ID NO: 220659 - DNA, 2043 bp, Cannabis indica
ggcataaaacccaacactatataggcactaggtttgccttgtcgacaatgatgctgcttgttagacgaaaaagtgcatctactagagcattctgttctctggggatctgcctgattgtgtagcctatgagatgacttagcaactcttggatcttgctcaagtaggccaccattctttcatctcaagctgtgtattcacctaggacttgattcacaactagttgagagtcactgaatatgtccaggtggtcagctcgtacctcctatgccaacatgaggccggctattagggcttcatattcagcctcgttgtttgaggctttgaagccgaatttgattgcttcgtgcagtttttgccccaggtgttataacggtaatgcgtacactggacaattggtcagtgtagcttccatcgacatggaatttccatgtcagttatttagatttttgctgctgctattgctcttgcttcttctctggctctttcttttcttctgaattttgagggattttaagagataagtttgtgcactcatcgacgaatttttcaagggcttgatcctttatagccattctttattgatatctgatgtcaaattggccaagttcaatggcccacttgagtagtcggcctgatgcttcaggtttttgtaaaacttgtcgcaacagttgatcgatgtacacctttatctagtgtgcttagaattatggtcttagctttctgcaggccaagagcaagctataggtcagcttctccatgagtgggtatcgacgttcaacgtcaattagtcttttgctgatgtagtacatagggtgttgtacatcatcttcttctcttgttaggacatcactcacaacatgctctgtgactgctaggtacacgcctagctcttcattgtctaggagtttttacaccccatgtagttgagccaattgttttttcagctcctggaatgcttttccacattcctttgtccactcaaattttttgttgcctctgagaatgttgaataagggtacacacttgtctgtaaacttggacataaatctacttagtgcaacaatgcgtcctctcaagctttgtacttccttgatgggtgtaggcgaacaaaagggcttggatcttgtctgagtttgcttctattccccttgtattgactatgaagccaacaaattttcttgagcctatactgaaagaatatttgagggggtcgagcttcatattgtacttgtggaggaccctaaagcattcgtctaggtcttccacttgccccccaatctttttggacttgacatggatctcgtctacatacacctccatgttgcagcccatgagatctttaaacattttgttcatatgcatctgatatgtggcccttgcattttttaacccaaagggcatgactttgtggcagtacatgcctaagtctgtcatgaagcttgtatgctcctgatttggcgaatgcatctttatctagttgtaacttgaatatgcgtccatgaaactcaagatttcatgtccaactgtggcgtctacaagctggttaattcttggaagcaaaaagtagtcctttggacatgctttgcataggtttgttaagtcgatgcacactctctactttttgttgggtttgggtaccaacacagggttggataaccaaagtggatagaatgcttctattataaagtcatgggctcgtagcctctcggcttcatatttgagcacttgggcacattgtttttccaacaacctcctcttctgttacatgtaatcaacattaagtaataatctaagtgtcacataggtcatgcaaatactctcgtttcacatagaaccatgattatccaattttagcattctcaattctcacttttcagattttgaattgagatcatagaacatgtagaaggtgatcaagctaacacatggaattaaacacaaatatagataattttacaaatcaagattgaaggaatgacaattattcattaactaggaaaaactttaaacaacattcatcacctccctaaatgggaaatttag

SEQ ID NO: 220660 - DNA, 1228 bp, Cannabis indica
aaacctatataaaggttatgaagtcaattgtaaagggacactctaactctctctaatttacgctatttaaaaattcacttgaggactcaactcttgagaacataactctagagaactattcttgagcattgagatcaataaaactacaagtggactagcttattatcgctgaaagggggtaaaccactataaaattttattattcatcatcgttaattttcttttttattaattggtttacttttgtttgacattcacttgtgttcatcttgctcatttacgatcttctcagacccgttgataaaaaactacgtcaacagcttagtgctttcattgagagcagtgaacacaagagtcaatcaccaatcgcgaccatggtgagtacgggacgaacatactatgaagaataggacattaaggtccccttgaatgaataaaacaccatggaccaccaaaaagtatttcaacatgttgagcccgctggtgaagggacctctcagaatctaagtaaacagcccatgcccgacgatgaaggtcaagtccgagatgttaacagtttgtagtcactgtcccatggtgtacaatgagccgctaatgttcgtgaggtgttcatggagaatgaggtgttgcgtcgacgcctagaagagactcttagactcaacaaagagtggcaagaaaggcatgaggcccaaaaggttttgggacaaccatgccgcagagcctatgttgagaggcatcttggtacgaaaagaaggacataacctcgtgggcatcactcgactcattaccctgttaaaagctaagaaaggtctaggtcacaaacaataacgacccaaaggtgagatactagtcgtaataccgtaccacaacgaccttctcgtgagaacaatgcccatggcaggaggaatgagtgtcctccatcataaaaacgtcaacaggcaaccaccccaggtcgtgagaatagaaagaacaatgcacctcctcctatgcaacatcaaacccggatggacatgcaagagcatgcttccccttaaaagaacattccacctcctccatcagagaaatctcgcgaggaacgaggcacaacacgcaataacatggttccaccttctcaaccatcccctgcttttagggataatatcgtagatagagaggaagggatcatgggcggaaccctccatctccaatcaggttccctttatcacaaataaggtatcatgagcctcct

SEQ ID NO: 220661 - DNA, 2845 bp, Cannabis indica
attatgcttgaatgaagaggaagatactcaagaaaaaagcaaaagttgaaggtggtcgaaggaataacagagaacttaaaaatttgactttcaacattaattatgatagcagaaagacaaaagagggatgtagtataataccccaatgaagatccttacttggaatataagaggcagcgggaataaaagaaaagaagagccataaaagcgacgatttgcaaggcgaatccggatatggttattttacaagaagtgaagaaggaggtgactgataggaacttcatttgaagcatttggagatctcgttttaaaggatggatattgatcccttccatggggagattagggggtacgctactcatctgggatactagaagtatcattgtgttagactccttggtaggtgactttttttatctcagtcttggttcaagaggaagggatcaacgcttgggtggttttcagggctctacgacccgtattcatacaaattatgatcagacttctgggaggaattggctggtttgagtataatatgtggagattcatggtgtttaggaggagatttgatcgtggttaggagggtccaagagaaatttaatagtaactcgaacacaaagagtacgaagatttttgatgagttgatctgagaacttaatttaattgactccctgttaaataacagaagattaacatggtcaaattttagatcaaagtctatttgtagcagattggacagattcttcaccaacgcatggaacagtgcgcttccttatgtcagacaagagatgttggtaaggatcgtctcggatcatagtcccaaaatggggtcccagccccttctgtttcgataacatatggctggaacatagtcttttctccaagaattttggtctgttgtagctttgggatggtcaggtaccaaattcatgagcaaatcgaagacagtaaaggaaaacataagggtgtggagcaaaacaaattttggaaacaatcatttgatgaagattgcaatggaaagaagactgggtgaactcgatagattggagacaaccaacttgtggaatccaatactagttgaggagagaagaaatactaagaatggcagagattagtctttgaagaagaaagaagtgtataattaaaagctaaatgcaaatgggctaatgaaggtgatgcaaactttagattctttcataatctgttgaatgcaaggaaagccagaaatagaattttaagaatcgaaagagaaaatggccagattatcgaaaatgaggaagacatagtctaagagattccgcatttttttgctaggctgtatacttttgagagaagaatcggtacaagtattgaggggatagaatgacaagcaatttcagatttctcgtcaagtcacttagagagacctttcgatgaagacgaaattcacaatgccgtttttagttgtgaaggaaataaagcctctggtcctgatggttttagcttggctttgtttcaatcacaatgagaggtaattaaagaagatctaatggaagtttttcaaggcttttgaaagagatggtaatatcccaggtagcatcaacgagacatttatctgtctaattccaaaaaaaactcaatagttgtagggtcagagattactgatctattagtcttattactagcgtatataagattattgcaaaggtcctagctaacagacttaaaggatttctatgggagactatacaaaaaaatcaatcagcctttgttgaaggaaggcaaatcttggattcggtgttgattgcaaatgaaacaggagaacactacagaagtagaggcaaaagtggcttagtctttaaaatcgatttttagaaagcctacgactgggttgagtggagctttttagacttggttatgcgcaagaaaagttttagagagatttggaggaaatggattcgagggtgcatctcctcatcatctttctcgattctcattaatggtaaaccaagggaaaagtttcaaggttcacgaggacttatacaaggagacctctctctcctttcctgtttactctagtagcagatgttctaggcaggatggtagatagggcagtgaactcgggcaaatattttgggtttctggttggaaaagagaaggttcaaatcagtcacttgcagtttgttgatgatacaatttttttttttaaatgatgaaaactctctgaaaaaggtcggtaagtttaatggaggccttttgtgccatttctggtcagaaagttaatttgtgttaaagccagttgttgggattgtgtatgaatgatgaagcagtgtcaaattgtgtttccttagttggatgtgaagtgggttgttggccaatgacatacctcggtatgcctctagggggatcacctaggaagttgagattttgggaaccaattttagagaattgtgcgaaaaggttggatgggtggaaaggctcctttttgtctaaaggaggcaggttgactcttatgtaatcggttttatcttccctccccaaaatcaataaaacaatataaaacgcataaaatgttatttacttgggaatttttgtaaatttttaaattacaacaaaatctttggacaactcattcggaattatgtttaacttgatttatatacaatataagtagacaacttaattgctaagactaagtgcagtcgccaataccacaaaatagtacaaaacacaaaagttcaaaattccataaaaggtcattcacctaggaatttttctaaatttttaaattataaggaattcttgaaaatggtcatatatcagaatttttctattgaaatcttaaaatactacattctaaactgca

SEQ ID NO: 220662 - DNA, 3092 bp, Cannabis indica
tcctttgaccggtttccggtgggtatgcgagttctcgccgttgacgacaacccaacttgcctcagaatattggagtccctacttcgtaaatgccagtatcagggtctgtcattcttattgttaattctcctttaattaaaaaccatattgtgattatgaatcctttcattacaaatcctcttttggtttttacattttactttagtttttgggtttaacagttttttcaagttttggtttcatttttgtgttgggtttatggttttgtagttactaccactaatcaagcaatcaaggcactaaaaatgttgaggaaaaacagaaataggtttgaccttgtcatcagtgatgtgaatatgccggacatggatggatttaagctgcttgagcttgtggggctagaaatggacctacctgtcattagtaagcataaacccttttcttacatatgttttatttttttgatgaaaaatgattacacaagcaaatgtaacctcacaattcacagttcattttttactttttgcactgatgttgagttgatcattagaaagtgattgtgttacttttatctgacattttttttactttgatgctgttccagtgttatcagaatatagtgataccaagcttgtgatgaagggaatcactcatggtgctgttgactatttgttgaaaccagttaggatggaagaggttaagaatatctggcagcatgttatccgccgaaagaagttggatccttgtgaccaaggcaagcattctgatcaaggaaagacttgccatgagtctggagaaggtgggaaaggagtgacatcaataggattgaatcaaaatgctacaactaataggaagcggaaggatcaagatgaagacgaggaagatgagggtgaatacgatgagcatgagagtgaagatccgtcgtcaacacagaagaagccgcgtgtagtttggtctcccgagttacataagaagttttgtgctgctgtacataaattaggccctgaaagtgagtttttctctaccacaaacataagtagggaaattcttattcatttgtttacttatccaacattctattatttcattactgcagaggctgttcctaagaaaattcttgacatgatgaatgaggaaggacttacaagggaaaatgttgcaagccatctacaggtatgttcctgtactgattatctggctcttgttactgtcaatagaatgcataacattgttggcaagcaatctttcttgtgaaccatattaatttgttaccggaaaatctataactttatcctatctatttcttaatatcttgtaaagatagctgttgtctgaattagaagtattggccaagtagtatagtattatttacctggttggactgaatggaatttttcaatctaactatcactgctcatgttgcagaaatataggctttacctgaaaagactccctggtgcaaaccagcaagctaggttggttgctgctctgagagctaaaggttgctcttatgtatgcatggacacactagacggctttggagatatgcacaccatgaatgggtctggaaggctggcaagctcagctctatcatcatcttacacacatggtgggatgcttggtagattgaactccccatctggtttgactattggaggaatttcttcaaatggactcatccaacctggtaatccgcaaaacttgagcagttctttcagtactcttggcaagtttcaaccatctatttcagtaaaccaaagtgcaagtttattccaagggataccaactttggagcacaacaagttgcagcagacgaagtccactgctcatattggagagttcaaccctttgaatagctcatccggttttgcagtccctgctagctttccagacttgcgagtgactcctagtagctcgggcactgcacgtagctcttcaagtaaccccctgattggagaccaatcttcagtcagagtgactccattgcttcctgaatcttttgacggtgaaagcagaggttcctctgactttttagatcataatcattataatgaaagctgggaagttgcagttcagtcatcaaatttttcatcaattactttattaagggagtgttcgagtcatggacagatacattctaacaacttgggcataccatctaccactgcacaaatcagtaacagcccacatgatttttcttctagtaatgcatttctggaacctttagcaggtcctagagatggacatggccatggtaacttcattggaaatgctgttcagagtacagattacacagaaaagcataggtgggataatcacaaccttaatcaggattttggtactctaaattccatagttgaccaattaaatgggtgcacttcatctgcctttgagagcaatgagattgagaattcagctatgggtgccaaaacagaaactaatgaagatttcattgaaaacattgagtcattggatgatataatgagtgccatgatgaaaaggggatgattataaacttttagattttgttagtgatctacttgtacatattttgaggaaataaggatgcagtccaaactttccctattagcctaatatgaccaatagtttatgttttgtcatctcagcttttatttttgtctttgcctctctcatgtgaaaaaaaattccatttttcggttagctattattaaatttgtaaaacagcaaacatgcatatctctcttaattttctcatgttttctttttcattttatggttggaatggataacacttttagatgtgtaatatattttttgtttaatcttctttaacatgaatttagagtttgtttcttaaattttataaattttctctcaaacgtgtctatatcttctttagtaatgttattttaaataattgacttcaaaatgtagtttatcaaagtttgtaaatattttacattttggtatagcacactaagtttacttaataacatttaatcccccacacattctgtaaacacccaccaagaacataacaaacgtcaacacagatcaaagaaaacaatgaaaacataaaccagaaaatattgaccacaagaacataaaaa

SEQ ID NO: 220663 - DNA, 2868 bp, Cannabis indica
tctctctctctatctctttccctatttcgatctctctatttttaatttgatactgcctttttctaggtttgcggtggtagggtggtggtggtgtcacgacacgcggtggtgctctcccgtctttgaaaaaatttaagatatgagatcttttacgtgaaattgaaaaaatttgtgtggcatcgatttggttgtaataactagattttttaaaaatttgtttgcttcttataaccgaacaaaaaaaaacaattagcgtcggcgcactagtttttttgcttcgattatgaattgaagtaaaaaagttttttttcttcggtttatccctgaggcaaataatcaattagtgtcagttcataactaagcaaaaaatatcactatttgcatctgcagttatagcgtcgattatatcaattgaagtaaattatttatatgtcacttaaaaaccgaaacaaaatgcctttttttatagtagtgggccaaggcattctgaaacacggtgaaccgggttatgcttttatcctgcagaagcttcacccatacgtgtcagactacagacctagggaccaggctcttttgagtacgacatcagaggttgtctcccacgacacaccatcatacacaacatgcatgtccttgtgtactagcccaaatgatccaatggctagggataagggaaattcaaaagggaaaagccctgaggtgacacgcgtctgaggcctagctcgtacggtctgacacctttaaatgccatatgggaaatacgccacctaccaatttgatggtgggaatttgccccaatgatgatccatctaaggcatcccatacaaagaagctggcctataaagaccctagacagagcacgagagggggaccttctctttggaaaggaggacccattcctcatcataagcaaacacatttctgtaaccctactgttaacttcagaatatttcaactaggcttcctcttcttcaaggtgaacacagtggaaaggagttctagtccattgtatctctatttgtataaatagttaccatccaatgagcctaataaaatggactcgtggactaaggatagttaatgcctgaaccacgtaaaaatctcttatttgttatttactccacaactactatcttgccctccataaatatttagtagccgaaaatctcagttaacaattatgatctaatggtaaaaattaacttctgaggttgatcgtcgattcttagagttcgagtcgcgatgacgggactcgcttcgggtaagttgtagcttaaatttgtaactctcttggggataaaatttggagtcaatagcttcagaattataattgaattgtgagacatgacttgatggagcattgaaatagctttaaaatttaagttgaatcgcgtcaatagatcaatattaagtgagttatggccattttactgaaggttgttctgggcccaatgcccaagttgttatccagggccaggttgacatgtgatgttaacctggacactaagtgagtggggaaacacgcaggagatgtattttttgatgtctaagtgatatttggacatcacttagcctattttctacgttttggtgaagctggtcaccagttctcggagatgatgttgttttgcataaacgagagactcaaaactccccgatttttgaataagtcacttcgtcaggaaaataaaatatgaagttgtgaatttagctattctaacttcatggctcttagttattatgaaaaattatacgaatgattgagacaaaatcataatcgggtaagaagaatctagtgcaccaggtcatttgtcaatttgggtgctgagtgctcattttagagcttttgagatgctattttgatacttccaaggttctagaatttgatgatgagatatcctatcccatttttaacaatttcagaaagaatgcttggagcaaaattgacatttaagtgattgaaactagtgcaccaactggttggttgtcagcttgggcgttgggtccagtttttatgcctttgggaatgtggttttctctccaagtttgtttgtatcttattatttctgatgacgaaaaaaaaccaaatactttttggaaaactaacatgaaagggcacaagttgacgatatgtcaacttaggcgttgggcctagtgcgaggtgtcaaactgggcactgattccaatttcaagtcatttgaaaattttgtttgatttctaaaaatagttgaatcttaatctttgttgaaaaatagagaatatgtctggaagagttctaaaaaaactccttagaattttttattttattataagtttgttttctcatatttttgtacacagattggtttatgccataattaatcgtactcttaattaagataattttctaatgttcttaatttttttaattaaattttttccataaaaattggaaaaatttatttcccccatatttttactaataatatgctattttatatttaacaaaaaaaaaatggatggtatatttaaaaaagataacattaaaaagaaaaggcaaaatataaactctcattttgtaaatacttggaaataaatgtgctttattaagatatcagaattatcatgtggtcctccctaaacatggttttcatattaataaaagaaaaaatgtttaatttatttatatctcaacattatcatattaattgtaattgaacatatatataatattaacaagatataataaatgtaatttactatatatataattgttgagttctaggatctttattttacatttttgaagtgatgaaatgggaaattaattaattaagtacttagttgattttaatttgcatttaattaaatttaagagagagagagaga

SEQ ID NO: 220664 - DNA, 3151 bp, Cannabis indica
aaaccggttctataatataatgaataaaaataaaaaacacacaataactcaaaccggttctataacataatgaatacaaacaaataacatataataactaaaatcggttataattaaaaaaatcggctccaacaatattgagacataaattaaatagaactgagtctacaaaaaaatgagtaaaaacatacaacaaacaactactaagaaatcggttataatttttttttttttaaaaaaaaagtaatataaatcatacaaaataaatgcaacgctatctttgcaacttactaacaaaatcatggtctgggtcaatatttaaatatgttgactaaaaaaaataaaacaacataaaaagtatttagaaccggttaaaattaataaataaaaaaacataaactaataaggagtcaattctaaaaatacttatccataaattaaaacagaaccggttccacaataaaataaataaaaaacaaatagcacataataactcagaaaccagttataattcaaaaacaagaaagaatcagtttaaaaaacaaatctctcttctattctcaattgtacctcgacaatcacccatgctaattcttcattgagcataatgagtaaactaagaaaattactttccacacaagacatcaaaacaacaatgcaaaattaagtaaattattacaatgaaaaaaaaaaaaaaaatatctaatatttttcatgaaatgcatgtatatataaacatgttgtctatctaatttactatcacaaaaacagaaaatggagagataaggctatggactcacataggatgagccgccatatgactttaagagctctatttcttgactctttctgcatctgccagaggctgtcattacacacgaaactttgtttaagaaagtatttcattataataagcacagagcattcacatataaaaagtacaagtaaagcttaaatagagtaagtaacaaaaatttgtaagttaaagtataagctctccaaatttacttctaaaagagaaaacttccttaaacatcattagaggcaaaccatataataatatctctaccaaaattaatagcaagtcaacaattcgtatatctctagcattaacaattattctcaataagtctatatcatcaactaaaaaaaggtgtaaattaaaatttatgtcatatcattgcattaagtgagactcaattgggaagctattagatttttgtgtttaataaattaacatttcttcttgtttacccttccggcacccgatttcgtagggctaccacaagtagataaacataaccacaatagagatcactaaaattagggatccatacttcatcaacaacctctgaacaaattagacaaagcttggaattagtacattgctttgacccttttgagattatatcatagtgaaatcaccaattgattaaagtgtcacttgattcaaaaagaataacctatatcttacttttaaattaacctataaagttctctcttcattttattttcatagaactactggaactactcatttatttattcttcctaatgatattaaaagaacagaaaattacttccgctaaacattagaatatagatcatagaacttttttttattgcaatcggtggcctcttactatggttgaaaccattgttttccacagactatagttatgtaaaaaggctgattcagtgtgctgaagtgatgtgtgactgggtttgggagctgagaactacttgagcttgcaccaagtattgttgatgcagcagcatgaagattgagctgggacagtgttttcagggttttgggattctacaaatatggtgaaaaccttgctctgataccaagtgaagaaatagaaaagcaatggtaatataaaatctcagctcaaggaaaggagactgaattaattctatttataaacaaggccaaggccctgagggtacacgatagagccaagcaaggctcattatagctgtatacatttctaatagaaaagaaatctttcgtacacctaatgattatctaatcattgtaattgtaacggtaggaaatcttcattgggatcttcaatattggctgccaaatgaagtagagccaccacctatcacagcaaaacaccgcaaaaaccagcacatggaaaataagagaaataggttcatttcttcacaacatcaatattaaaattttaaagagcatcatttgtcattaagaaaaattgtaatatataaattagaaatcgtcttgtctttaagaagaaagcaatttattataagtaaaaattaaaagtgtatgagtttacttacaatattgccaagagagatgacatgaaggaaagtgaaatcttgttgcttggaacaactgaaggtgggaattttcatccatctcttcggagagtagggcgacgacttggtgcattgaatcagagagataacttttatcgatggacctagagagaaaaatatattaataaaatcatatttacaaatcataacttgcatcgatgacaaaaataataatacacttgtatataaaagttatatatgtcatacttgaaaatttaattattgttaaacacaaactaatacattattaacataaaggacaatacaagagcaatataaaaataattgatagaggaaaatgagaagaagagatagaagagtgaatgataaaaaataattaggtttaaataatatgttgtatgtatagatagatattttagtttttttaaattatgtatttaattatattattatttgaaatatatagttagtgagaatatatataatactaatttaattatattattatttaatataatattattaatttatattttagatttttttgttttgaaatttttttaaagtttattcgtagatgtgtatatatatatatgatattaattaatatgaaaaaaagagaaaaagaataaggtagaataaaatcattttagagtgtcatgtcattcaatgaggaaattatactatatacttttttaacttgatgcctttattttttacattttttttaaaatcgattatgtatctctttttcaattattctaccaatttttacatctatcacttcatgatagtttttattcttctctaatcaaaaattccctacctaactttctaa

SEQ ID NO: 220665 - DNA, 2655 bp, Cannabis indica
tgtgtagcagtcaacatggccaatagatcctccataggcttttctgttaaaagcaaacaagggaaaggttaaaaaaaatatgaaacacatcgagcacgaacatgaagcagtaaacgagtaaggctaatcctaccgtgatgccttaattctgccctagcaaatttttataaattaaagagctggtgtagtcatctcctaaataactatctgaggggagaaaccagcttgaggttatgtagcaagaatgatacagaagaataaggattgggaggccggaacccatttgagaccaacccaagaagccactcatgttagaaaaataataatccttttccctattaccccatcgtgcatggggaattcgaaatttatacagcttcatgtcaaaaccaactggccataagtgagaatactcttgagcaaagggagaaaaatgatggttcaaaggggacttatgagcaccagaagtattggctctaggagtcccggagttgggaaccagaaaagggaatttgagtctgacaggagaaacccctttcctggtcttctcgtggctaagtctcccgtaagaactttgaaggcaggcgtaacatagttcttattcctttttgtacctatatttgttgtatttgtcttcaacagttgcgataatttctatccagagcttcttttcaatcaccggattcctagcgttgggacaggacaccttggatgagttgaaatccttgactgtttgccagtccaagattagcttagccttacggcaatcagcagtggttaccaagtttccaacattcagctgctccttcttatagccagcgaatactctatcatggtttaggaataactgggtggggctttcttgtgcagcggaggaatcttgacccagtctgtcagaagatctagacgctctaaagccttaacccccaatgaaaagaaaaacatgtgacagtattccttgacattcttttgagaattaaaatgtattggggtttcgttggctggacgggcttgcaagttagaataacagtctttgtacttgtcactcttcttggggacagattgaagttcatgaaaatataaaatttttacagagctagggacagcccaacccctagcagcataaaaaataaaaaggcctgaaagtaggcgatatgcttgtgggataagttgattagggctaagtccgacaaaattaagaaatctatgaagtaatcttgtagtggtaacatggctcctgacatgaggtgggtctggctccacgctccaaaactgttatagttatagttatggttgggtgtctcctcatctctgggtatacggtggtagactcttgaactagatggcttgatcccattcacaaccacaatcttctctagctgatgagcacatgttagggacgagtgcaactcatcggcttcccaaccgttgaaacgacaggaatacttcttgtaaggtaccagaccttgcataacatcctcgaaagtggcgagatttttagtcgccttggccgaagaaggattggcagcaggggtagcattagacagtattttagagttcgacatcgagttttttgaatggagttctagaatttcctggttgaatccaaagaaaccgtgtttgtgaagatcgtggagaacttcactcatctaaaagacaagaacttaacagttagaccccttatcaaaccctaagtaaaaaaagagaatgagggtcccctaactgctggaagatgcaaaacattcaagccataacgaaagaaccataaaaagaaaagaaatagaaggggataagggaacaatatgattcttcacaaaccctaaacctaaaaatttctaccagggagatgaaagcgaaggttttccttttcttcaaaaagaaatataaaacttaacaacaagtgcaaccttaagtgaaggttctaaggaaaagtcaccattactattacattatatatgtatatttttcaaagcatgaactataatctactacatcatacacaatgttccagaagatggaagtggaggaagaaggaattacatgatgaagaaatcgtaggaagtgtcgtaaccaccgtacgacgtcaatagctcgcaagtaaaagaaagtctagggagtctaaaattttgctggaaggttttaaaagtctgaaaataaaaaataatgagtgggtaaaaattctagtggctagaggtacgagcttttataggctcttcaagatgaatatcgatcaattgtcatttgattgtcagggttcaaactatctgaattctagtgatccaatggtcaggataggggtgagcaaaaaatctaaaaaaccgaccaaatcgaatacaccgaccatctgaacaccgaaaaaaccgacaccaaaaaaactgaaaaccgaaaaaactgccttcggttaaaactgccttaacatggtcggttttagtgtcaatggcaaaccgaccgattaaaccgagaaccgaccgaacatatatattatatataatatatattatttttgtacatatttaatatacaattttattaaactagttttacttatattttttttatttaaagtgtcaattattcattgctttattttattatagtttgatacatctacatattatatatacacattcataaaataatacaagttttttaata

SEQ ID NO: 220666 - DNA, 2162 bp, Cannabis indica
ttttcttttccaggacatccaaacggatcgtgtttttgtttccataacatgtactgatacaacaagttcttaaatagtttttttctttttgggtgcatgtggattactacacgagcaactttgaacaaattcactcggaatattaatacttatacaagttcattcatcttgttttacagagaaatttcatactctggcattggatggtgtcccaattttcggtctctacaatagaccagctgcatttcggtttgtcactttggttgatgtatgtcccaatgaaaaaaaggagacaactttattaaaactgtgaatattatatatcatatatgttaaatctggaggctatccttaattcatttgttattcaaacaacgaatttgattgttccgaatgaagttgtagtgagttattcaacattattgtggcaggttatgtatgagaacaaaggcagacttttatgtacagcagaggggaccccattacaactttttgagagaattgtgacaatatctgatgctcaaaatattgcacctagaacctcttcaaggtcaagaaggaatgacgattctgatctttgtgtcgacaatgaattgggttttgctaaagatcgcataatcagcaggtatgatgcgcactctttttcagtctgtaacttattgatcatttaaatacatgtttcggttcctgtttctgtcaatgagtccactttgctttgatattttggtgatgaagtcatatcatttccatagccttggcttggctgcattgtgtcatggaagttgtttacatcgaaacatactttttcgcctttacaatctttttgctttcttttatcgtaagatctacaatttcgtactcgcatatctttcccgcgtatattcaattttagttgcttatgattgcagattaacagagatgaatagcaaggaatacttggaacaacattcggccatgttatcgaagaagtcgtcattgagggaagttgccaactagggaccaattgctacaactgctgcacagctcatgaaatcgaacagtgttttacaaaaagaaagaaagatacaaaaaagttgccattgttggtaaaaccaaatggtttatagcagtaaggttttagaaaggtttacctcattgaatattggttccccttacttgattgtactaaataagatgcaataatcttattcttcttgaaattaataatgtctctaaattaaactgcaaaatatgtaagcttgtgaatgtaacaaacggctattgcagtcattaatatatatatttttaatatatattttatataataaacattaagcaaagttatatatattcttaacaaacggttgtgttatttatttttttaatatatattttatataataaacattaagcaaagttatatagtaaaagaaaaataaaaaacaataagatgagagatgcattttttatttgtttttactaattatcgagggaaaggcatagcataaagtttgtagtaaaaaatacttgacatacatggtagggcttattttcggtgggaaaaattgataaaaggttaaattcaaaggtgacaaatattacacaaaatggggaattcattgcctatcctccttaaatccatgtgtctttattgccttaatattgtgcgaatcaagtttcagtggtatttttaccattttgaatcccgtgtcttgcaaaaattatcgatagactatctattttattaaatgacaaaatagatcctatattttctaaaatggtaaaaataggaccctgagttcaattttcaacaattttattttataaccaactttaagacaatttttaacacgaacagatacataaaatataaccagttttgtcataacatctctagatcgaattattattaagttttattttgacaaaaaatcagttcatggtcctatttgtacaattttaaaaaaatacatggtccattttatcatttaacaaaacagaaggtccaattagtaacttttacaaaatataaaatccaaaatccaaaatattatttactcttatcaaaaataagtatattttcttgtattaatccgtcaaaatcattacaatgattgaaaaatagaaagaaaaacaaaataacattgtaataaggcactagacatcataggcaaaaatgaaaa

SEQ ID NO: 220667 - DNA, 7076 bp, Cannabis indica
cccagggcccaggttgacatatgacatcaacctagatgctggataagtgtaaaaatgtctaagaaatgtactttaaggtgtctaagtgatattacatcacttagcttgtttatgtatactggcgaacttggtcactagttctcagggatgttcttgttctgcagaaatgggagactcaaaactcttcatttctgagtcaaatacacagaacctagcgcaccaggccatttgtcaacttgggcactgggtaccctattcacgagctcccaggatcttattttgatactttcaaagttcttaaacttgaggatgaggactcctaccttatttttgactattctggattcattagttgagttagatctggaatttgagcaattgaaggcagcatcccaagttgattgtcaacctggcgttgggcccaacaccaggtcaacctgggtgctacaccctgtttccaaaggctcaagtttgtggttttctccccgagtttacttgaatcttcattatttctaatgaaaaaaacactttttggtgaacttgattggaaatagcccaaattaacaatatatcaatctgtgtcatttacctcttacataaaagttttaaacttaaaagactcccattagctttaggattaagagattgaactcacctatatataagagagttcacaatcaaagtttccacacttctccatttaattccacacgcccaattcctttaaagagccctttgaaattttatcttcatcaagccttcaagcattcttcattccaaggtagaaaaacattttttttcttggaattggagccatttttttttttgaaaaacttcttcttctccacctttgttgatcttactccaaggaattttaaactcccaaaaacgatgaaaatattttttctaagacctccaaaatttcaaaccactatcctagtgccttgaaaaattcctccaaaatttcttgaattctctcaacccaattagacttttcttgggttgtaagcaacttgtgttgttaagcagtcatggctaggatgaagagaagtagaaggttatgtgatgagtatgacccccgtgtggctaagttcattagagctaaggtaactatgcctaactctaagaacttagacaagtcgcgtggtgggaaggtgatggcaactgagcttcttaaagctatcattgagagtgatgatctgagagatcgagctttcatgctaagacctcttgtgtttagcactattacttaacatcaagctcgattaacatgagacgattattgtcttcctaaaactatcattcgaaagccatgatacggcggtcctaatggctcccagaacacctgctgtagtgcttggtcgagattccatatgaatgtgggttcttaattaccgttgcatccatggttcatatccatagttgatttctgcggtgtctgcacttagtagataaatccaaatggctataggatacttgccaccttcttcatattttatcgtttgagaaacttgcctattccaactcccaatgaaacaaacttcctttgtgacttgaaaagaagtccaacccgtaaagaagaaggattttacaaattccaccaatttagcccatacatagaaaatattaccaagagtaactacaacctttacaaccaagagtacttctatactcctattcttccatcgagacacataaccttccaaaaagttggccctctcaaaagactagctcctctgaatgacatgaagaggagagttgatgccatgatacttgagattgatgcatgggagagagatgggcgatctctatttagtactaagaatctccaaaaggttgggttgattatgtcttttcagtgggtgtatgctgacacttactccacagatgaatcttggacaatgccacttgagcaggatgatgaggatgctcaaagtaaaactctcatcttgtcttagagagtgacggaagaagtgaccttagtttgatgtaacacagagtattcagggagaatatctatgttcttagggtaagaagatggagaagttacctccactcaaactgctctggagaagaatggggaatcaacaagtggctactggtccatgttatgcagttgactttattgttcgtgtctcttttgtcgtactaacctcttgtgtaatgccctgccccacagggacgccacgtgtgtacttttacaaatttatttataatctaattttattaatttaagaaaagtgcagtggaattaaaacttttaattaaagattaaacataaatgttataaaatgtaaccactgtgtattacggggatcctgcgtaaaacttttacactctatttcaaaattagtattacatcataaggttacaatttaaaatacaaccaaaagggtggatcctgtccactagaagccaaggcaccgcggttgatatgtacattgctggaagacctctaactcatggttgatccactataccattccctttacctgcaccacgaaacactggtgagtcacagagactcatcaagaaaagctaaaaaattacaaacgatgtaaaacgcaagtaagcacaacgtgggataataaacatatctctcattcaacacataattaaagaatgcataaacaattataagtctacaagacgagtcaatcacagcgcctcatgaagcactcttactactcattatcaacgacctatatatgtcactatcgtcgcccagtaaagcaaacgataagtaagaaacctatctgcagtttcaagcgagtaattactcatttatagtaacggtaatgaccatatatttccctcgatcataatcgaatcataataataacaatcgctatctaaatcataattgagccataaatgataataatcatttcttaccaacaagcttattggtgcatatagcttttcttaccttagtccaagaataaggtgtgcgcgctgacctgaataaaaataatgcttgacgatctcgggtcctatgtcacgataatgaaatccaataaatatcttaactaaattctgacgcaaaccctaatatcaaaaccagacaaaccctaacttccattagccccaaaataggttaaacaactcctaaataccataaactaagtcccagaaatcatcccgagccaaaaatcagctttgaaggaaaccaagattttcccctgcagaccaaccggtcgatcagttctgccataccagaaggaaccagtttgccagttctggcaggcaagaaaatcttgggttttcttccccaaaactgatccaaaactcctccaaacctactcaattgctccagaaaaagtttaaaccataaaagaaatgtaatcaaatcaccaattcacaaataattcattaatttaagcaaaatagcataatcaattgaacttaagctcattaaacctcatctaacccaattcaagtcaaacaacccctatgtctaaccaattcatgcttaaacaaacttcaaatcaaacctaattacacattctaaataaaatttaactccctacccccgaaatccttaaaccctaacaaaaacttaattcaaatcttgaaaaatccatgaataacataataagaaacctacctcactaatttggatagcagctagggtagatttctagcaaaaatttggttgttcctcataggaaaaatctgactgtagttctatagcttcataactcaagatatgagtcgggtctgacacatatttcctcaagatcgaaatacgaaattcattatgtacgtcgataatgctactggaaaggctaacggatacgctacctgttagaccttctcgagaattttaaatagccctatgaacctagggcttaacttttccctcttcccaaagcgctttttacacccttcattggaaaaactcgtaggaaaacatgttctcctacctaacattctatgtctctatgattgggatcagaataactttactgtctgctttgcaaagtaagcatccgagccttaattttgtctattgcctcattagtcctttaaactagcttaggacccaaatatttcctttccccagtcttgtcccaatgaattggggaatgagatttcttaacatacaaaattttgtagggagccatccttactctactctgataactattgttgtaggagaattctattaaagacaagtatttactttatgaacccttaaagtccatgacacacgcttgcaataaatcttctattatctgaatcgtcctctagaactgtccatcggtctgagggtgaaaagttgcactaaacttcagctttgtacctatagctctttgaagacttacccaaaactttgatgtaaactttggatgtctatctgaaataatggattttggagctccatgtagacgaactatctcttttacatacaactccgtgtattgatccactatataagttgtctttactggcaaaaagtgtgctgactttgtgaaacgatccactgtgacccatactaaatcatacattcatgtggttctaggcaaaccaatcacaaagtccattgtaacattctcccacttccactcgggaagtgttaatggttacagtatccttaccagtttatgatattctgccttaatttgctgacatactaaacacttagatacatattccactacatctctcttcattctacaccaccaataatagggtttcagatcttggtacattttggtggtacctgggtgcaatgaaaaaggtctagtatgagcctcatccagcatttccttcctgatctcattactgcccagaatacaaactcaagccttatagagtaacattccattgtttgagattgagaagtccttagccaccgctaatacctcctcttgaatcttaactaactcaagatcttccaattgtacctctctgattctttctaacaaatcagactgaagcgttaggttatgaagttttccaactacaaattctataccatccataattatatcaaaatctaactaaggagagattattatggtactaaaaaactacctgggaccttttatgctcaaagcacccaacactacattggctttcctagggtgatacaaaatctcacagtcataacccttgactaattctaacgaccatctttgtctcatatttaagcatttttgagtaaagaagtacttgagacaaataatgttgaaaaattttcaaggcaaacacaacagtaggaaattctaaattgtgtgtcgggtaaggctactcctactcctttaactgacgagaagcataagcaatgacattgttagcttgcattagaatgcaccccagaccctatctggatgcatcacaatataccataaacttttcttaatctgatggcaaagctaacactggtgtcgtgatcaaccgttgtttcaactcttggaagcttgtttcacacttattggaccatacaaattgttggttcttcttagtcaattttgtcagtggcatagaagatcgttccacaaaacgttgataataccctgccaatctgagaaaacttcaaacctcagtaactgtccttggccttggccaattcttcactaattcaatttccttagatcaacaataattctgtcctttccgaaaatatgccctaggaaggacacttgtaataacaaaactcgcactttttgaattttgcatacaacttatgatctttgagttgttgtaaaaccatttagaggtgttgttcatgctttgcttttgttcaaaagtatacaaggatgtcatcgataaaaactataacatagttatcaaggaaatcgttgaacaccatgttcataagatctataaagattgttggagcatttgtcaatctgaatgacatcaccaagaactcatagtcaccatacttagtccaaaatgtcgtcttcagaatgtcttcttcccgaattctcaactgatgataacccaagcgtaagtcaatcttggagaaaatagtcttaccctgaactagatcgaacaagtcatcaattttaggtagttaatactttttcttgattgtcagcttattcaactctcagtaatcattacacatccgaagggatccatccttcttttttacaaacaaaatcaaagcaccccagggcgacacactggttcgggtaaaccctagatctagcatcccctgaagttgtaattttagctccttgcattctgttagggccatctgataagatgcttttgaaacaggctttgcttcaggttccaagtcaatgatgaaatctatctcctaccgtgtggtgatcctagtaactccttaggaaatacacccagaaattctcttacaactctaacattctcagacccaaatgtttcaggtctactggactcaatcacaatcgctaaagatcctacacatccactgttcagtaaatccttagcctttaaaattgaaatgatcgaagtccgagaaccttgaatggacccaacataaacaaatggtttcttaccatctagttgaaaaatgaccatcttctgtttgcaatcaatgttggctaaatacttggacaggaagtccattcaaagtataatttcaaacgcaattaattccaattccactaaatcagcacttgactccctattctcaattctaattagcatagacctaacccacctttttaagataaccaattatctgctaggtaataaggttccaaatcctatctcgataaaatcatagggcctacccaacttattaattactctcaacgccacatatgaatatgtagccctaaagtcaaataatactgtataataggagttgtggacaagaagctaacatgttaccacagaaggattggctgcaacatctcgataagccacactaaaagcatgtctttcagttacattcctcatgatgatacttcttacaacgtggacactcaagataggaatagggttggtgaccaaccctgccttggttcccacaaaaccttttactttgactcgagccacctaacatcgggaaagtcttcctcttttgatcaacattggaagcaccaccatccttaccataaccaaaagtaggaagg

SEQ ID NO: 220668 - DNA, 1971 bp, Cannabis indica
  modified_base (872)..(872): a, c, t, g, unknown or other
aattgtaattttgtggctaatacatttagttaagaacttttagtcacaacataagaatataatttataattagtcacaaattctttacttttaatcacaagttttatattgcgagtaaaaatagaattttttatagtgtcatctccatcatacgtgtccatacctagctattaataaagtttatatgattaattaatgagttagttgggcagtacgagtactattctaccacacacagatctttattatttttgtaggaacataaaatatatatatatatatatatatatatgactcgatcgtacataatttatatctttgtcaattcatatcgatatctatcgactcatcaccatccctttctttcttatattctactgaagcaacttttttcttgctataatacaacgttattcaaaggaaaaactataggtaaatatactatacatataaatatatatatatatatatttgcaaatcattctatagtaataacatatatgcttttgttaatttttcacattattgtgatgttgttattatgtatagattttgtcatatcatatatgttgtataattattattttcgttatctatcaacaactaaaccaaatcttaaacatagatatataaataattaattcttctcaatatataagatttgacttatatataaatatatatacttggtcaaaaaaaaaagaaaagtaaaattaatattgaaaataatttatttttaaaatataagttaacaaatttagaattatatatgataaaaataatattgaataatgatgcatgcatgatcgatcggatatatttagaaacaaatcgatcattatgtatatatatatatatatatacacacacanagacatcatatataatataatataatgattagtttactataccaaatcaatttttttgtcaagctatgtttggatctcatgatatgtagatttgagagagagagagagagatagttaattagggcaagctatgtggaagttgaagatagctgagggagagccatggcttaaaacggtaaataatcacgttgggagacaatgttgggaattcgatcccgatgccggcacaccacaagaacttgctcaaatcgaacactttcgtcaacaattcaacaaaaatcgattttgcaaacgacaaagctccgatctacttatgagaatgcaggtatatatatatatataattaattagagagtctcacactgctaatatactgataatatatgtaataccatgtatactcaccttatatactatagtacattaattcttaacaatattataattattgagttgcagcttataaaggagagtaatattactagtagtagtaattgtttggagagatcaatggaaattaatattgaagaaagtaatgatattgataatgttaagatgagagaagaaggagttttagtgaagaacacattaagaaaggctcttacttacttttcatcaattcaagcccatgatggccattggcctgctgaatgtgctgctggattagtctttcttcctccactggtaattaaacaatttactatttaattaaccttaatatatatattataattaatactatttttgtctcatgttccattaaatatcaattaattaattgactttataacacattaaattgttatagatttttcgaaaatttacaagacgtcttacataattatcactacaacaaaaaacagcttcatatataaaagaaatagggtgactattcaatggttacatttttattgtaaccatatggttacattttttttttaacctgtaatagtaggttactaataggtagactttccatttttaaatttaattaattataattaactattttcttaaaataattaattaaatagacattccttttttagaattatttaattataattaactattttcttaaaataattaattaaatatt

SEQ ID NO: 220669 - DNA, 3424 bp, Cannabis indica
tacttagcatttttcctacaaagacggtaaaagaagaacaactcatacttagcgagaaacaactagtatagttagcataactatttaaggataatgataaaagagcggttaggaagttattaaatattatcccatgtgcataaaaatgaaccatgaggaatgtccatgtttcatgaacagttatgaataattagatctcaagagagtaactgttatcctatacacctataaatagtgactgaatccaagataaaaggggcgtccaatttgagagataaaaagcaagatatcattactattgatattattgcattatgtattccaattattatcactaataagaaggactcgggagtatgaagaattaacttcaaaatcacgttaaaaactttctggtgttcatttattactgtagttgtgatatatttattacaaaaatggctaatattctttattaacaaatatctacattaacaataagtattattctaaatcttttattcttagtgattaccccaatagtgattgctcataataggatttacagaatatgaaacaatggtagaataaaataagaatgaccttgactctcgcctaaataagacaatgtcagattcttattttgatcgattaaaaggttgctagaattgtgtccatttttagatgagctaacaactctattcaattgatgatatctttgactttcacctaaacgggacactgtatatcatttagttgaaaaccttagaaattttgagatgtgtttgttttgttttttcacatgtcttcattacatgctaaatgtttacaaattttctaatatgtgtatgaatttgtaataaacctatattaatttctatttattgataattgtagttttcaatatgactatgaacaacccaattgtgtcactattgactaacaacatgatctctagagctaattttgtcaagtgaaaagagaacattaatattgctctcataggtgaaaattatttgtttatgttaactgaggaagctcctgaacgaccaggtgaaaatgtaaccaagacagtaagagataaatttaagcatttgcagaatgctaacaacaaagctcgtttcttcatgctgtctaacatggttgataccttgaaaagaaggtttgctaacactctcatggctgtcaagatcatgaaccaattatctaaactatttgggaaggcatcagatcaagctcattttgatgcgactaagaactttatcaatgcatggatgaaacctcatcagaatgggcatgaacaccttctctagatggctagttattccaaggaagttaagatccatgaatctatcatagatcaagaaactcaagtgagtttgatcttgaacagtttaattccagcgtttttgccctttacttcaaactacgtcatgaataagttgacatttgactttcacgagttgatcaacaacccttagacatttgagagtttgattggaggtccacagaaaggaggtaacaaagctcttagttctagtaatgctacgaatggtacgacaaaagttgagacaaatattgccactactttcaaacccaacaagaaaaagaattggaactaacaaaaaaaagcctcttaaacctgttaacacaattaataagggcaaaaaggcttctaattcaaaggcaaaaggaaaattgaaatgcttttattgcaatgaaaagggtcactggaaactccagtatcctaagtttttggcaaagaatcaaggtatttcaaattttattgagaattaatgcattttagagaattattatccatttaggttattaattctagatatactaaccatgtttatgtactttttatttcagttctagctacttaaagttggatgtctatcctagcaagttgagacaaatagttggatagaagggtggagaatgtccaagctagaagataaagctcatttttttttttttttagaattcattgttttaattttcaaacaattagttttgaaatttctatttctatttcatagtattgcaaacaatcattgtgacatttttgagagtattaatttaaatttttctctttaaaagaatttcattacgagttacttttataaaattgagctttatattctattacttttatgccaatattaaaattatatttgtttttttatcaagttattatgtattttacatttatcattgatacaaaatctatgttataataatctatgcaaagagataataccacataaacttgaagttaaattcaatgtttataaataactagggaatagatccgcgcttcgtgcagttttaataattttttaatttttttttgagggaaagatacttgttattataaactagaaaagagtttcgtttacaacaacagagtaaataggtggaggggtattctctaaccaaaaataagcctcatccacccctaacgcatgcttaaccgacccatgagcagccatattggcatcacgtttgacatgagaaacacatgtacatttgggaaaaaaggataaaatactaacaacatctacaattaaatcattaaaggatgaaattgaattgaagggagctcttaaagcattagagaccaatagagcatctatttccacacaatttattggcaattgatgttgcaaagccatgtttaagccaaaaaatagtgctttagcttccatttcatgtgacaataagttgcccttcatcggcattgaaagtgctgcaaccacctcgcaatgttcattccgcaccacagcacccaagccaattgtgtttgttgaggcttgaacagccgcattgatatttagtttcagtaaaccagcaacaggtggtttccatcgtgtgtgaggtgcaacagcaactgatgtatgtgaagaagaagcaacaaccgaaggagcagtggaagatcctggattaacaactggtttgacgtgctaatatttttgattaacaccttgaaaattctggagtagagtaacagcagtagaaccagtaacagcagttggttttgcaactttgccatgaactaccttatttctttcagtccaaatagacccaagggtacaaaagatttgctccatttcagaggtagaatggattgttgaaaggaaatgtaagcaatcccctttcttcatggaggagctagcatgccaatcgaattgtacattcattgatctccaaactctcttagcatatttgcaaccgaagagggtgtggccaattgtttcccaggcttgtcgacagacggagcatgttgaatttgtgattatcttccttcagacaagggctgtggcaactggaagagcatcgtgaataatatgccaggagaatttttttacttttggaggaagttgaagcgaccaaaagaatttacaccaagaggccgttgatgtagaactcgaactaaggg

SEQ ID NO: 220670 - DNA, 4717 bp, Cannabis indica
taaaataatttccaacaattaatcctctttgtgattggctgaaaagatatcggacgcgggagccatgggtccttgaatgcctaaacttgcgttccatcacagatgtatctttgaagaatgtatttaagcaactccattccctagatcaaactcgaccaaatatgagatgaagcatccttttcagtggcctttaggatagagcaatttggaaaatatttatgtttcagaatttgaggaggcaaggaatctgggtatagaaataatctccacacttgtttagccaaaaaagcttgattaaaaagttaaaaatcccaaaatcctagcccacccatcgccttaggctgatataccctttcccatttcacccaaggaatcttcttttgatcaccatatcccacaagaattgtctaacaataaattttaatttttcacaagttatcacccaaagcttaaagacactcattgcataacattgcataagttggaatagctttaagaatatatttgataagtacctctctcccacccgctaaaaagaaactcttccaccttcgaacacgcttcctcaccttctcacagatccccccaaatgcccactttttatttctaccaatcaccgtaggcaaccccaagtacttgtcatgagtagccaccgatgtcaacccctatactctcaaaaaccccatctcaatccacctgttgcacattcagactaaaagtgatagcagacttctcaaagtttatcttctgaccagaagcttcctcataagttagaaggatacactgaatagtttcagtatcacctccattagcccaaacacaaggttatcatccgaaaataaataagtgaggaacctgtggtcccgatctagaacacctaaaccccatcagttcagatctggcctttgcaagagagaacaacgaggataacaatttcgcataaaagaggaataaataaggagataaaggacatccctaccgtaaccctcttgtcggaatcactcgacctttataaccaccgttgattaaaaaagtatactctggggtcttcacacaatccataagaaccctaatccagccaccatcacaactgaactattgcatcatactggccaagaacctccattccacccagttatatgctttactcatgtctagcttgagtgccacaaattctcttctactgttatttcttttaaacaatgaatgaattagctcaaagctaaccataatgttgtcatgtatcgagcgctctggataaatgcactttggaaagatgagatgagggggccaaggacatttttcatccttattgataaatcttttccaacaattttatacagtacattacacaaagcaataggtcgataatctttaactaacttggtttttgtacttttggtattaacaccacatttgacttattaaactattgcatcgaagcactgtcatttaagattgcaaggcatacttggctggccctttcacccacaatatcccaaaatatctgaaaaaaataaagcacgatatccgtctgcacctagagcttcagtggcattaatggccataacaacctggtaaatatcctcctgagtaaatggtgccataagacgctcatcatcaaccattgaaatgcgtgaattaataacttctgtaccatgctaaattttctcatttaccgggttggctgtttgagaaatatctatatattaccacttcacttcaccaacaatctccctcaacacataactattggccagtttatctcataatctcaataatagtatttttcttctttctcaccgacgctttgttatgaaagtattttgcgtttctatcacctgccagcattcactacgatcttgatctctgtttccaataaagttcctctctattcataagatcatccaatttaagttctagagttttcacctcatccattcacacattgagagcattagcattcaaaagtttatctatatccttttaagtttccactacttgcttagataataacccaaatctttgcttattccaagttgaaaggaaatttgcatagtattcaagagattattaaagacccaaagggtcagcctcatctaccgtacatctttgccaagcctcaaacataatggctcgacattctctttttaagctaatatggttcaaagcagaactattgcttaactcgctcatgacttcgtacgacaacattctcaagtattgcgactatatgatgatggttagcacaaagaaaatcaccaggaaacactcggactaaaggatacaacttagaccaagcttaattgcacataaaacgatctaaccattcttgtatatgtgaaataccttatcttttattcacccaagtgaatgtcgacccttcgtatcccaagtcattttgcatatagtcatcgagaactttttgaaagtcactcatcgccataacatcgcggtctgtcccaccttttttttcatgctaaaacctcattgaaatccctccacaaatccatggtagattaaagaattgttttatacgcctaaagagtaaccaagactctttttggaggtgggtttttaggttgccataaaattccacgaatcaccacaactcactccctgaacattatacaagagcatcatatatccaatagagtagcttttaatagtaacatcccaatcaccattccacatcaataagattccaccactactccccacacaatctacatgaaagttatgtctttgaataccttctgcccaattaccacaaagcttagtgtcgaacaggaagaccaaacttggggaatgcatgtgcacaatagtccgcaatgcattcactgtactgggattccccagaccctgggcattctagcataagatactcattggggctggcgagtttgctctgcaaactgcgccactccatcatcaaccaccatagactaacaactggtggaatattttgtttcactcttctctcttctaccgtaccaacatcatcattttttcctttttacaccaataggaggctgtttacccttagtcaaatgtttagacaccaaactagctatcaaactaacaccacgtccatctatggaggatgtacgcctcttccacgtcttcttgtttggggctttgaccaaaggcttgaaggtactttgtaacaacttaccctcctctgctttagagcaaataatggcttttcctttatcatggcttctaatttcaacaatttcatgggactcttccaaatgctatacttgtttaggagggcaaggttgatgcacccgaccgctagagaggtagtggcccctgaatcctccaccagaatacttttaaaatgcagttgaatatcttgcagtggagacaccattaaattactagtggaaggtgggaactcctcctcagaattaagtcgagtaggagggacaggaggggcgtcagttcttattgttctgattgaagggagctccccaattataggcttactttctgaagtaaccaccttactattgtgtagctcctgctccaattcttggatttttaagatagatgttgcagcaaactcttccatcatgtttcttcttggccgggagcatttaacagtatccaaaattcttcccacttctctcatgttcataaaatgtgactcaagttgtttgctaccaccatgctatccccaaatcctaggcggagagcttggagcacaaatccacaatccatacctttcattgtgaattggccttgtttccttatcttgaaagtctttaagaggaaaatctaaagcttcatggccaataataccacaatcataacagaattccagaggtgttcatattgaaagagtagagacaccttcgtgcccttctcatcaatgaccactcttaagccatgtttgagatgtctagtaatattgatgcgcacatggacttttataatctaattagccactcttacatccttaactttccctatcaaaattctccattcacgagcaaacaactcaggcatacatgcaaggggcacattgttaatcgagatccaaaaggaatcatggtcaaaagtcatcttagaaacctctcctaatcccattagtttcacaaagcatattaattgcttctcaaacatccaaggtccaccaccaaaaacacgttttctatcctctttgctaccaaaaaagaatcgtaagacattttccgcacttaattcctaaacctaaaaccgatgattaattttccaaatacttttcatagcattctcaattccttctttactagctggtttcagactaatggccatccccaccaaacaaacctcgaatctccttttaccatcttcgaggctttccttgtttagtttgatcacaggtccatctatttcatctagttgcaacacctctaaaatacgacattgaatggaaataggaccgttggtaattgatgatagaaatgtccccataaattcccaacattttgcaatatttttataaaaaaaaagggctccaagagacatatatatcgcttggagctaaaccttagaatccttgtgatacgttgaataacgtctagaaactcccattttgaatagtaggcgacatgtcgcccagtgcttgggagacatgttgcctggaccaatttctgctcaccattttcgagtttgaaagcccctcttcgagccaactcaacacccaatctaaaactcatttaactgatgt

SEQ ID NO: 220671 - DNA, 3218 bp, Cannabis indica
tatgccctccattgtgtcatctcttcttgaacattggcaaacccatggacaatgtcactcctcatggtattaatgtcattgttgagattggtgaattgagagttgatgtcatttctcaaagtttgaaattgagtatcaaccgaggtgtgaaggcgagcaaaatcctcctcaatgctgtattggggaaagtaaggcacgggaggcgcttgaggatacacttcttcttcatcttcctctccttcttcttcttcactagcattaggaagagtgcttggccctctccttgagcttgggagtcttgtttggtgtaaatctatctttcttcatcttcatcaaatttgtaggacatacccttaatagtgatttctaaacatcggaatctttaaattctagaacttcagtttcattattggtgggaatacttaaaagagaaaataggtagctaactaagaagggcaccatagggtaagggtctttttttgtgtagacttaaaaatttcattgatggttcaaattatgtgatagcctaagtttatattcttacgacaatgatgttgaaaagaaaattttggtcaatagcactaacttcatctttgtggcttctaggtgcttggactaacaaggtttttgagtttctatcaattacctcttttacgtagagcttcacagtgatgctcttctcaaggtgtctcacatagaaaaaaaaaaaagattattattataaaaaataaaattggaaaattaattcgttggtccttaaatttttttttcttttttgtaaattagttcttaatttttttttatacataaagtccttactcttaaatctttgtaatttatttatttatttagttttatattaattttaaataatttttatattgatataccttattaaatttagaaaaagatatatttttatttatatgtaattttttaaatgtgcaccaaaataaaataaaaacaaatcaagatatgtttttttttaaatatatcgaaataagaagaaaaatatatatttttatttatgtgtatttttttaaaattaaatcaaaaaatattttaaatattacaaaactatatatatatgaactaacaatttatttttttataaaaaccaaagacaaactgacctaaaaactaaagagaaaggctatttttctagttgtgtaatcagaatttctttcccaacataaaaaagaagcttcccatcccaatcttgaacccttttctgaattctatcattcaaaaagcccataatcatggacttagaccgacccaatgtattaagcaaaccaagataagtattgtgttcagaaacttctgccatttgtgaaatattgcaaagatccaatcgacttcacccctccacattggcactaataaagacattagattttgccaaattaacttgttgacctgatgcctcttaaaacttatgaagaaactccaaaactctcgtagcatctttaggagagttttgcaaaaagtataactatcatcagcacaaaacatatgagagataacaggagcttgcctgtaaactttgatttctctaatccactttcgagattcatacactcaaataaatgaggaaagaccctcagcacatattataaataaatatggagacaatggatatccttatcggatgcaatgagttggaaagataggccccatctctctaccaccgtgtacaatagtataagatactaaagtgacacaagtaagaatcaaatcaagccatctctccgtaaattccatttgaagcaaaattgcgcgaagataaccccattccaccttgtcatacgccttacttatatccaaattaagagtcatactaccctctcgacctctccttttttttcaagtagcgcatgacttcaaaagagaccatgatattgtcggagattagatgacccaaaataaatgcactttgagtatcagacacaacaacatccaacaaccctttcattctactaacaatcacctttgtaatcactttgaccaacacattatacaaaaaaaatagacagcaagccccatcacaaaagagttctttttcttgggaatgagaaccacattagtttcattaataccttccagagaataccacaattaaaaaaacctcgaaccatcctcaccatatcaggaccaactatctctcaatatttttgaaaaaaagcgggagtcataccattcggtcctggcctcttgtctgggtgcatttggaacagagtatgcttcacttcttcttttaatacaagcttgagcaaccacctcccgcaagttagcattagaagtcaaaaataaattagaaaaataattcaccaccaactcttgcaggccatggtcccattccacccaatcaccttgattagttttcaacttatgaatgtaattggtacgacgctgagaacttactttcgcatgaaaaaatttgctattttgatctccagattgcagccacaactgctttgactgttggcgccaataaatctccttctgataaaaatagtaaatagtttcttttgaattaactgcaaccacaggctcaaaattattcttattgcaaatcttttaaagtttgactttacatgcttttatcctttccctaaactttgtcgtaatatcccttccccaaactcatagcttatcacctcacacttgcaccttctgctgaatattcatcaaataactttcttgttgggatttatgccctcaaaattctataaaaatatttttgattatttaaatagagttaaacatttgatatgtgtgtgaatattaaatatcgaaaaattctttattcatatatgaagttgtggcttgtagatgtacagagaactaagaccacttagctatgaataaaacagtcaacaacatattaaagttatagaatctttaatcaatagttgctagtacggttcactgatgtccgttcttcggtgcaagtagtcttggtttgaattacggatgtagtgaaacatcaaaattaagtattgtatataatagagattatatatgacaaataccgatatgaataaagctatctttatcaacatgtcattaatcataaagacctaattcatatcataacaatggtcaatagtatatcggcctaaatcgtgagttatcatgaactcttattcatgttattagtttctttgattcactcgttaaagtttctcagagaagatgattcttaaaacttctat

SEQ ID NO: 220672 - DNA, 3688 bp, Cannabis indica
tggggggttgggggcttgataagggccgcctcctcgcccacagaaaaattctgagctacttcaacttgcacttccaccaaattcaaagaatttataagatttctgttagcctctcctcctccaccagatgacacaatagacttcttatcttgcttggatattgatagtctagaccttgaacccttccttcttcttttatcatttttcagggaagacgttgaagcacctgatcccagcttgaatgatgaatcgggtgatggtgaaaaggcagggagatcagggacttcacagttaaattctcctgcattctcgggtaggtgttgcacatagggaattaaagttaaagtggcttttctttttctgggttgtgggcagtggtgcactaactcagagacatcagatgggtcatgaaataaggtaggaatgggttcaaatttatccacttgggccggccccataagttcttcagtcagcccaatctcttcagcatagatgggccaagggaagtgagtgggctcagggtgtttgtggggttgtctagattgacataattcagagtgaggcttttccaccatttggttataagtgggcccaatattggccataatggttgtgagaataccattatcagcctcattggggggaggtctagaagaaaagttattaatgatgtctttttcaaaggttgtactagaattaccttgttggtgatttcgcatagctctaggagaaactgatctggcagctctcccccttccatcctgccttgaaacccgtggatcatagttgtagcctccctgtctattgttcaacgggtttggggagtctttattgaccactttcaaattttttccaattgaggatcctggttctttgcttgctagcctgattactttccttgttggtttgctgcaattaattttttgctgactctgcttgctgaggtgctcctggacaggtctctttcccatcgattttgagtttgatgccgtagccggaggagttcttgcctgagcagaggtccggtcactcccttctctgaagtaatctaactgatttctggtattgaaacaactgtaaacagccatttccgccttcatccatggcccgtatgctgggacagcagctccagtaggaggaaaagcatacgccgttgatcgataacacatttttttatcatgaccaagataaccacagttgtaacatagctttggaagtttaaagtacctgaatagaatccattctttccttcctcttttaatatccaaaaagaaaccagagaccagctgaagggatgtgtctatttcgacttggaatttcaggaatcctcttctaatgactgttttttgatttgccagatcacttcgaatgaatcgacccgccttagccgccagagtgcgtgagttgacaccattgaggtaaggggttggtaacccggataccaaaacccagaaaattgcttttcgcatatccgcattgaaccaatctccgtcctccggccattctttgataataaggagcttcccattaataatccacgaccggtttctaagcacatcctgacagtcttcaggtttgtcaaagaaaataccccaaacaccaggcttcattgtcttgaatctccagttcctttttagcttccagatacgactgagaatctctttcagtttagttctcgacactcccttcccgtcgaaaaaactagctagaactcctgtgcttactacttcagccgtaagctcaatatttggttccaaatcaatggtcatagattgcaaaaagttgttacgcagagcttcaagctcctcattagacttttcagtgacaccattaggaggcggtatagcagatcctccctcagtttcagtagcattaacttccacattgttgttatggagaggttcaacagacccttccacaccatcagcttcattgactacctcattaatgtcttgtaagggttgttgaggaatgttaccgttgataaacaacttgcaagtgtatatcacaataagttcatgatttcatgttacaaagtgttaagaaattggatacattccaaatgacttccctatctagccccaaagtccttttagctaaattatgaaccaatacattacaatttcagtagtagggaaatgtgataaagagttgcaaatcaaccttaacagatctaacaatagaataagcatacttattcattaagtttattttatgtattttagagtctatttagtatgtattttagtagttttttttttttttgtttcagatttacacttattttctttttgttttaagttttaatagtcaaatacatcatatgagttgaaaatgagagaaaatatgttaaataagatgaatttgacagatttagcatggattttaaaattgtaagatacaataggtgaaaaattctaatgcttaacacgttgcgtttgtgatagaaaataaagtctgaatcttcaagttaatttttgactccgaattctgttttggatgttttatatatcgttggaaagcttgtttcaagctctattatttggttcgatgttagagtcctaattgtaaatatttatgaaatgttatttaagattaaccctattgtgtaaaactcagggaattatgactaggaaaactgagacttgttcaggatcgcccgtggattgggatttctcctcatactttggaaatcaagtaaaacaatgaactaatcacatagagtatagcgcggtggcgcaattatatgttatttgaattgtttttaagaaagtgagaattagggttattaccctaagtacatatatcaaaaattagggttattaccctaagtaaatatgctataagttaggattattactctaaatatatttattgtgaattaggattaccaccttaaatatatgtatggtgaattagggttattaccctaaatatgtatttgtcttaagcatgcaataatgcattatgtgaatgaatgaacataatatgcgagttagggttattatcctaaaattttgaatagttgagtatatgttaaatgtgttgtatgcatatatatatatatatatatatatataccaagagttatgtgtataaaatttaaccaaattaggcctgataaacatcatcaggatgaaccactgtgaaagcataatgtatagattatgtatatataagtagagttatgtggataaggcataaataggttagaatcactaactataactaagacaaaccttagtaaggccttaaatgtaaaagaactgtgtgagtgtaacacgtgggtctatgttacatagacattaattatagtgacattattatatatggaataatgtgatgtaaagtgcggtagcacaatatatacgcaatggcgtactgtatgaagtgtaattattatgattgttcatactgtattatattactctgtcttgctaggccttggcacgtggatactctaatgtgcatgtattagtaaagtgaggttagtttagccatgagtttgagggttttgaagatgaattgtacatgttctgcccaagttagatcatgagggttgggtccaacaagaaattgtgtagaaaatcttattttgctgcttagatcagcctgtatgaaatgacttgtaatattttgaaaataaatttacggaatcccggatatgtaactttaaatattttggttt

SEQ ID NO: 220673 - DNA, 3247 bp, Cannabis indica
ataaggcaaaataaggttttttcgattgagcagcaaattggcactagagtaactgaatgaaattaggttttagaggcattgttgagaattacaaggagcttttaggcgactcaaaatggaagacaggaagagagtaaagcataaaattattgcaagagggcctgtagtgaattctcagcaagcttaaatgttgactcaaaagttcaggaaagaagaagtgaagcaagctctatttgatatacctagcaacaaggcacctggtcctcatggcttctcaagtgtcttttatcaagacaattgggatttggttggagaggacctatatgaggttgtgacatcattcctagaaacaggttaactgctcaaggaaataaatgctactgttctgacattagtgcccaaattacagtgtcctaatattgttaatgattttagacaaatagcttgttgcaatgttctttacaaaatttcaaccaagcttttatgctctagaatcaaaaacattcttcctaatttagtctctcaaaaccaatggggctttattaggggaaggtttataggacataacattatcatttgtcaggacataattaggcattatgagaggaataacaataagcctagttgcattatcaagttggatttgctaaaagcctatgacactatagaatgggatttcattgaagaaatgttctagggtttgtatttccccccaagtttcattaacattgtgatgacccgtgttagaacaccaaggttttcactaatgtttgatggaactttgcatggctttgttgagtctaagagaggacttagataaggagacccaatgtctcccttattatttgtgttaggtatggaatacttatcacgaataatggggaaagttggggaaaaacttgacttttattttcatcacagatgtgcagaattaaagcttaaccaccttgcttttgctgatgacgtattattgttttgcaatggtgatttcaaaagtgttctctacttactacaggggcttaagttgttttcaatgacattaggattgtatccaaatgccacaaaatcagaaatatactcaagcaacatgcctgaagatcacttaaggaaacagctgtaaatttttggttttacctaggagttccaattggtgcaaagaagattttaaggaaagattgtgaagtattggcagagaaaatgactggtagaattaagatatggagttcaaggaacctttcatttgcttgaagggtggtgctaataaattctgtgttgatggccatacatggctattggtgtcaagtaatgattttgccaaagaaagtggtgaatgctattgatgaaatatgcaagaattacttgtggaatggtaaagcagtatatcaaaggcatggtgctatctcatgggaatccatttgtcaacctaaattagctagtgaaatcaattttaagaatgtggctgcatggaataaagctattatgggaaaatatgtgtgggccattgcaaacaaagaagatacattatggctgaaatgaattaatagtgtattcctacatgatgtagaatggtgggcctactaaccttcaagtcaaagtagctggtactagaagtgtttggttaggctcataaaccagttcaaggaggcaatgggagcaacaatgttgtagcgaaaatactcagtttcatagagatatagtttgctaaaaccagcaataacaaagagacactggtgtaaacaggtgtggagcaggttgaactcaccaaaacacaactttgtgttgtggttagcaatgcaccagaaattgaaaaccagagacaagttattcaatatgggaataatagaggatcaaacctgtttgttgtgctgtgataaccaggaaactacagagcacttattctttgcgtgttgttaggctatttctagcctatattctggatcaattttatgttcgctttttgatgctttacgtcaaaattacgcttgttttctatgttttcaggtttctcggagttatggaggccccaggatacaaaagtgaaataaaagacaagtggagccatgaaaaacgccaaattgaggctcggtgcacttttggccgcggcaagcctgacctggccataagtcgaatggcagagagaccatttttgagggcttcagtagctgcggcgagagctttcaccgccgtggccacgtcatcattcgtcgaggcgagagcccgtacaagcagcgttaatttcgtccgttgaaccctgaaaaacgagaaataagaagaaaactgcgattgcaaattaggggaagtgattttgagacctaaaatgcagtggagagcggctagaggtgcaaagtgaagatccaaagtcattccaccaacagtttatttctttcttcctttttaatttctttatgttgaattctgttttaggaatggttatggatttgaacatgagctaatcttccattaagggaagatgatgaatgttagttaaagtttgcctagttaatgttaattgccattcatgttcattttgattgtgtattatcctcatttgtgttatttctattttaaagcttgatcaccttttgcatgtctatgatctcaatttgaaatctgaaaaatgagaattgagaatgctaaaatttggataacctaattttttgtagaacgacgatatttacatgacttttgtgacttcttagattatggcttaatgcagatcttgtgcaattctaattgagagattcattagagagcatgagatttagaacctagaagatctgaaaagggataggttaattagaataatctgtcattcacaacaagaactggaatagtaattaggcattaacaattgggtaaacctatcaacattctcttccctatcttctcgtttctgattaatttttattgtctctttcagcttcttgaatttttattcgattattgaacttgaaaaaagattgatttgccaaatagaaacaaagatttaatctagtggtactcagtccaattccctgtggttcgacctcacctgtgtgagccactacttgattacgtacacttgcgtattatttataaaattcgtaacaagtttttggcgccgttaccagggaattgtttaaagattgatatttcatatgattagattaaattctactttggtttatttttcttgctaattgctaatctgtttctttctatattgtctttgtttatctcaggaattttaggtgtatgcaccgtcaag

SEQ ID NO: 220674 - DNA, 1290 bp, Cannabis indica
agaaataaatctttttttttttatagaaaatctgaattacacactagcgcccaggggcaaatctgctttcaaagaagcagctgcgcaatcaggcaaaaacgatgtccacacatcagaaacatgaaccaaacggctccaatttgcaaggcaatgagctacattattacacttcctagtaataaaaataaaagacagattattgaagtttttgcttgctaggatgcagtcttcaattattataccccagtccgtgttgatgcgagtctgccctttcaaagctgtaatcaccgattgactatctgaagctatgaaaatgttctgcattgatcttgtagcagcgagtttcagagctaaacggatcgccaaagtctctgctacaagcactgaaaggcagccaggaatgtagtctgttgcagcagtaactaaagcgcccaaatgatcacgaatgatcacccctaaaccacatcccggttgcccatcaatgagagatgcatctgtattgatcatgaatgaacccagtggaggaggagaccagctaaccttgtcctttgaaggcttctgatgtgagtctttgtgagcaaaagcaaggtgcagctctaacatctccatggcccaaggaatccaaatgctgtcttcaatgtccttattttgaaaaatacatttattcctacgaaaccaaattagccaagtaataccaataaagaaaataaactcttctttagaaagcttccccttcatcaccattaggaagtctggggcatgccgtaaggaagaagggaattggtgtatgaacccgaaatgcttccaaacattgtgtaacttggggcaattccataaagcatggcaaacatcctcaacatgactcttacaccagttacaagttatattcatggacatacctcgcttaattaactctgttttgaccggtagtcaattgtggaacacacgccatatgaaaattttcattttacgagtaagccaagacccccaaaccaccttccaccaagctttattagctgaattatcagaacattctgctatgttaggatccctaaatcgcaacttataaccactagccactgtgtattgaccattagtggtacggctccattcgattgtatcattcctcgctttcgaaggggtaatccccaacacccaaggaacgtcttccttatgaaaccagctagcgatctcttcagttttccattccccttcttcgattattagagtttgaattgtcacttgaacctttgtaggaagagtaaaaggagctcctctagggatccaagg

SEQ ID NO: 220675 - DNA, 2917 bp, Cannabis indica
tatctgatactttcaggggtgggggtgggtgagacatcaggatgagtgaaaacaatgagaaacttatcaaaatgccaaggttgttcttccaggacacgacggcgatccccatcacattggaaagtagccaaaaagaggccagaatggtattcagtgatttgggcagggaaacgaagagtccaggcctcagacatggccttctcgatccatgcgggcttagcagttctaggagatagaagtttgaaaatgaggcagaaggagttggggtcagaggaagaagagagtgagatgtggtcgaagtcgtggatgagactttcttcttcagagagaggagtgagaatgttagggttggtggaggaggaagccattgaaggagtagtaaaggttagggctaagatgatgagtaggggaggaatggatgtcaatcgagccaaacacagaaagattaaatagacagaggaaaggagagaagggtgtagaagatacctggagggagaaggacgcgtcaagggaagagagaagctctgaatcatcgcttcgattcctggaacggctatctgcaaaggcggaggaggaatgatgacccaggagtaaatgtttgaggcgacggataagatggttttggttgatttaggagacttgagaaagaagtagaggagaggaagggtctgagcaaacattaaatgcccaaaagagggtgccgtcaaaattaaatgcaactggaaaagagaaaatgcattaaatatgtactgagcacgaaaaattcgggggctatttgcaatgattaaggttgacatggagaatttaatgcagaaaaactgaaaggaagaaaaaatttggggcgtgaggagaacgaagcagaatgctcgcttactgtaccagagacgaacctggacaaaacttcaagaagagaaaaacaaacataaatttaggtagggttgttgttgaagaactcatattatgtctgttatatatatatatattaatctttgtattaattcttaatttttctattgaaaatccaataaatcttaaaaaaataatatttaaaattctttctttaaaaaattaagttcacttaaacaaatcagatttaaatttcttcatatttaccaatcatattcatattctttacatactaaattactattctcaaaacataagaaatgaaggtgcaaatatttttatctaaatcaataataatatattttaggttagattaatatttaattaatttttttaagaagaggcataatttagtagtggtcaatattcatgagaaaagtaattaatttgcaacgatacatgaactgtgaaatgataaaaagaacaaaagtactatattttttgtaaataaaagagttcacaaaattttgtcgccatgatgtatattttagaggatacaatttgatagtgttataaatttcgtagataaaatattattttttttttaaaatagttgtacttaaatatttttacgagccacgcgtgcggagcacgtgagactccactagtaattataaatattaaaagagtttcacgccaaatatccctttaatatattcccaaaaaaaatttatgatatattcgtataaataaagtttttatggtatatataaatgcaattttaataaaatttatttaaaatatgtcatagcctaaaaattaaataaatggctacgatattaatagaaaattaaatattattatttgggtataaaaattaactgtattatatacaatccatttaatttgtattcgaaaaaaattgctctaagttctatttttatgcaatcaaaaaaattaaatacaatcattagaaatatatatataacttatatatatgtaataaatatatatatgtgaaataatagtaaatggactcaaattataggattatgttactaaatgtcgtatttcaaaatttgtcgcaatatgttccttttttagattatttattatttatattgtcctttatcacataaaaaaatatcaataatttttttatagtttttttttcaaaattagaagaaaattacttaaaattatggtatatctatattagttttgttaatttttttttttatttgaaagttatgttgatttttttaatttttatgagttgttgtgggttgttagtatatagattttgttatagagtatatttttattttgttgcatgtatagtattttactattcttagatgatatttattttttattttgctatgtataatagaggtatataattttgttagcataatacaaatattttaatatatgtatgtaattttattggcatactacaaatatttaattattatttttatatattttaattgtatgatatatatttattttaaataatatttaattagtttctattttcttatatacaatggtggtatataattttgttatcttttaattactttctattttaattgtggtatttaatttggttagtgtatatatatttgtaatatatattttgattattattattagtttatattttgatgaatggtatatttttttgactcaaattggtatctttattaactaatcaaatcgttaaaaagctttagaggaacaatcctccaactgaagcacacgatttggagagaaacaagaatctctggctaaacagtgagccagcttgtttgtacatcgtttgacaaaacccaatttaacattgtttaaagataaaagcaacgcacgaacatcatgcactaaatgactaaaagaagatgacatagagactttactttgaatagcttgtacgcatacccagttgtctgattcgaaaattacttgtctccaattatgacgatcaatccaacttaatgcttctttgatgccaaccatctcagcaactttaggttgaatcctctctacatgaccccgattgaaagcc

SEQ ID NO: 220676 - DNA, 1777 bp, Cannabis indica
ctaaatctcaaaaacttcattaaactgaaactataagtttagtgagcacatgggactcacttcctaaaaccgaagcaaaccattcatgcaataagttgataaattggtcttatctaatgataaaagtaggtccgcttttttgttaccaaacaaaactagcacgaatttagaagatacaagcacggaaaaatataagtttagacataatacggtacgatgttataaattgatataataacacgataggaacaatatgaatttgagaataatatggcacaaaaaagtataagcttaagcacaatacactcaaaaagcataacacgtatgcacacataatctaccttataagtgcaacatgttaaaaatcttataataataataataattcaaatatttattcaagtttaaataattctaataagaattttatgtagaacattattgaaaaataatataaaaattgcttaagttataaaaaaaataactaactttagtaattatctcatcaattataaaaataaaatataaaaaattaaaatatgaatttgagcctcgtatattttatagcatgacacaatataatttgtaatttttttggcatggcaatggtaagacacagttagtatatttctatagaatgacacgacacaacctgtatttttttttatgaaactacaagtatttacaacactagtctaatttagaagagaaattgaagaatacccatttttttatatattaactatatttccctctaaaaaatttaatataaataactttttttatgagtattgtatttaaattatcctcatacactaatataattacaacataatttcaaatataataactttgtgttctttgtagatggatatataagtttgtaggaaagttggtacaaaattttgacagagaaaaataaaaaccacggtgaagtgatatgggtggaaagattgaaaagatgaaaatataatagattttggaaatgaggttaaaaattaaagacatcaaattaaaagaggtatatagtataatttcttactaatctagtgtgcgtatgatagcccaccactcctctactctttgtcaattataatggaatagagaaaacggtataagaaattccaaaacaaataaccgacagagaattacaaataattaaaaaatattaaaactgttaattattaacaaatcatccaaattaaacacataaatagtaatgctttaaaaaaagctacacagacataaatggtactagtttatttttaaacacagctagagcactagtaaatgatcaacaataacagataaataaataagaagagaaattaaattaaaaattcaaacccaaactccaatcaccacaaaacggcatcgtcttcgtctttggaacatcaaaatccgtactagaagaactggcatcggagactattccgaatgttaatcaacgtagccaagtgattatcacactcttcataccccatctcttccacaggtttctcccaccacgaattgatattattattctctaaaattgaggccaatgttgcttgtctctccagttgtcttttcttctcctcagcttcttccaactcaatcatgcctttcaccaaagtactagtactactactactgggtactacggctccattattaagatatgagccagcgacgtcgtctacattgccgaaggagaagagtttgttgttgggagagaagacaatgacggccacctccgccccacaaaggataccgagttcggccgcttttttaaaca

SEQ ID NO: 220677 - DNA, 1697 bp, Cannabis indica
gtgtatctcacttctctacttcccactaaagaagctgaagctttattgtccaaaccttggaattctactatgggaattgagattactgcccttaaagaaaaataaacctggactgttgtcccgagaccagaaggaagacaagttgcaggctgcaagtgggtgtataaaatcaaggaaaaccttgatggttttgtcaaccagcacaaggctcgattagttgctaaaaggtatcatcaacatacaaccaggttttgatttctcataaacttttagtccagtggttaaacctataatcattaggattattctcacattggctataacaaaagggtggacaatgcatcaacttgatgttgacaatgcatttctcaatggatctcttcaagagaaagtttatatgaaacaaccaccaagttttgaagatccctctcagccaaatggtgtctgcaagcttcacaaggcattatatggcctcaagcagacccgaagggcttggtttgataggttagcctctgttctcatgtcctttggattcttctcgtccaaagcagatcactctctcttctgcagacactcaaatggctctcaaacatttgtccttaactatgttgatgatatccttgtaactgacagtgacccctctctcattgaaaccttaataacatatatataccatacctttgccctcaaaaacttgggggaaatcgagtactttttgggcatagaagtgacatacacatcaaaggggcatctctcacaaactaagtacttgaaggttcttctcacaagggaaaagatgcaatttgcaaagcctaactctagactcttctctcaagggagtgatccagttgaaaatccaaagttttacatgtccattgttggaggattacaataccttgttgccacaaggcctaaaattgcttatagtgtcaacaaagtatgccaattcatgcataatcctcttcaatcatattggacaacagaagagaattcttaagtatctctctggcaccattgagtatggtctgcacctaacaaaaccattgcagactctaatgacaggcgttccacaagtagtttttgcgtatattttggatccaatcttgttgcttggcaatccaagaagcaacaaacaattttgagatcttcaaccgaagcagaatttctaagcttagcctcaataacaatagaattcacttggatcagatccctgcttcaagaacttaaagttactcttcttcacaacaaacctattctatggcgtgacaacttaagcacagtcatgcttgctactaatttcattctccatgccagaactaaacatatagagtttgacctctactttgtttgaggaaaggtcatagcaaaagagatagaagttagacatatccctacattcaaccaaattgcagactgtttgaccaaggcaatatctagctcacgttttcctatccttcgagacaaacttaaagttgaaagctcttcaactctaagtttaagggggactgttgaaggagttaattgttttgtttgtatcttgctaaattggtttttcatttagaaattctattaagtgttgttaagccatgcttttcttttgcttgtatatatataatcttctgtatcttttctcaatttaataataataattgagaaaaaaaaaagcacacatgcaattaggattttttttttttttt

SEQ ID NO: 220678 - DNA, 1822 bp, Cannabis indica
catgggattaactgatctgtataacatattggctttgaacttaccattcttactagcattaacaatatctaaccgtcaatagagattctcagtcgtaataatttcttgaaataccagctcgcatcaagtttaaactcaacttgccaaaagtcctttccctttaagcagatggcatttatccacctaacccacaagttatcgtgtttactcgagatggctcaaacaaattttgccatcaaggttgtgttccattttctaccctcatgaaagccaacgcctccatacttctttggaagacaaaccttttcccaaaaggacaagtgcatcttgcgacggttaccttttaacccccaaagaaagtccctataacacttgtcaatagctgcagtgattttctagggaagaataaacaagctcatccagaagttcctaattcccaacagaactgagtgaatcaattgcgcccttccaacaaaggacaagcttctactagcccagatgtgcagcttcttgtggatcttatcaataataattctgcaattagaggcacgccacttagtcagcctaagttggactcccaaatagttgagggggaagttgccctcttctatttgcatcatcctcaagattctttctctgtgtatctcattcacaccaccaaagtaagccaaagatttatttttgttagctgtaaggcccgtagtttcactaaaagtcttaaaagcttcatgaacaagcctgaccgagctttcatttcctttacaaaaaataatcaagtcattcacaaagcaaagattcacaagttttaaggacttacagagagggtgaaacccaaagcctttcaagcaggatctctaaatcagcagtcttgtcaagtattccatggtcagcacaaaaagaagcggagacattggatctccttggcgaagacctttctcccttttaaaggacccatggatgcgaccattcatcattagggaataggaagcaccatggaggcaacctaaaacccaatcaatgaacttagcaggaaaacgaaggccctttaaaagattagaaataaatttccaatcaacaatgtcatacgccttgctgagatcaatcttgaagatacttctacctgaaacagtcttcctagtgtaacctttaagaagatcttgaaagatcaagatattatgggccagctgcctattcttaataaaggctcactggttatcatgaattaggctaggaagcacttctgagagccgagcatagatcatcttagagatacacttgtaaagggtattgcagcaggcgatcgtcctatagtcactcgcattcttaggattgtcaatcttggggataagggaaatagacattgagttctcttggcaggtttccagattgaaagaatcccagaacggcttgagaaacatcctttccaatttcattccacaaccctttgaaaaaacctgaaccaaaaccatccggactcggtctcttggtggagtagatatcgaataatgctttcttgatatctgacttactgaaaggccgaatcaaatggatttgttgaggaaggtctagcttgttcccaaaccccagactttcctcatctatccagtagctgagcttttcttccccataaaattacagaaatgttggagaaagtgatcaaccactttgggatagtcctcaacatagagtcccctttccagtacgatacaatcctgtttctgcttttctcttcttcatgatggcatgaaagtgctagagttctcatattttacttctttttttattttattttgattttgtctatattttttaaaaatatttt

SEQ ID NO: 220679 - DNA, 4060 bp, Cannabis indica
cgagtaggggatttggttcttcgaaaagttatgccaaacacgaaaagcccatcgcatggggttttttgagacaactgggaaggaccataccttatcgctgaaaaagttggcaacgcaacatatcgacttgccgaactcgatggtactacgatttgaagagcctggcgaaagcttgaagttttattatcaatagtacccacaatgtatcgtttgtactcgttatgtatttataattagtcaatttatctacataaatattctaagtatagagggtatataacccactcactttgtactattgatagagatgaattttctcgagctttcaaaaaattgatcctaccttagcattttttacaccaagctgtaattaaaccgcaatcgagataataaaaaatgcgagtacccgtgtactgcgaaaatcttataacataacataaataaatatccccgaaggaatatatgttgttcgaaatacaaaagacaataaaaataaatttgtctaagtacaaactgcgagtacccgtgtatcgcttaaaaagtttggcaaaattaaagtaataataaagtaaataagtcaagcattgggagaagtaggggcagttggagtggttgatccatctgcaaccttgctggcggcctcgtcagcgacttcttcagtattcgcagcttcaatgtcctcaggaagaatattcccccacctccttgagtttgcgtgggcgacatagcacgaaaagcctctgccatctcagccgcctctgctccaaggattgagaagtcgaagtctggtgttttggaaagagtcgtgtatatgtagtcggagactgcttggtcgtactgtttctttccattctcttattcgacctctaggtcgcgagacagctcctcgatgttcgtctaagaaagtttgacttccagctccacctgctcctttaacttccgaaggtcctcgagctccttgtccttggtattcgcatcctgcttcagtttcttgttgtactcttgaagctggacgatctgcttcttcaaaagctcgacctccttggaaccaggaatgaatgccctcgaaaacatagtgatgaactgcgaagccaactctgcagaacgaggcattagttcctcagaaggagtcccttcaaccttcaacatgaactcctcacccacgaacttctcttggagagttaagatatctcgggcccaaatagctggatcgagcataacctttttccctttgtcctgggtaggcttggttttcttcttggacgagtcagcggctggagtaaccacgacgtcaaccttccttttctggggaacgataggagaggtcgtcgctgttccagtcttcggcttgcgattaagtacaggggcttgcttcaggaaagtcatctctgtgaggataagagaagataagttaaaataaaaataaactcaaatacattcacaagtctgtatgcgcgatatgttacctgatgttggtcgagaatttggcttggaaagacgcttgtctatcttctctttttgcttctcagatggctccttgtatattggctcccaatgaaggctagcgttctctggaattagcttgtgttcccgcaacttcaaggtcatgcacagtagtcgccagttgcgatcttgaacagggatgcttctgagaacttagcgacttctctgcgagctgggtccagtacaggtcgagcctgtctatctgcggttaataaggaagagcgtgttagacaatatcataaggtaacatgaatattaactaagtaattaaacttgcgacgtactaggtcgacgattaaaattggtcctaattccaggtactttgaacacataaaaccatttagatttccaatctcccatattggaaaccatgccttccaccccgttgatttcagaagtggcccacttgctgaagcaatataacaattatgaaggcccacgttctttatatcataaaaatagctgaagtcctccatcgaaggctccctatgcgcatactccatgtacatcgcatagaacccaagagctatgcgataactgtttggggttagttgaaagagggatacatcataccgcttaagaatagcagtgataaatggatggaaaggaatcgatactccacatcgaagtatgggaatggaaacaactacatcgtctgaaggtatgatcgcggtgttagttaaaggaaggtgcggtctttgggtggagcggggacgcgtggtgccaagtcgcagcaaattcaacctcgtaaacgtagtgaggtcagatttggtaacttgcgaaaccaagtcctcgcatgagaaaggctcgttcagttgcacgttgtccactgaatcactcccactcccctcagcatcctcttcctcatctgactcgcgatcagaagcctcccagtcctcgcccatctcttcgacttcagcatcaggagcatgcctagagtgaacgagatgttcacgagcagataccgtggactcgctatcgtggatctcgattgtccccgattcagcgagctcctgaaccatgctttctatgttcgcggaagacaatgggccaagctccgcggttttggcaatgggggtctccgcttcagagattgaagtttggatgaagctatcctcttgatcctggtcaccgtcaaaagcattgcctccagagttgagcatctggctgtccgacaagtcgctcatctgaaagatagaagatcttttcagcgtggtgaaagtgcgagaataatataagtgacctcacccgcacacaaaatataagatttcattggaaattggcttggtttctcaaaaaatggctgggtgtatcttagtgacccaaggggcaggcgttcttaagcatgaccatagagttactgggaaacacccactatttcgagaaaatccaaccaactctcccaaggcgtaaatcacacgtgtgcgataggctgggtgtatcccagtgacccaaggggcatgcgttcttaagcatgaccatagagttactgggaaacacccaccatttcaagaaatccagctaaccacaacctgcgaacacaccgcacatgcctttctagtcacgtggttgcacaaggaaaaagaaaactggctatacgtcgcaaatggctgggggtttcacagtgactcaaggaacatgcgatcgcacccatgagcattgggccacgatgacacactaaccatttgaaagacttaaccagtattcccacacaaaaatacacagagagtataaagaaaaccctaagttctaaacaatgggtcagagtgacaaaatctccagaattcctaaggaagtatacatgcgagtattcaagatgttcatccaaatactggcgagtattcaaaatagcaattaaagagacgcgaatactcaaggtattcttcctagaattcacggttatacaaatttcagatctattttctcttgagaattacccacttctaacggaaaaataaagccctacgtgtattccctacaaataaacatgcattttctacttctcaaaaattcaaaaattcagaatgcagagtttttctcaaacccagaaaccaaattcgaaggaagattcaaaaactaaccttgagattcgacgattctccctgtgaaaagtttcgatcggttcagaaactttgaagattcaaaagaggcaaagcacaaatttatctaaaagagggattttgcctttgagagttttcgggtaaatggaaaaatgagaatgggagggaaagtaagagaatcctttcgtatcaggaagcttaaatactgatagacctcataaattgggattatgacacgtggcaacaggaatgcctaaggtcttcccatccaacggttagccatgggcacgcctacacggaaaccgaagagtttcgtgacgtggcaccatcggcaggataaaatgcaataattatagccgtcatttttcgaaaccctcgatgggacaaccaaaggtcaccacctcgtgacaacttttcacctgtctctcgcttatagtttccctcatgaccgcacctgtcaagtcgcgaaactaggggcatgtgttatagtgagattt

SEQ ID NO: 220680 - DNA, 1678 bp, Cannabis indica
ccactctaatatacttcttaaaaaatgataataataagcctatggtacactatataaattaatttaggtgttaacctacactttcattttaatatacgtaattgattggtcagataaggcattatatttatttcaaataataataataatattaattaataatatggcattgtatttaatattaggaatacaattattgttattggtgcaattatattatattatattataaatttatattatttaatttacattaattttatatattcactagtataaagtatttaaaattttagagtgctctttatattgggatacactcaaattacacacacttcttacataaaataatatgtaaattaaaaataatataatcttgcttaagaatataaatacgtaattaataatgcataataaatgtatacaatttaaatgtgtatagcattaaatatttaatcttcttatgtgattataagtaggatataaaattctttcttcttttttttcatagaatatgtacaaacaattgtacaagtgaaactcaaagagtcccacaaataacaattaaccccgccgattagcggagaatacaaacatagaaataataacctctacaaagatagatataagagatagaaaagacaaattaacacacaaattagtatttagcatttaaagaaaactgacatttaagctcctacgaagctctaatccgtcgtggcaaaactacccaatatcacagctagaaaatagacccacaaaactagcacgaaagaagaaaaaccttatgagagaataagactaagagagagtaatcctcaagatatagattatggggaattcaatagctggtaaatatttcaaattttaaaggtcaacatgcagcctaatttctattaaactatgtattaatgcaagtaattcgttagctttatcaaattttaaccttacattatagtctatagattaatcaaatttcatatagattgttttatacatattacttgttccttacaaaaaaaaaacacaaaataatagagatataatatgataaagcaataaacgaaagaagagctattaaaattctgtataattttaaactagctatttacatgaaataattattagtttagagaataaattgtatattctcattaagtgaaattatggaacctaaattacaatatatagtgctaagctcttcctgcaagggaagaagagaaagttggaattctgttacaactatgcaatagattccacgaactcactaacagaaaagacaagtgttcaactaactaataccgacttaactaacatcttgatcatttaatagcctcctcaaagtggagtgtagaggtccttgacacccatcttgaagataatgtccttgaaagaagctagaaataatgccttggtgaagatgtcagctagattgttgttagaagaaacatgcaacatcttgagtttcccttgttgaactttttctctaacaatgtgacaatcaatatcaacatgtttaaaacgtttgtagaagactgagtttttagatatgtgaattgcagcatcattgtgcagtagagagttgcaggggtgttatgagaaattctaaagtcttttaagatagccataatccaagtaatttcacatgttgcatgagccatggctcgatatttagcct

SEQ ID NO: 220681 - DNA, 2136 bp, Cannabis indica
tcattaaaccataaaagtactaactgtattgtgattttttttgaatgctcatgttatcatagtagggtgtatatgcctttccagtgatcgaagaaatgccttcattggtcacttgacataccaaattttgttgggatttcttgatcataagcctcagagggttgtcacatgctgagcatctataatgcttattcagagattcataaattattagtttttactcactgaagaaataaccggagttacctcaagatcccgataagctttactcaatgcttgggagcgtcgttaggtttgtgagctgcaattaagtaataacaatgaaataccaacaagctttacttaacatttttattcattagatgttaaatgtaattacatagcttgaggggggatgcacacctttagctaattttgataaaaaagaaatagcatttttcagatttacaattttatcaaagaagctaagtaaaccccaactacactgatggtctgttcgactaacagtgtagggaccataacttggcgatggaacccttatcttacagatgactttgctacatcttttcagcttaagttcacttgcacaaggtaaagtgaatctcactttgaagcaaaatatttaggaaacaacttctttaattgtaatatcatcttagatgcaccccaatccagtaccttggtaccgacactggattcaagtggcagtcatagcgggccaacttgtatgtcccaagttataacacttttgtgatgacataggcatcctccctttctcattgggagtctttagtgttgctctcttggtcaacatctttaggagactcataggatacatcttcactgttgcttccctatttcttatattcattggaaatagaaggagaatcttcgttactgcccctgtctcgagtcgtcttgggaagtaggttaattctctcctgctcaagatcatcatgagaaacagaaggggattctttgtcattttctccctgctcgagtttgtcttgagaaatagaaggacaatctatttcactggaggcgttaacggttcattcttcttcaccttccagattaatgtccatttggaacttaggagataaataaacagtgtaatttgttgcttctaattgagaaactcctctaaccttcttggcaaacttttgaagcttgaggaaaccgtcaactttgactaaaaactcttgaatagtgtgtagtgtttgagtttcaagtcttcctagaatggactcataacagttagtccaacttccatttccatgtccttggcgtcctcactcagtatccttgtttctgtggccacctctaagaatcattgttggtaatcctttagagggttttcttcttactgcttgatacagaccaaatcattgggctcgatcggtctgtgccttgatggggagaatccgtcataaaatacttgtttgagtgtttcccaagattctatagatcctgagaaaagcttgagataccgttattgtgctatttcggatagcatggttagaaagattcggcatcaagaatcctctcgaatgccttaaatgacaggccagaagctaacattcaaacgagcttcggagaactctttgtaaataagaaccacgatcatcataagacgtgcatatcgacctcgaaaggaaaaatggccccaactcgctattatgatccttggaaccaaacttctatcgagacatccctggatacaacgattaaagacgtgtttaaatactacaattattgtgacccagtaaaagcacaaaaatcgtagctatatgattttcaaatcataaccgcatttacaccgcgtgatgtgtaatcaaaccccatgattttaggggatgattattgtaaacagattacagtcaactttgtaattaactgcccactatgtaattataaatactgcccagaaagataaaaaagaggacggaaaaatcatacaaaaaaggccctgagaaaactatcagaaatctaaataagattgactcgtggactaagcagaatttttaactgcaaaaccacgtaacaaatcctgtgtgttcattatttttccttttacagcttttattctttccgtgtgaaattgctattgtggggctcaaatttgattaacgaaaa

SEQ ID NO: 220682 - DNA, 2862 bp, Cannabis indica
aacaaaccccacataacagaatttacactgaggaattatcctctactgctgccccatccttaggtgttttaaacattttcctagcgtaaacaaaagtgagtggaggtctatcgataccgccggcctgaagtttcaccttgtcctcaaggtggaaatctagaaattgggactaaatgacaacaaagtcttcccatgttgattcgaaattagccaagtgcttccatttgataagagcttgagggctggccttgtgtgttcccgggcgaatggcgagcaaggattcaagttccaacaaccattctaagttggttgtgagtccagggggaagaggggaggcttgctagtgtggaccgagtgcagctcacagcagagaaacatggaagacggggtgaatggaagcctcggggggaagctgaaggcgataggcagcaggtccaatccgtgccaggatggaaaaaggaccaaagaatcggggagacagcttctcattgggacgtttggcaatggtgcgttggcggtaggggcgaagttccatatacacctgatcccctacttggaactgaacatcgcgacgcttgcggtcagcctgggccttcattttctgctgggcacgagcaaggttttgtttcagcaataccaaaacagcatcacggttttggagcacttcttcaacagctgaaatcttggtactagcaggttcaaaacgaaataaaggaggtggattgcgattatacaatgcgtggaaaggagtcatgccagccgaagagtggtgagacgtattataccaatactctgcccacggtaaccatttgacccattgattgggtttgaaactcacaaagcagcgcaagcatgtctcgaggcaccgattcaccacttcagtttggccatcagattgaggatggtaagcgttgctatgtttcaatgttgtgccctgcaagcgaagcaactctttccaaaacaggctgataaaaatcttatcccaatccgagacgatggagcgtggaacaccatgaagtttgacaatctccttgacaaaaatattggcgaccgtaggagcagtatacgggtgacggagagggatgaaatggccatactttgtgagacgatcaaccaccaccataatggaattaaacccattagagttgggaagaccttcgatgaagtccatagaaatatcctcccaaacttgttccggtataggcaggggttgtagtaaaccagcaggtgattgagccaaatatttattttgttggcaaatagcacatcctgccacatattgttgcactgtcttcctcatgtcgtgccaatagaactcagaggccaaccgttgaaatgttttgaacaccccagagtgcccccaatatggctactgtgatattcatggaagagtaagggaatgaaaggagatgtcgttggtaacaccagccgacccttcaacttgagacacccttgcaccatagtaaatcccccaccatcttatcctcgagctaaatctttgatcacttgagatagactaggatccgctgcaatttgcacttgcaaatctggtataaatagcaaattagggacagaaatggcagcaagagaagcctccccattgactcatgaaagagcatcaacagcccgattctccagaccgggtttatattgaatgtcgaagtcataccccaggagctttgtaagccacttctgatgttccatggaaacccaacgctgttccagcaagtatttgagactccgttggtccgttctcatcacaaatttgcgacctaagagatagggtcgccatttttgaatcgccaaaacagtcgccatcaactcacgctcataaacggacttcatgcgcgcacgaggggataagaccttactgaaataagcaatggggcggctgtgttgcatgagagcagccccaaggccagtgccggaagcatctgtttccaccacaaaaggagccttaaaatcccaaagtgccaacacgggaactgaacacatagcttgcttgagttgatcaaaagcttcttgagtttcttgtgaccaagagaaagtatcttttttaagttgattggtgagaggcctagcaacacctccatacccttgaacaaattttcggtagtaccccgtaagtcccaagaagccacgcaattctttaatgttggtaggagtcggccaggataccatggctgaaattttactcgggtctgcagccactccttgtgatgagatggcatggcccaaatattcaacttgagattgagcaaacgagcatttcttcttattggcatacaattgatgttgctggagccttgccaacactaactcgaggtgaacaatgtgtgcttcaagagaggggctgtacacaagaatttcatcaaaaaatactaagacacaatctccacggaaatcacgaaatacctcattaatgagtgcttggaacgtggttagggcgtttgttaagccgaagggcatcactaaaagctcgtaatgtcctttgtgagtgcggaaagctatcttttccacatcttggggtgccattcgaatttggtggtatcctgacttcagatcaattttagaaaaaatagtggcgccatgtagttcgtctaaaagttcatcaatgactgggatagggaacttatctgctactgtctcccggttcaacactcggtagtccacacagaatcgccaactaccgtccttcttcttcactagtaacactaggctagaaaatgggcttgtgctaggctgaacaatccccacctgatacatttctgttgggttttgtgccctaaataaaaccatttacaatctgattagttatcaatataagaagtttgaagtgatttatgtttgcatgaattttac

SEQ ID NO: 220683 - DNA, 1457 bp, Cannabis indica
aagtttttgcggttaaaggattttaccgtatggactttgacaaccaagaataaaggaatgggttgtatctcggaatcgggagtgttggagggggcgggctcatggagagtttgaatggtacattcagtttctgtgaggttgagagcaacagaaagagatttggttagttcatccatggtacaagtggacaagtattgactgggatcaggagagataatattaatgcaataggaccgaataggaaaaataaaagaacaataatacgaagcctggaagattaaactggacaggttgttgtgagtcagggataatggcaaaccgattagaggttggacagtgatattcgagagactagaaacagggtaattgcaagataatggcctatgaactatggggaaatattggctagaagattgcaacaactgggaaaactggagactagtataatgccataaccgaagtttggagaaatcagagagaaattttgtggggactgtgttcaaacatgggctcggctgggatactagattattatagtgactgtagcatatatttaaactgtagcagctattaatggaaagtttttgcagagaataacacttagtgatgataggaatataagtgcaaagccacagggatgttctgcacttatataggagaggaattttgggatagttatgaccagatttggtaactatcacatctgtagcatttactatcaaacagagttgttgcacaaaaggatttcgcatagtaccaggcagatcacagatgcagtcgaaatttaatgctaaaatttgaaaaactttgacaaaaagaataaaaccctttctggaaattaatataaaaacgattttcccatccgaaacccttttctggcatcgatttacctcagctaatttagtgggaagcccaaatttatatctaaaataccctaaggaaaacccattcctctgatgggatttgacagtgaatagggaaaaaggatcaagagagttaatacctgtaagagagtgattaatgcatgtacggttcgaacgtctgggaatctggccggagtaatgtttgatacgactggggtggttgaggcgggtcattttggagcagctgaggcggcttgaacgcgtcgagctgcactgggtgtcgttggaagatggatcggagccgcctagatcgagggatctggggcttggcaaaggttccacagagtgggaacgcgaaggagagaagtgtgaacgcattgcagaggaggaaggaagcctgttcatattgtgcatgtcgagagggagaagaagaagaaatcggaaaaggaattattttgttattttatcaatttaaattaatatgggtatttatataaataatttttatttaaggtatttcagttttccattttttttttggtttgattctgtttttcttctttttttttttttttatttttagaaagtaattta

SEQ ID NO: 220684 - DNA, 1887 bp, Cannabis indica
agaaacacaaaattagtgaccacaaaagggagccacatcccttaaacaagcagatgcaacattttttgtttctctagcccaacgagcaagagaatccgcaaacacattctataaccgaggtacgaaggaaactagcacatcatcaaaagatttacaataattcaaacaaaaggagaagatggggaaaacattccatccaaacagaagagaacctactttgaaagcgagagcagacgccttggaatcagtctcgatacaaactttcgacacattcttgtccaaaccagcctgcaatgccaaagcaattcccctaagttccccttccaggactccttccacttcatcgtgtcccactgccacccacgagtcttctagattttggtgtctatggaacaccgcgaagcctacagagtaaccaaccacagaggcatccacaaaacaacaccaatagccctcctttaatcgaccatcatccacctaaagaggcctaccatcctcatccaagtcatctctccaggaaccatctatcaagaactcagcacatctcaagtgacactccttgtaaaccaaattaatgtccaactgtttatcattgaaaaccaaatcattgcgccatttccacaaggtatcacaggcccatgcgatgaaagtccgtggatcagcatcctccagagtactccaccagcaaaggcctcttctaaaccgaattccgcgggaggcagggcatcaacaaaataggtggaaactggtttcaacctcgacaaggcagaattttcatagatgggagtcctgattcacaaagccaagcttacctttggtgggaaggatatccaaaaaaagcctccaacaaaagaatttcagtcgaggatgaattctgatcttcgacagtcttccccataacacctttggctccttgaaacgatgcacttgactgacccagcaggcacttttgacggagaaaattcctgatttagccaccttccaaaataaaatgtcgtgaccttcctgaagaggtatgattttccaaatttcttttccaatctcagcttcgatgcaatctcaaatcaagccttcattctaggcctgggtgccttccacaaataaatctttgaccttccaaaaggtatggttacatatgaaatggaagcaagccttaatgccctccaaatccttcccattgatccagggtctatcccagatttcacaatcatcgtcaacaatcagaattcccgcaccttcaagacaaaccttcctagcttcaagcaaactcttccagtaccatgagtctttcccttgtttctcgagtgaccacacactatcattattgcagtattttgccagaaaaatcttaacccagattttgtccacatccttcaaaaccatccagaagagtttacctaagaaagctatattcatatccttaaaccttctaaagccaaggccaatattctttctctgtcttaaccaaatgcccgacttgtcaataacactacctatgcaatttcgtcttctccggatgattgtcgaggcatgaaaattttttgtattaccatccccatatcgtatctagttttcacataacttttgtctcaaaattctatccatccttctttcaagttccaatatctccagttgtatctcagcttctaattccactgtatcttttgagattggaacattttggagatgtcctagctgtctacgaagatagttaagcttcctatcacagaaaccgaaaacttcttggttccatttcttcaactctctcttcgtctccgagaatttcttctgtagcactaaatcgcccctggcagcttgtgttgatagccacgagttttgaataactttcttacaatccggtcttgacgtccaaacttcaagaaatct

SEQ ID NO: 220685 - DNA, 2799 bp, Cannabis indica
atggtaattttcttaagtgggagattatctctacacattttccttgtttattttgaacaagtgttggtgttcttcttttattgtctcacaaatatgaattttgaaaaccttctgtcaagccctccaagctccaagaaaggtaagaagcgagttgttgctttgaaaacttcttcggggacgaaccctgaaccattgaagatatcaagaaagaccacaacaaataagaaatgtgcctcgactcagatggttattgagccagtcgttccccacataacctccccactcccagctgttacgagcaccgatcaacaggttctaaaatctgttcatcaggttaagttctcaggttcacaacctgagttagtgtttttggagccctcctgccccctgccaagtcatgcaggcactacaggctcgcaagcatgctcgcagctcactacttcctactggcgtcattacagatattttcaacaagatgactgggatttgattaataatggtgacttctagagcttatctgagaggagtctaaatctcactctattgattagtctttatcttcatctcatatttaaatttcttactcttcctttgtcatccttttactgaattgtttttaattgcaggaatctctcttttctcacttggctcaccaaagaggccttcaaaaaattgagcaattggaatctgagcttcgcacaaccattgaacaacatgaattagttgcgaggcaatggaataatttcgaacaaaggttactcaattaatgaaggaggctgaggagcagaagaaaagtcataaggctgagctcaaaggtgctaaaaaagaagccagtgatctccgtgaagcccatcagagaatttaggaagatcttgacgaggccaccaaaaagcttaatgaagccagcaaaaaacttgaaagggtcaaggaaaatgccatagctaggataaatttgatcgccaaacgatctatttattgaccttgggtggcaaatccaaatatggacctaagctttttgggggaaggagtcactgcgatgttggccttttgcgagcaaaccaaaaagatgaagcagggattgctaaggatgaagaggccgaggaagaagaagaagaaccaactaagtctccaaccaagtagacttagttatttttattttaatttctgaacaataaccttttggggaagacaatggttgccccttatggcattttttgtaaaaattttattttgttggatggccaacattgcttatttgtataatcttactttttatgcctcttatccttcttttttcgagttatttatgtttgtttattgcattttagttcacaatcaaacatttttctttctcaatttctcttaggatatacttgagttacatgtgttccatcgtcattatcataatttagacgagtaattaataatctaccacgtattttgcgagcatttacaatctgctatgttattcgcgagcattttataatctgctatgtttaaagcaaactttcaattttctaaaaagctcttttgaaaactattttgaatatttttgattgcttatatgaataattaatcctctattcatatttttagcttatgtattatttatcaaggcacgtttgtgtctcgtttacaatctacgctacaaacatgtgagctgttattctcagattacatatagctttctattgttttatgagaaaaagtctcacttacaactgctattttaattcttttttttaaagaaaaggtttttcaattcttgactttgtactgtccaaagacaattttaatcaattatccttctcctttgtgaaaaaatttcaatttttaggttttttgcaatacattatatatttctaggtggaatctagttattatacacatgtatatgcccccagttaattttaaaggaaataagctttgtaattacttgaaaaaattaaactttattcataacattgatcaatcattagagagataaatacaacatttatataataaaattgttggtaataaggccgtaaatgctcgttgttccagtgagtctttattagctagccattaagccaagctaatttataaaccccagttcctacaacaacctcaataatatatggaccttcccagtttgggttgaacactcgtgctatgggatctcgcgtgtttgcaaaacacgtcttaataccaaatctcctaccttaaacaaccttttccggactcttttgttaaagtatctcgttatttggcattggtaagctgcattggttatttgcaattcattgcatttttcttcaagtaggtccaaggacatattcaaaagttcttggttttgctcttgattgtagaattcgcgcctgtgggtcgcaatgttaacttgggtaacattgctttcaagtcgaatgccaatgagaatgcagtgtgtcctgttattattttctctgtagttctatgggcccagagcacttgtggtagttcgtctacccatcttcctttggcaacatataacttcttctaaatagtatcctttaaggttttattaacaacttctacttgtccatttgcctgaggcctcgatactaatgaaaaccttttaatgattttatttctttctatgaactcagtgaatagttcaccatcaaactgagttccattatcagatactattttgattggaatgccaaagctacatatgatgttcttgataacaaaattgagaacctttttgcaagtgatggaaactaaaggtttggcttctatctattttgtgaagaagtcgactgccacaactgcata

SEQ ID NO: 220686 - DNA, 2765 bp, Cannabis indica
aaaaaagaaaaagaaaaatacacctcatatgtcaaccaatccaagagctacttgtgtaaattgcagagaccttgttttggtaatgaatgactataatgaaacaatttactcaaaatctataacttggggtctgaagtatattttaaggacaattttagaacgttggctattgtgaagggacaattgaccttttcactttatttttatttaaacaaagtatccctttgctattgaatgaagaagggaggagagaagttgagagacttgatcaaagtgtttgcttatccttgttatgtattttaatttatagctgttgcccatatcttttgtttttattttttcgatgtatttgtaacttcttaaatatcatttcaatgagttaaatgaattggtattgactacataaagtatctatcaacttagagcataaagcacatgtagaacattttgattatatttacaaactattcaatatgcgtaacaaaagaaaacgaaacagaatgaacaaaaaccgagtaacatatatgtgctaaatactaaaatttaggtacaagttagataatgaatgctcaagcctattctcaaaatgatatatattatatagaacagaagatcttcaccattaatttgagctccttcaataaagttccatctgctgtgcaaatgacatgttagtgtgtgggatatagttgcttggaaagttcttaaaaaattttgagcaaaattaatagaataagtgaatgtgaataagtcttctaatatattaatactctttcagaattcacaagaactaacagtaaaagctaatacaagtgaaatatgttttagtatattaccaattagttagttggtctggttcttcttccatgttcttggctcccaagtttcacataagcattttttatatgttgtaactccttgatcacatctcctatgttcattctttcatttggtgaatcttttgaacatgcaagtccaatctccaatattgaaatcaagcacttgcacaaattagtgcttatttgatctgggttctcaaaattaatgttactttctccttctgtgtaaatttcatcagttcctctattgttattgtagttttctcttctcattgtggtttctacagcttctccacttagaagagtggagtccactacttgatcaactctttctggcaatgccatctgaacaaagttatggagatttagatcatccttgaatgatccatcagttgggctccttcctgtaaacatctccatcactaagattccaaaactatacatatccccttgctttgatggctcactgcccatcgcatactctgcatctcataaattgttaaatatacaattctttattaaaatatatgttttgtacaaaaaaagttaatatctagaaattaatgatttttgtacatctaacttctgcaaatgttaaaaaaagaataaattgattgggttcgcgtcatgtgcattaaaaatatataagatagtacatcaaactttgtgtaatcttagtccaagaaaaagtatctcaatgcactctagcccaaaaataaacgattagtcatttcagtactatttgcattatttttgtgataccaatgtagtttgattctttgccactaagcttaatttacttatctatacttttgcagaaaaaaaactatgtagagttcaattattacctggtggtgcatagccaatggttcctttcattccaattgtgctgctttgagtttcacacaattgattggtgttaaagatcagctttgctaatccaaaatcactgacatgtgcaaccatttcattgtcaagaagaacattgcttggtttcaaatcacaatgaatgattggatcgtcacaatgattatgaagatagcatattgcagaggccacgtcacttgctatagttagcctctgaaaaaacttcaaaccccttgtttggttttctccatgcaaccacttatctaggcttccatttgtcatgtactcaaagactaaagccttaaactcattcccattaaaatctatgcttgagcagcatgtcaagatcttaacaagatttcggtgtcgaatatttctcaatgcgttacattcggcaatgaaactcttggaagctcctttctggtttagattgaggacttttacagcaacttcatctccttcttgatcaagtacgcctttgtatacagagccgaagctaccaattccaatcatcatgctttgagagaatccattggtagcctggtgtaaactatggtaagaaaccttcgaaagaaagttgatagtagagagttcagaattagataaagatgatctccttattgatttcctcctccaaaacagaaatgatagtgatgcaacaaataagacagaggcaatcacacagacaattatgattatcagtttgagatcttttttctttccatgtttggattcaatgattgcttgacatcttgaaagttggaactcggtacaccaccacaaagcctggcatttccaacaagtgatatcacagtagtatttttaaagattcctttgtctggtacctctccctcgagctcattgaaagaaatattcaaatactgcaagaatttaagtctctgtaaatccttaggaatttttcctgtcaagttgtttcgtgaaagatccatgtaaacaagacctttgagagatgccaaagaagaaggaagaattccttgaaagaagttccctcgcaaggaaactgattctagaccactacaatctccaattgtgtctgga

SEQ ID NO: 220687 - DNA, 5581 bp, Cannabis indica
cactacaacatttatcatcaatagcggtagaggagtttgtcgctaataactccaaaatccgctgctataggctattagcggtgggaatccaccgctaatagtctgccactattaatggttattaacaacggaatttagttctgctactaataacattaatagcggcgattattagcgggttcccgctgctataactagtaaaaaaacaaattaataaaaattaataattaatataaatataaaaataataatttaaataaaaattaaatataaccaattacaaatattataatttaacactaataatatttattaatgctattaaaaggtctcaaattaaactaaataacaatgttcaacattaatactatattaaaatgtctcaaaattaaactaaattattaaaaaacataaactaattattccataaaatcttcattaaggtctcgagttacaaagtcttgatacacatgattattattcagaggtcctacccaacggatgtggtggagaagtaacatatggttgatgacgataaaccaagtgttaggttctctactgagcttggttgagattatgagtcgaaaaagattgttgctcctacgatgaactcccaaatactccaaaattagcaaaatttgagccgagcggaggagactctgatagggttctatataagaactgatttcctaattgcggactagactgatattgttgttgacaatgtaatattagaagttttttaaattttattacaaaaatttaattgttaataaaattttaccagcataatattacatctttaatatacaaaaaaaaaataaacttaaattaaatacaatctaaaaattattaatgcatctaaaataaaataaaaaatacacatattaatacaaatatatatttcacaaaagaaattttgtgtacaccttctccaagctactaaaaatccaactacccttttgctcaatgtaaaactaacaaaaataaaataaaaatataaaaaaatacataataaaaaatatatatacataaacaaatttaaatatatatattatacgtgtataactatatatacattatatgtattatatatgtatgtatatgtattatatatatctacgtatatataatatacattatttacatttataaataaatctgcaaatcttaaaaataatgcatatatctctaaaattcttaacaactctaaaaatagatctaaaattaaaacaaaatgaaataaactatgaagaataaaatatatctatactacacaaaaattaatttaaatatacttaaatgtacacaaactgatgtacatgcatgtatacacaaaactaagatatatataaataaacattatatatataaatagatttaaaacctacaaataatatatatccctaaaatctttaaaatataaaaaaaccacaaattaaaaaaaattacttacatgaatgggtttggtgcgtggtggtactcagtggtgcgtggtgtccttactgatgcgtggtggtactcggtggtgtgtggtgtttttgctggtgcgtgatggtactcggtgatggtggtgaagaactcggtaatggtagtggtggtggtgttaattggtggttgtaaagaagggttgagagagaggactgaagaaggttaaaggactgagagtaaaaatagtaaaaataaggaaaataggtagctgcgggtatttatagacttattcgcggcggggtctgcccctaatgccctgccactaatagatacttaataatatttgaattgaataggcgagaattttctcgcccatttattagcagtggactattaccggtgggccccgccactaatactatcactaccacaaaaatgactttttacttcagttgtaaaatgacacaaaaatattttgtgtcggttgcacaaactgacgtaataatagcagacgcatatagtcaagttatttgcttcatttctaaaccgacgtaaacttttttttccttcggttgagaactgaagcaaaaagtatgctctattagcgtcagttcttgaatgaagcaagaaacttagcttcaaattgtaactgaagctaattagattattgcgtcagtaacaacttgacacataattttacacattttttttactttttatgtcagctataaaatgcgcattgctgtaggtaggggaaaattgcaaaattccttaaaattttccccacctggatttttcagattttaaaattgactttcataacaatatttatatgttacaaaaaaatatttgtatgactagcaataacatttataatataataataataagatttttcatgtaatttagaaaattatataactataaagcacatttaatataatcaaaagtaacgatcataaaaattgtattctacatgtcataataaaaaattgatataactatgaagtatatcaataaaactaagtatcaccaaaagtaacaatcatatagctaatagttttatatcctacatgtatcataacaaaatataaaaaattgcatactcattctttcaatatataagacttcacaaaattgtcccattcatcccgtatttcgtttatctcctgattgctgtaaggattgtcatctttgaattgtacaaccagagatagataatattaaatttatttaaaataaaaagtaattatcaaataaaaatcatatatctttaattacctcattcttcaaaaaaattgcaggattgtgctgagtcatgaagcttttaataatcttcatacagtaatatccacactgtacattgtccggttttcctcgacacttgtattgcctgatctttacctcaaccttatttcgtattttttttttttgaatattgtaggtttccaaagcactacaccaaagagaagttagtgaccaaattagtaacaaaagttaaattaatgaaaaaatgatagaacttacgttgtgacacattttctaatttcattctgaattggcatattctttgggtcaaggaatgccactaactaagtagcagcctgaatgatgtcaccgtccaatgttcaatacacataattaaaaagtttagtcaactccataattaatatatatttacatatattaaattacaactttacttatagtggattccaaggacaaatcaaccattgatcgagttttgtttccatcaatcgcccaatgagattctttgtacgtttcttaggatctttacaagctattgaggatactggagcaggatttaaaaagacatacgtattgttcaacccactaatattgagtgaatgttcctgcaaataattgaatcacaatattttattaaaataattctacaaataattattaacttaagtattaaccactatacctgtacgaaatagtcataacattagttccgatccatcccaactcgcacacatccaagacatcttcattgtctattcaacactcatcgtcaggtccaaacaagtcaggtttaagctcatattgtactattttcttcttatgccatttctgcacaatccctgaaagcgtcgtcatcaacaatgtcttttcaggcggagtgtaacgtgattcatgaaatgtcactggcctcttttggtgtatcaatggctgagtaggcggagctagaaaatcttgggtagctttcatctttcctttcccctacaacaaaaataactttaattaaaaaaaattaaaagtttcaacattaagtttaatgaaagttacataaattacctagactaaacgagcgggaggtattttaattagtttctttggccaaaagacgaaatgttgcacaactaaacccacttggtagaagccttcctgctttagaggacatgtcagactggtattttcgttaacaaccttttctatgaagacacgtttcaagtcacagtacttcttcttttctccatgtactgtgatttcacctttgtcatccatttttttaaatttgacatacccaaaaatgcagctaagccgtctccttccatgttaggatcaatcacatgcaaactacactttttatagtcttcatttgcaaaccatacattacacaaacttgtatcccaatataaaaattaaacaagttcactaaatagaattgtaatttttttaaaaatgcaagtacaaaataccttatctcaagtatctgaagacagtgctggtgaagctgatgccctaacgactattggtggtcatggaggagaatagtccttggtagcaagtgttggaacagtggtagtatcaacatgaggtaactcaacgcctagtgtagagaccctggtagcagaagctggctcgttggatgctcttccaacacctaaaccatatgcgtgtgaggtgccagcaacaccgctttgttggccttggactacttggaggaattgttttaataatttgtcagtccgactacccctttcctttgactcctgaagtcgcttctccatctaacccatgcgatcattattattagatctctttatttttggaagtatagttttaaaaaaattgtgggtgtgctacgccacgtacgccccatacccctaacatttccttcgtgctcttctgtccccaaagccatagtgagtatgtcttttttgccttccaatattactgtccattcttcaacttacttccgtaactcatcctacattgaaaataatagttagtaagaatttgaacaatgtaaaaatattaaattagaatttgaacaatataaatggtagatgtaacttacagtccttttggcaacttcctgagcagagccatcaagctcgcccctcttattagtgtgtaatttgatccacaagtcacatctgtcgtatgtagtaagttggtggcccaactctctttccatatcttcttctactttcttaacaccacctcgccccccgtggtggttatattgatttttggccctaactccttgcacttttgctcttgctttctcccattcaagagttaatcttgaagtatcaaatgctttccagtctccaggtttctagcagccgaaaaaattatctagaggattgtcgagcatttcaggagctttgtctttgtatttaaaaatgttgttatttgtaagctttgtcttatgatctttccatgtatctccagcagtttttaggactaattgtgtaacaccctaactagcctaggcgtgttaacgtgattttaaacttgctgtgcagctcgttgctaatcaacgaggttaatgaaaaacgtgattaattgaaattttcttatttaattaaaacttgtaatattacatacaaaatatttcgggatcccatttacaaaatactttacaaaagttagctattcatttacaaaatatttgtcgcccagcgactaacaacaaaagccctgatgtcccaaggatcgtacgctccaggcctaaccgccccgacatgtacaatcttcatctcctcgtcctcacgattcctcagctttgaccttgcctttacctacacacataaacatagctctgtgagtcgacaaactcagtaagaaaagcataatataaacatacaaataacccgagttataacctggcgcc

SEQ ID NO: 220688 - DNA, 1810 bp, Cannabis indica
cacatacaaagcttgtctatttccttgattgtgccttgaggcaacaagaaaatattcatccaataattccttagacccaacagaacaaagttgattagttgacatctccctacataagaaaggtgcctaccagcccaagtatgaagttggtttttgatcctcttgagaataaccccatcgtcctccgctttccactttgttggtctcataggaaccccaagatattttagggggaaacacccattcctcaatttgtaagatctcaagtaaatcagacctatctcatctagaaattccatcaaagaaaacttgagatttagcaagattagctttgagcctagtcctattactaaactcctcaaatattcatttaacacaagccaccgagcctttattagctgtgtagaaaataatgagatcatttgcaaaacaaaagttaataattttcaggttcttgcattaacggtaaaacggaaactccttctcccttgcccctgctgtaataaccgagtaagatactccataaccaatacaaacaacatcggggagataggatccccttgtctaagacccttagctcccttaaaccctttttgtaatcagctattcatcataagcacataggaattctcccttaaacacaccataatctagtgaatgaacctagtaggaaacttgaaacttttaaataaattttcaagaaatcccaatctaccgtatcgtaggctttactcaagtcaattttcagtgcacatcttggagaagcactttttctactataattcttaatcaaatcctgaaaataaggatattatgagccaaagatctacctttaacaaacgctccctggttttggccaatcaacaaaggcagcacctcagataatctaccgcagatcatttttgagatacacttatacaacgtagtgcagcaggcaattggcctgtaatccaccattttacaaggcatttcaacttttggcacaagggcaataacaacttcatttaactcttttgccatcctcccagttttaaggaaatcaagaatagcctccgctatctcatccccgattaatttccacatggctttaaaaaatttataattatacccatctgctcccgggcttttagtgcttgctatactaaagatcactttcctgatatcctttttactgaacttctttattaagttcaattgaagctcaatactaagccgaggacccatctccatacatctctcatcaaagttctgagatctagaactcttgctgcccatataatttttaaaatggtgaactaccttattgtagtcttccacagttttcccatcttcattaatgaacctgacaatcatgttctcctgtctccttttcttgatgcaagtatgaaaaaaagtgttattatcatcacctttgaacagccaagttatcttacttctctaaaccaaaaaactctgatacatggcagcctgttgttaaaacgtagcagcaggatttccttcctgtaactgagccaaatcatttgttggagccgcttgtgcattggttaaggcacactggtaatcaactttagcttggtgataattctgttccacatctccaatttcctcctttttgaagcttttgaggacatgtttaagcctcaaaagcttcctaagcacacgatgaagcccagaacctgcacagggttcattccaattggtagtcaccacctcctgaaacttactctgagaagtctaagattaaagaatcgaaatggcttgatccctaaattcccctgttgttgggttttaaccacacaataacagtgat

SEQ ID NO: 220689 - DNA, 1875 bp, Cannabis indica
ttttgggctgtacaaatgttcattgggccggcccacagtattgttgtaatatttttccatttttagaatattcctgtttttttccctatatattttagtattttgagtgctttatttattttatatatttaagaggaatagtgtttaacagtttaaaggagtcaacccctacaagtcaagcaaaagtaagcgacctaaatttaaagtgataatggagaaggtaataaaatactattgagtcttttacaataaatttaaattctattaaaataggatacactattataactcttaattattttagtacttaacaaaatttattacttattttttttcatagttttatatattataattatttaagatattttctaaaattttaaaaattttaaataatttacaatatataattcagtaacacgagtataaaataaaaaagtcagaatgtctatgaatataagaaaaattcatactaattttttcctacaataaaaataaactaaacatagtaagtaatcacttaaattccacctaaaaaggagacaaaacaacgcgagagggtgtattacccatatgacgaaaattcaataacagagctaaggaggccagagagtgtatgacccctcccatttttttttaaattacatgtaaaatttaaataagaatgaaaataaataatttttaaaatttgttacatatattgcttcttttttaatttatgggcttcgccattaataataagtctgcattctccctcaccatttaaaaagtcttcatagatgttgagtttgagagaaagaaagaacaagaaagacagatgagaaagtgtttgtattattgattgaatgaacaattacactttacagataaatagagcagagcttatatacaaggaaaacaaagcagagtttgttacaagttagttaggtgacagctaagcaagactaactacctctaacagaaagctaactaactaactaatggacagttgtgaattactgtccttaacagcccccctcaaacttaaggtggataaagagaccactgtgagtttgtccctgagaaaaggaaacctgctactcgatattgctttggtgagagaatcggctagttgatcttgagctggtacatgatgaacctgaagttgattttgcagaaccttgtcccgtacaaagtaaagatcaatttcgatatgttttgtacgagcatgtagaactggatttgcagccatcattactgtactcaagttatcgcaccagaccgtgggggttgaggagggaacttgcagctcagtaagaagggattgcagccatgtaacctcggttacaactgcagcaagacttcgaaattctgcttctgtggaggatcttgatattgtttgttgtttcttggatttccgggcaactagattcgagcccaagagaacacaataaccactggtggacctcctatcatcaggatcagacgcccaatcagcgtcacaaaacgctgagatatcaaaatgagtgtttttctgcaagtgtaacccgtaatcaagagttcctgaaagatatcgcaagatccgtttgacagctatccagtgggactccaatggtgagtgcataaattgggatactttgttaaccgaatatgcaatttcaggtcgtgttatggtagcgtattgcaaggcaccaacaacagatcgatacaaggttggatcgagaactgagtcactaccatattgagagagttttaggccactggtcatgggagtgctgctggatttagcttgctgcatttgtgttctgcacaagaggtcttgtaaatactttgtttgtgacagatggagacctgtggtagtgtgagtgatctgaattcctaagaagtaattcaagt

SEQ ID NO: 220690 - DNA, 2712 bp, Cannabis indica
tttaaaatacataaaaaaaaaaattgatgaaaaaattataaaaaaatttctatcaagcatttgaatagtctttccttctattttaaaatggaataatcattcactaaaatagtgtaaagatcattctaataaaattatattccaataaccaaacaaaaaaaataaaatgaaaattattttcaattttccattctactctattttattacctccaacaaaaatacaaaaattatcagagttcccttgctaatattgatacaaatctacaacaaaagaaggtgcttctggtttattagccaaggagagaatagctgtgagggccaccaccaggcctcatatcacccttatcctctctctctaattaattaagagagtaacaacaaaattccccaaactactgtttgtgccatttcacgtgttcctttgtcattttctttctatcagtatctataaaatattaacaagaaaagagcattataaataaataaataaataaataatggatctaacatcacgtgcaagttgcaacatttcttttagaaaataagaacaatttgattgtgaattgattaaacttcaaatattgatggtaaaataatattgaaaaattttatattacacccttcaaaaagaatttactgatatatttttatttgtttcgatatttaaaataattttttagttaaaaattttttttatagtcaagtacattttggttatttaagatattatacaaaattttaagaaatttagaaaaatttaacacgcttaaaatagggtttaaacagtgtgtcgtacgtgtgactattttattttatacacgtataaaataaactatttgaaccttactttctatattataattattcagaatttcttattaaaattttataaaatgttttaaataattataatgtacacgaatataaaaaaaattagactaaatttcttttgaatgccgaaacaggtaaatggtgtatcagtacattatttttaagaggtgcattgtagaagcacccaataatatatatatggaaaattttacaatgtacccccttaaaagagatgcaccaatgcatccctatctgttttggtatctggaataatttttgtcaaattttttctcagtcatgtctgttatagtcattaaggacactcaaaattttaaaaaatttagaaaaatttaacacgccgaaaatacggttcaaacattgtattatacgagtgactattttatttatactcgtataaaatagactgtttgaacactgcaatctatattataaattattctaaatttcccaaaaaaattatgatattttaaataactataacgtacataaatataaaaaaaaaaattaaactaaaaaattcttttgaacaccaaaacaaatagagggtgcatcaatgcattctttgtaagatggtgcatcaatacatctattttaaaaaagtacatcaatgcacccctttaaaaagggtacattgtagaagtaccatatatatatatgctgtatttttaatggtgctaatttgacaaaataataactatatttttttttctttaacgtggttttaatatatattttaatttataatattatcattatttaaaaaatatgctcaatttattaataaataatatattttttttatttttgtaaattttcattttaatttattattatatagtgatgcaaaattataaaaaattgtactaaatacaaccaccagaagagtcgttatgtcaacctgagcacccagtgacttgggtgttgtcaccctaggcgtccagcttttcatctacgctccagtggcttcgtttgtttcttgaaagcactcatatcttcctcatggataaaaataagagaaattcccataaaacttccttcgaaagaagtccatgagtgccccaggttgagatacgtcaacctgcttgcctaagatggtctgggggcctgcactaggcacccaggtgagggtgaacatctttgaaatcggtctcattgatgttcaatcttctttttggtgaaaagtactccacgaatttcagtttcgtcgaatttgcatgggcgtcacccagtgaaaggaaattggtgcccaggttggaatgtcaaactaggcacccatagttgtgattgggctcctttgggatgtcgttgatgacatatcatgtcctggcgtcgttccttgatttatttgaggaatcaaggtccaagaatgttcccagaaacctaaaccctagccatggtgcacccagatcgactagatgacaacttgggcgcccattagggcttcatggtgcctaggtgtcgttacttgtagacttatctccaaagtctaaaacttggttggggcatgtctctcatgtatcttaggaaagtggctaagcaaattgccataagaagttgatggaaaccaaaactaatgcgagacagcataaaggatgtcaacctgggcgcctagcactgatgttggacccaggttgagccctgggatgtccatgtgacatcctcaactttatggttcattattttaggatcactaggacatgtttgtgtgacctttgtcgaaggatggcacccagaaacgtctttgctcgatctcggtgcctacctagtcacccactattatcaactagggcaccgacacagtttccaatgcccaagttgaccattgtcttggtggttgggcatgttgggttttatgccc

SEQ ID NO: 220691 - DNA, 4683 bp, Cannabis indica
tcaaacgtttcaggaaaagaggcaagttatgccaggtttacaggacctttcgagattctagagaaggttcgacaagtggcatatcggttagctttgccttaaactcttttagcagttcccaacgtattccatgtctctatgttgagaaaatacgtttcagaccgtgctcataaacttagttatgaaaaccttgaactgcaaccagatatgtcttatgaagaacagccagtacagatccttgatagaaaagataaagttcttcagaataagaccatagctttggtcaaggtactctggagaaacagcaaggtggaggaaaccacctgggatttaaaatcaaatatgagagttcaatacccagagttattcaggttagatttcgaggacgaaatcctttttaaggggggatagttgtaaagaccgcttagtttaaataattatttatgatgatttatttgaattcagaatgcattttatatttcatatatagaaatttcatatttttgcatgttcagtgtccggcaacattggaacgcagtgtacggctcagtagaaccacattttagtattttggcaaaactagcggtactctatgtttaacactattcttaattctttgtacaattacatcttgttttccatgtgtttattccacaagaccaacattttgagtatgaatcaattgcttgatcaaactttgtttttgttggttgttggctcctcgaacattccaagatagtattctatccatttgaaagggaggctctccccctcctcctttcttatctcgatctacaccttgtaattcttgtacctcctctgttgaagtttcttcttgcagaacagtaaaggaattcctagtgctagtgcctccttccaatactttctcttttaatttccagcctttactgactaactgaaatccatcagttgatgctggtttttctccctttgaattctctctttgctctttgacaacccactgctgctatttctgggttccttgtgtcttcctgcagtccacagttttgtgtcccaaacccttacagttgttacaaattgtatgcttccactcatacttaattcccactttttccattcctccatattcatcctcaaactctattgattctggcagttcttgattcatgagcacttcaagaaggacccttgggaaagttaacttctgcctctgcttagttatttcatcaaccagaatcggttcaccaatctgcccaaccagtttaaaaagtgtattctgaccccagtacttcaattccaaattctcttgctgaatccaaataggcaccttccttatatcctcctttcgaaaattagtatcaggattccaggctttcataatgaccggcctcttattgaagaaagtatagcccccattcaagacagcattcctctcttcaacagaagtgaatcttatgatgaaaattccatacgaaattagccctaccctatcaactttttccttccgaattcttctagcaaaaccttcaagcacttctaatggaaggttaactcctaacacataacaaacaatagctgatttccaaaaaaaaaaaaaaaaaacctacctccttaatatcatccagtgttattttcacattaggttttccaacattctgaaatgtagagctcagatttcgaacaacagatctagatcgtaagacagggggaacagagttcttaccttggctaagatcactgttacattgcctatttgcctctatgaagtgtgcgaattcagttcgaacatcatcttggcgttgcaactctcgaagtgaagatctaggagacaagattcacatacagaaagagttccaacttttagttctctcaaagctccatcttttgttagtcggtttattctgtctaggacaatatagcctaaacatatatatgccatagatatatttcatcatcatttgaaacctttttcctcttattttgcagaggcaatgctactccaaacaattcattatttaaaattaatccctcacatggctcaagcacataatgtttgttactctattttgcagaacaaataggtgtaccattcctagaaataataatctcattattaataatccaatattgaaaaaaataatcatgcaaaagagataatgaaataatgttcatgatacattcattaataaaataaatattgcttaataacaaaatttattgtaaaatttcaaacgaactctaccaacacccttggcagacacttatgatccattctccaagcgcatagtcacctcgccatcggctagctcccttgacgattaaagtatctacatagaagaacaaatatgatttacggctccacaatcaacaatccataagaatttatcatcctctatagaatttgatcttcaaaacatagcttgcgtctcccaaatccttcatttggaatttttcagctaaccacttctttacatctgatatcctttctacattattcccaataaatagaatgtcatcaagataaagaactaagaataccactacattactattaatgtattcatatacataggccttgtcctcattttgttcgaagttatactctttaatacttttattaaagttggtatttcacgatctagaggctttctttaatccataaatggatttaagcaacttgcacacctttcaatcttttactagtaacacatacccttctggttgttccatatatatggtttcatcaagattttcatttcgaaaagcagtcttcacatctatttgtaatatctcataggcagctatgtgaagaagaatgcaagtgaatttaagcattgtcacaggagagaaggttatgtcatagtcgatgccttctcgttgtgtttagcccttggctacaagcctagctttaacggtctctaccttccttttagcatttctcttcttcttgaaaagtcacttacacccaatgggtgtaatgtccttaggtggaatttcatatttctagactttattggtgcgcatggaatctattccatggcattgttccacttatctgagttagggtcttccattgcttctttataagtcaatagatcatccttgtctgtgttagagacaagaacatgtacttcatgttcatagcggacaagttgtctcactatcctcccactaaaaaaatgtactgggttttccttttcaggaactgtggtattcgttgtcagtcgttcaactaatggtgctgaaatcattggttcagaaatctcatttctaatttcttcaaatttcctctgaatatcttatagtcatacacagttcaaagctaggaacaagttttctagtcttcgatttaagaacatgagcaagacaacctcaaatacagaaatgtttcaaaactaggttttgtcccattccataattccataggagtattgattatgctcttcaagggtactacatttaaaatgtaaggagctaccaaaagcgcgtatccctagaagtgtaggggcagtgatgagtggcacatcatcgatctgaccatgtctaacaaggtttggtttgttctctctataacaccgttctggtgaggttccccaggtgcggtaagttgggacaagatcctttcttccagaaaattgtctttgaattcggaatccatgtacttgccaccacgatttgatcgaagtgtctttaatgatttatctaattacttttcagacatagccttgaagtctttgaactttccaaaagtttcagatttcttggccattaggtaagtatgactgttatcttgaataatgatcaataaaagtgatggagtattcataactacttcgagcttgaatattaataggttcgcacacatcagtgtgaataagctcaagttgttctttggctcttatgccttttacaaaaaaaaaaaaaaaaaaaaaacggtctttgcgccatcttgcctccttgacaagattggcatattggaagagttctaacttttagttctcttaaaggacaatcctttgttaaattgtttattttgtctaggccaatatgacctaaatgtagatgccatagatacgttttattatcattagaaacatttttccctctaattatgttgaggcaatgctagtctgaattattctttaattgctcacttagcttgagcacataaattccattactttattttgcataaaaaaatggtgttcaacttggaattaataatctcattattagtaaacctaaacgaactttgccaacacagttgagagacacttgtgctccattttccactcttatggtcacctttctattagccagttttcttgacaaattaagtatttactttaaagaagaaatattattagtagcccctgaatcaacaatccataagaattaatcatcttctactaattttgcttcaagaacaaataaatcaaatttaatttttcttaagctcggagagatacttgttacaatttctcttctagtgtcccattactccacaatggaagtacttgcattttgcttttcttgtccatggacatagggctagcttagttctccttcgcttttggtgccttcttgcctttcagcttggtcttcacattgttgttcttaccgtcccatttcctttcttatccgaataagaaggaaagttagactttccttcaactcatttgactcaccttccttggactt

SEQ ID NO: 220692 - DNA, 1913 bp, Cannabis indica
tagctatgttgctttatttttgtttatttcaaaatttcagcatgtttgttaggaatatttgttttaaatgaatataatgaaaacaaaagaagttatagaaagtacctaaaatgtgtttaagaagcaactcaatatctaatatagtaattttctctatatttaataattccaacagtgtattatgtatgtcaaaacatacaagtcaaacataattaacttcctaatttatatggacttgacttcttttattttatttactacatttgggttaatttgactagagtttccattacagattaccaaaacaaaagaagttagagtaggtaagtaaatcctatcattttcctcaaaatctaaacaactatgtttggaatgtcattacattagccatcaccattccaaaaaaaaaaatgttgtaaatacaatcatccaaactaattaaaattatattaagtttctaacatggaacttaattaattgttctccattttcgtgtaagtaagcaaaaaacaatagaagaaatctctctttctttttctcaccctttaaagtggttcaactacataagccaccatctctaaccaaaataaaattaatgtatatagttttatcttgtagttacaaccactaatgtatgacattatattattttttttttgtaattattataattatttttcattcaacaaagcaacatgagctagaagtttcattaaccatattttttcatcttaaatttatttgggttatctttaatatctaagtataaaccaatgtaacactttcttagtttctttcacttaccaataataataataataataataataagaccaatggcttcaacaacaacaacaacatcaatcagtgttagattacaaattccagggaatttgtacaaagcagagaagaagaacaacaatgtaggcttggccatatcaaattgttattaccactcaagaaatggtgcattaatcaagttgaaacgacggcgttttagggctatagcaagtgctagtaaaagtcctaaaagtttggatgcaattaatggaaaaaatctaaatgggacatatgttgtagataaaaaaagtgagattttaacagatgtaagtgtagataattctcctcttcatgcttatttacttggtaaatttgttgaggacaggtttgtttatagacaaactttcattattcgatcatatgaaactggccctgataaaactgccactatggaaacactcatgaatttacttcaggttggtatcttttttattttttcattttttgacacttattagtcaaattattaagtgttaaataatagcaaaattatgcaggagacagctcttaaccatgtcacatgctctggacttgctggagatggattcggagcgacccgcgaaatgagtatccgaaagctcatttgggttgtcactcggatccacattcaagtacaaagatacagttgctggtatgttgattgaaactacacttccaaaaacttgacataaaataaaagttttgttaagtaaatttcttttttttggggtaatttaacttttttggcaaagtttagtttatgaaaatttgttttttcttgaaaaaaaaattatattaggagaaaaattcaaaaaaaaaattaaaaaaaatataagaaaaacggttcaagataattaccaagaagagtaactagttaccaattacctttttagagtaacaagttaccttatactttttttgtcttttttcaaaatttttgttttaagtactaataatgtaagtgtggcaggggagatgtggttgagattgatacttgggtggatgcagaaggcaaaaatggaatgcgtagggattggattattagagactaccatacaagagagatcataactagagcaacaaggtactttttt

SEQ ID NO: 220693 - DNA, 3650 bp, Cannabis indica
ttaatttagttaacgaaaatctacgttaacagtttggtgttttcattgagagcctttgtgaaaaacgctcagaaaaaaccctcttgatcataagaaaaccctttctccatggctgataacagagaaaatgttgatactcatcctaaagagaccacccatcgtcgtgccggaaaagagccaatgggctcccggaggcctcccaactcacgatccatgcagatcactcgatcaagaaggacccaacctgaaggaggcctaagtatacggtctacacgttcaggaagaactccgcatgataatggccaaaacccaaatgcaggggatgaagaacccgatcttagaggcgctcaacctacgaaacatgataatgatggggcctatgatccaacaagatacgtgccaattgtcgagttggagaatcaccgtctcaggcgccgcctggaggaggcgaaccgacaaaatgctgagttggaatgggaggcagctacggccaaggcggcacaggagaacaacgtgcaaaattaacctgatcttggattgagaagaccacgaggcagacctcgttgctcatgaactaggaggcaggagatggctcaggagaatccttaaaatgctcaggaagaacaatatggggaaaccaagggtccccctgagaattaacaactaaatgatcagccagagccttctcacagaaatgagaatagaaggcgaccagaaaccagggaacaggaaattcctcatgggaacgagggaaatcctgggtcacaaacgaggcattgccaacatccttctcgaaccaacagggaaggggcacatacaaacctctgcggggggcaggcaacgaccaatactgaagggagaaggacgtgacatgaagaggcgagcattaccacgggacacacgagaacccacagtcgatcaacgcaaggaggagaaagtactggctgctataatgatcgagaaagtacaggcacaagtataactgagagttactctaggacaaggtccatgagcaggacgagatccatgagtaggacaaagtccatgagtgggacgaggtctgctagcaattataaccagcaacaactgaatcttcgtaatcacttgaaccagaaaaaacctgatcttcgcaaacaactcggtccaaagcaagaggatcctatccaaatgcaaatagatgagttagagaataaattcaagaggtatcaagtcagggaacaaggaaagtagtctagatatgactcggatgaggaactcgagccattccatccaaacatcatgaatactccattcccccaggaattcaagaacccccacgtcttgtcatatgatgggaccacaaatctagtctcacatttgaataatttcaatactatcatgtaagccagtaatgttacgaacaatctacgctgtattttgttccccacatcactagttggagtagcgagcagctggttcaacaaatttactcatcattcaatcaccttttgggaacagttctcaaaggacttcaaaaaatagtttcaggccgcaagggatagatgacccgaagcgtcctcactcacaaacataaagcaacagccgggcgagatgcttaaggcttacttaagtcgtttcagcacaactgctgcaaggctgaggaaactagatgatagtacccagcttactgctttccatgcagggatcactactgatttctctattgctagaggtgagctatgggatgacctacaaggtcgcccagtaaaaaacatcaccgagttcaatgaaagagctcaagtatttgtttgaaaagaggaagccaaaaaggagatgaagttattaaggactggctcgggaagcaaacccagcaatgtcttgacaagcaccgtctcgaccaaggctgataatccaaaagcctctagttcaaagaggaagaataactctaaggagtcaaccaaggacatgaaaaagcaaaaaaagcacgacatgtacgtgccaatctataccatttacaccgagcttaaaaaaaaactcgggaaaatatttatctcgcgcatgagcacagggtggcctttcgtaaacctgagcccatgaggcatgcgagacataagcgagatgcaaccaaattttgcaagtacaacaaagacattgggcatatgacagacgagtgtcgtcaattgaaggatgagatagagagtctcatcgcgcgaggccacttcaaccaatatgtgaaagacagggcaatgtacataaccaacccaatccgcccaataacgcaggcaaccagggattacaacctcctcctcttgaaggagaggatatcctggttatttcgggagggccacatattgcaggaaagagcaacaacgcccaaaagaaacatgtgaaggaagtaaagaacgagcagtctgcctttgctccgaaaccttccaagaaaggaaaaactgaagaacctccgatcatattctcggaggaagatgaaaaatacgtgaggtatcctcacgtcgatccattggtaatcaccatgtagctcactaataagagcataaagagggtgctggtggacaacggaagttcagtgaacatcctttataaggatacacttaagaaaatgggacttgaaaaagctagattaagaccttgcatggtcaatctgtgtggatttacaggggacagtgtcgccagtcaaggaataattgagctcccattaacattgggcgaaacacctttatccaccataataatgtgagactttttggttgtcgacttgccatatgtttacaacatactgctgggacgaccatcattaattggactaggggcagttagttcaattaagcacttatccctaatgtttcaaacactaatgggtgtgggagtagtacgaggtgatcaaatgctggctcgcgagtgctattgcatagagctacaacatagaaaggctggtcaccagctaatggtagaattgactgaagaaggcgagaagaaaggtgaagatcttgatccttgaattcaagatgaaagaaattgattgaaaccaattgaggagctggaagaggttgttctagatccaggaaatcccacaaagtgtgtatacattgggaagaccataaaatgaacaattgaaatagcagctaattagctttttgagggcgaaccaagatcagttcgcctgcagccatggagatatgatagggatcgaccgtaagattatctgccaccacttaaatgtcgatctaaattacccagctaagagccagaagaggcgacccttggattccgagagataaatggcactcaagcaggaagtggataagttgttggttaacgactttatacgcgaggcattttatccctcatggatatccaatcatgttctcatcccaaagccaaatggaacttggagaacttgtattgacttctctgatttgaataaggcgtgtccaaaggattgcttaccactgccaaggattgaccagttggtggatgcaactgctggacagaagcttatgtcattcatggatgcatactctggatataaccagataaagatgcatgtcccagatcaggaacatacaagcttcataaccaacatgggactttattgctataaagtcatgccatttggattgaaaaatgatggggcaacattgttggaaattatttta

SEQ ID NO: 220694 - DNA, 1617 bp, Cannabis indica
aatatatatgtctcaaatgcctaaaattttgttattattaactgtgtaattaattcattcctttctatatttaaaaaaaaaaaacatttaacttataatcttatattgcattaattacactaactgttacatgtgcatatcttcaaatttttattcagctattttattatattgttggatttttttttttttaaaaaaatattatgacaaattttcagttacaacagcaaggtatataaaatgtagtattaatttctccacattgaaaaatatatatcatttaaaatgctagatttgactgttaaaaaaaatagtaatatctagagcaataaataagaatagtcagattttctgtttttacaaatataaaaatagttaaattgctttatttgcaaattgtaatactaaatacaaataatttagggtaactgccataaataatgcatttttctttttttttcttttacgtttttttttaatattttttttcatttttataaaagttattttcattttaacattatattatttccattttaaaattattatattttcattttataaaaattatttctatttgtataaatgaattaaaaatgaattattaaagtataaatataaatactttccactaatcaaatgataccaaataaaaaaaaaatagtagacattagaactataatttaactcaatgaattaacaaattaaaactatttgaaaaaaaaaaatattacttctccaaatattttcagcatatatatatatataattttttttatataattttttgtttgtgattattaatggatagtgtactggtattgataagccagcacacaaaagccagctaataaaatatatatgaaataaataaataaataaaataaataaaaacaaaagaagattattgttggttattcttgagcatatgcttttctgcaaatataatgtgaaacaaaagttgggccacatggaatgtcaattttatttatttatatatattttaattaatattatgattattattatatttatttatatataaagttatatatatttacactctcactcaactcaactagcactattttttttcttctttatttctattattgattattgatttgcatgagttatattacctataccacatggcacaaggattcccttactttattaatcctcacattatattgtaatttactctattttttatgcaattaaaagaaacaaatttttattttatttaaacttattaataaatttatctacattacatatcatcattcatcattgtagaaaaggaaaaaaagtttttggttttttaaacaatcaacatcaaattaccattgaaatataaagtctgaaaatatagatcaattttttgttctttagccatatatgtagtattaatttgtacctcaaaatttccactaatttaattgaattcaaattcttatatacatctcttataaaaatatatatatataaacataaatatacaaaaatagaaattttaattgcattattaataatttagtgttgcattagaagaaactaaatcaaaattaggcaaaaaaaagagctcaattaatagaaagaggttgaagttaaaaa

SEQ ID NO: 220695 - DNA, 5461 bp, Cannabis indica
acccccaaacgcaccaccacggctcacctccaccactcacccactgttgaccgccccctctctctcttcgttttcctcaaactagaaaaaaaaaaagcatatggtccgtaattttttttttttgttcggtccgagagagagacaacgtagatagaggggggtatttttggacttttgatatttttgtagtgtaaaatgtattggtttaaaaaaaaaattaacattttttagtataaaaaatcaaatttcccactcaaaatggcattgaaacaaagtttatgaactggaatcaattataattagaatctcagaaagcacagattagactaggaatggtgtccaacattcagcagctatgaatgcacttaatcttcaacgagaagctttcttcagttgcacttaatctaactatgagtcatttcatctacactgtactggtgaggatttcctgtatttgaaatgcctaagattgcagaagcaacaaaattctaagcttacttttaaaaatcatagcaatggctgatactatacgaaatggtggacgaagcacaaaatggtcttaggcaatacggcacaactttgcatacgtttttctctagtatcatttttttctcttctttttatgagatgactgtcaaattcacctagtcctaaccaaaacaaatgcatatataaataatctgcctatcttacgtatatactacataataagacatagtaagtgcaagatctaataattttaatgaacaatttatatagtaaaataaattattacaccaaataaattacttattgctaagaaaatcccactgactaatccaatcctcaaacttgttatttctctctttagaagtagctccgcagaatatgataactgacctcaaactaataagttcaaagaaaaaaaaaagacgtactcaaagcataaaatgcaagagaccatagcaaaatcaggttgttcagttctgcttttgaatcgtctcttttaaattctttgcccttgacatttctctaaatcattaatctagagatacagagtcaaaaggtgttaatatgtaggaacctgaggcatcgtctacaatgtgagactgtctgggttctgaataatctttgaaaaggtctgaaggaaagcagccaaatcagcaccgtaaataatccgatgatcggctgttacattcacctgtacaaatattcagatcacccgttagtattgtttttaatataaatatatataatatacgtatgtatatatacatatagaagctttcaactattatataaaatttgttatatgctcaaaagcaaagataacatgttaaattcagatatgaaaatagagggaaggactcgatgatttttttttcttttgaaattttggccctggcagtttgactaggagacctcccagtggccccaaggtttttgagtctgtgggtcgaaccttggaacatatgcctaccagtactttccaacactcctccttatgacgagaccaccccttggggttggagaggagggaaaggactagtttatgaagagtacggaacagatatcattatttccagatttcagagtcagtgcatttgaattagtcaacaaaaccaccaagctcaataatctggattatttcacaggcaagctactcttttatgcattgattttctctcacagggataagtaatatcggaaagttgcgaaacatcagaaaccatagaacttatcaagaaaactgcagtctactgagaacattgagtgacaagttatttcaagctctatcctatttggcaatacaaactttaatcaataaactagatttctaacaacagaaaaatttggcagtcagttaagtaaactagattcgcaagttttcacgatcatattcatgtttatcctattgatttatttgcttgcaatatgattgtgcaggcgaaaatcacagctacttttcaacaccacttccttatagttcaatgctagctgttagtgaagggcctctaaaagagtattatggctgtacaagacaatcaatgtgggtaggctacctctctttctcaaacaatgaaacaacaacattctaaaaaaactaacaaaatataacaaaaacaggggaggaatgtacgattctaaaaaaagcaagaatctgagtcaaatccttgtaatattttccaaaatacaatgaagcataacatgcaatgaaaagttaattcttaccagcattttactctttacactgaagtatccttctgcatcggcgataactgttggcttagaagctccaacagccatgatagccccctgagcatcaacccaaacattaaagaaagggcttatccacaacaaaagaaactaatcaacgtgttaaagttcaaaacttttagcttttatttcttattactcacctggcctggaggaagtatagcatcaaatctgtccactccaaacatgcccaaattggataaagtgaaagttcctgaaggacaacaataggaattagccttatttacttatatataaaagggtcatgaaaaccaaagagataagttggtgaagacctgaattatattcattaggttgcaactgcttggaacgggctttctcaactagctctttccattttctagatagctggtacagatccatctgtgccaacatatacatgtaactaattaacaagtatacttaagaatctaaataatttaaagagggaacagcaactacaactactactactactactaaaaagcagataacactaaaccttatcagcatcctgaagaacaggggttataaggccaccattgattgccacagcaactgcaatgtttatgttactattatatgtaaagcttttcccatctttgcacgacgcattcacaattggatgttgagcaagagccatagcagcagccttagccaacaaggcagtcatggtcacaccctttggtttcacctaaaggacacaatgcaaactcagttcaaaagttccaaatgcccatcaaacaaaccatcacaatgtcaatgcaagacgctaattaaatctataccttttcatagagcgcgtcgagtgcatcagttgtcacaggatatccaactcggaaagtcggcacagagagactctctatcatgttctttgcaacggcagcttgcattgtagtaaatggcacgattgtagagcccggaagcggaggaggcaaagaagcagaaccagaagaaggagcacctttgggaggagtggcagccaccggagcaggcgctgcagcaacagaactctttgaaggtgtaactccagccgctgcctccacatcctcggacgtaatgcgcccaaatggaccagagcccactaccgatttaatatccaccttatactgcttagctagcttcttcgcataaggcgtggccacaatcctcctgggcccatcagaaggaagcggaggaggaggcgaagactgagcaattggagcaggactcgaagccggaggtggagaagagggcgaaccagaggcggaagttgtagcagcagcagcagaggaagaaccggatttcgatgctgctttcgccttagcctcggcgatttcttcatcagtctcagccaacaacccgatcggagctccaaccggggcagtctcaccttcgccaacgacaatcgctgccagaattccatcgtagaaggtctcaacatccatatcagctttgtccgactcaacgacgacaacactctcgcccttggagagaacatcaccctcggacttaatccaggaaacaatcttgccctctgtcatggtggagctgagggcaggcatgaagatctccctgatcttggatttgacggtgaagatcctcctgcgggatttgacaggaaatgcggcggaagaggatggagtggagaagcgccatgggagggaggtggagacagaggaagagaaagaaatgggtgcagttgttggcttagcaaggaatggagaagccatgggtgtgtgtgtgagagagagagagagagagaaatgtggttagagagtgaaatgggagagaaagtgatttaagaaaagagagacggagaagacgagggaatgcagggcgcagtgtgtttaaactcttgtttacatcgcccgcattcccatcctctttttgtttactcccccaatttcatttcacaacgttagttacaccttgcctggcttttaggactgtttcacaaaatacaattttataataatttttacttgatataaaatatatatttttaatttatattattttctatcatcataaaatactctaaaaaaagattaagagtaactttttttttatgaaaaaattaattttttaaaatcaaacaagtttactttttctaatattgaggtgcaaataaaactcttataaaacttctatttttaaaacaaaaaaaagttcataccttgaatactgaagtgatgtttgatttagtataatagtaatgataatacagtagaacctctatttaagaataccctattcaagaataacctctaatttgttataaaaaaatcaagtcccaatttaggcctattataaataagaataacctctaaattgtaattagttatacaatttctaagtcccgtattaataaagtatacctctatataagaataattacatcttaataaaatatatacatatattttataaaattatttatgtagaattagtaattttattccaaattgtaatacatgtataaatattatatttactcaaaaataattctattatgatataatattaaggattgtttaatgtcattgttgttacgttgatatttttttatatttcgattttttttagtgtaaccctaacctctcaattagaatataatttgcttagtcccaagtgtattcttggatagaggttctactgtagtaatgtaatggaataataattgtactggtaattaattatattatttgatttgatgttagaatgaatattgtaattgaaaattattgtatttagtactgtgtgggaatataatagaataaaatgtatattgatcaaaatatttctattacttttatttttataattataaaatatttaaataaaagataaaatagacttttgaatttattttatatttttattataatattatatcaattatataataaattgtaattgtaatggttattacaatgattttttattataatgagaattaccttatacaatgtaacaacaaataaagtaatgaacatattaattatcattacaatcctcattcctataaaccaaacatacccccttcaatacttcaattcaatcgcattttatcttctctttctttcccattgtttattaatactagacaagagttacgtggctattagttttatataagttctaatagtttttgtttaagaattcagtaactaagcaacggcaacaacaatagtagatatatctatttaagtttttctatatt

SEQ ID NO: 220696 - DNA, 2623 bp, Cannabis indica
aaaataatttccaacaacttctttatactcaagacctccaaaattgctctgaatgcaccctgaggttgttcatgatttctcgtgggactccacggaacaggataatgcttctaagattgccattgaagaaccctctgatgatatatctttttcaccgagtcgcattgaaggtgttataaagaatctgatggttggcacttttttgattgaagattctgatttgagtgtgttggttcacccttgtaccccggtggaggagaatgtctcatcttttccacaggagccatgagaggcattggttggaactgcagagggttacgacagacctctatagtttgggagctgaagtccctgatcagatcgcactctccggattttgtcttcctaactgaactaaaagttgatgctactccgctagtacgtactctactcttaaatcactccactccacttttattttaatatttatgttcaacctattggtgctgctggtggcattatcttgacttggaaggatggctttagttttgagtatattgctagttcccgtagtcatatttctggcttggtttactcgaacccccttcccatccttggcttctatcctgtgtgtacgaccctccttattttcatcccaagaaaaacttttgggccaatttcatgaaaactggggataagtttggtggtccttggttgattctgggtgatacaaactttgtgctaagtgattccgagcgtgaagggtcctctggaagggatcagtttatcccaatcatttctaatctggttgattctcgaggccttattaatatgcctatttaggaggataggatgacatgggataaccactgctctggtaggaaccatgtcaaatctactcttgacaaaggtcttattaatggcgtctggcttaacttgtttcctagggctgttcttaaatcttcccagacgactaattatgatcatagacctctgtgtcttctcacacgcggtctggatactagatttaaaagatgttttaagtttgaagaaggatgggcaagggatgagagaagtaagttagtggttgatcatgcctggcaatctatttttcactcttgggctcccgcttgcattttcaagaaattgggagcgactcgggtgccccttcttcattggaatagaacccaatatggtaaacttggcacagtcataaatgagcttgagaaaaagcttaactttattcagagtttacctgctggctcccgtgattggaatactgagtgtcttatctggcactttttaaacgaatcccgtagaaaagacctctactggaaacaaagggccaggattttgtggattaaggaaggtgatatatatgttccaaattattttttctctcggctgctattagaggaaggagaaatgccattgaaagtatcctgaataaggaaggtgtttagttatctaaccgagagttaattggacaggagtttgttgatttctttaaaggaattttcactgggtcagatgatagtcaggatatcaattgcagatagtattttcatgaaagattatcattagaagaccaggaggagatgctcaagtgcccttctcatgatgaaattagaaaaactctttttaccatgggtaatcataaggctctgggtcctgatggtatgtcagttatcttcttcaaacactattggagttctatgggagatgatttctgtgaagcggttttggatttttgtgactggtaatatgcataagggtatcaatgtgacgaatatagttctcatccccaaggtccagaacccgacaagaattaatcatttcaggcctatttctctttgtaatgtgacttataaggtcatttctaaaatcattgcaaatagaatcaaaccttttttaccttccctcatttgtccaacccaagctgccttcgtgtcgggaaggaacatccaggattaacaatgtgattgtgcaaaaaattatccactcgttcaacaggatgaaaggcaaagagggtttctttgccatacaaattgacctggtcaaaggttataatcgtctgagctagagatttatagaccacgtgctttgttgttatgggagtcctctggaattctgcaagtgggtctctccaccaccactcacaatgtctgtcttaatggtggaaaggtaggtttaataaagccttcttgtggcctacgttagggagaccctctatcctcctatatctttatttgggttgctgaggttttgtctagacttcttgaagacgctctttctaagggtattattcaaggcgtaagacttagtaggggcggaccaattttatctcacaattttttcgcggacgacctaattctggttggtagagctaatgtgactgaagcgaaaggtgtttaacaatgtcttgagagattctgtgcttggtctggccaacaagtcaataagctcaaaaccacgattttcttcagcaaaaatacgcttcccagtatgagaagaggaattaaggaagctttgggtattggttctcctattggtttcatcaagtacttgggccttcctttgtttagatcaagacagaaggatgctgatttcaatttcatcttggacatgttgggttttgtgccct

SEQ ID NO: 220697 - DNA, 2113 bp, Cannabis indica
ttctcataatagaaagcataatattattattcgagatctaaagggtaacaatagggattgggtctcttgggatactggtttatcagaagttatagtgagttattttcaaaattcttttttggcttctgaggggaatttggggattgtgttagaaggggtgaggtcgattattacctctgaataaaatgaaaagttgctggaagaaatctctgaggaggaagttcatagtgtgctctttcaaatgtaatcgaataagaccccgaggccagatggtatgaatcctgcattctttcaaaaaaattggcctattgctgggaaatatgttgtgtattttgttcgtgtttttgttcatatgagtgcatttccaagaggtatcaataaacccatatcgtcgcattctgaaaaagaaaaatccttctaaaattaatgggggagcttaggccgatatctctttttaatgttcttataagatatctttcaaagttttagccaatcgtatgaaatggatattgaatcaggttatctcgaaaactcaaagtgctttcattcctgggcgtttgataattgataacattatggtggtgaagttatgcattatctgaaaagaaaaacaaaggggaagtaaggttatatggtgttgaagctcgatatgagtaaagcctatgactgtgttgagtggtcttttttggagacatcaatgagaaaatggggtttaattctcggtggattggacttattatgagctatgtaaatacaatttcgtatcatatgattcatgggggccataaagtagggcctatttttttttcctactggtgaataagacaaggggatctcctttctccttattgttttattatctatgcagaaggtttttcaaccatgattcagaattttgaaactaatcctcttatcacgggttgtcaggtggcgcgaggtgctccatctatgagtcgcaataagtcgattatcttgggcttcttaaaggataaaatgagtaatagatcaatttagagttgggataataagttcttatctagagcgggaaaagagatgcttattaaaacggttgttcaagccttaccttcgtatgctatgagtattttctcaaatctggttggtacttgccatgctattgagaatcttatgtctaatttttagtggaagttggcctctaagaatagtcaagggaggagtataaatttgatgagttgggatagactttcaaagcataagcatgttggtggtatgagtttccataatatttgtgatttcaacatagctatgcttggaaaacaggggtgaagattgttggttcatcctaatttattagttcgtaagattttcaaggcccaatattactcttgggaggatttcttggctgctaaaattggctcgaacctaaattttatttggtgtagtattttggaggctaaaggggtcctattagaaggtttaaggaagagggtggggagtggtgactctatccagatcactagggatccttggctgcctttggatacacagttagtaccagtatcaatcactcttggacttgataattttctagttagcaacttattttaggtgggttgtcgagcttggaacaagcaggttgtggaagatctcttttctcatgaagatgcatctgttatccttggtattccgctaagtaatgtgactaaggaggattcttggtattgggttaaagaaaaaaggggtgtgtactctgttaggagtgcttacaattttatttaagagttaaaaggtaattttacatcggaggcaaactttggcttttggaaaaaactttgacaacttaaagtttctccaaaagtcaaggacttgttatggcgtgctctgtctcagtgccttcctactcgaattaatttaaaagaaaatcatgttaatgtggtgaaagagtgccctttatgcgatatttttgctaaatctgttgagcactgttttatcaagtgctggtttgctgagggggtttggaaagttgctagttttgttgtagtaggatggaattttgattccatttgtgactggtttaaagctcaagctattgcatttgatcttgacaagtttggtagagtagtaatgttatgca

SEQ ID NO: 220698 - DNA, 1762 bp, Cannabis indica
agtctactacttgaaacgatacgtacacttgcgtgtgctaaatctgctcaggagtttctacacatgtaaagtcatgcataattccaaacttagcaaaaagatccttaaaaaccaactcgggtgcattgtcagatctgaaacatttgaaaaggcaattaaattgagtttgaacatatgacagaaattgaggaataatgtgagcaacatcagatttttgtttcatcaaatataaccaagtgaatcttgttttatcatcaacaagagtaagaaagtatttatgattggagtgagatgggacatgatagggtctccaaacatcacaatggataagatcgaatttgttttcaacaaagttattgtgcttaacaaaaggcaatttcttttgtttagctttaggacaaatataacatggttcaattttgtgcaaatcatgcatattacaactcagtttattacagagtaaagcaagtcttttgtgcgagggatgccccattcttgagtgccatacatcagccgtgacaacaagattgtaagcatgggccgatatgcttcgccaaaatgtacaaaccatcacagcctttacctctgccaatcactctcttgctgagagtttcctggatgcaaaaatcattagtattgaattttactttaacatggttatcatgggttatgcagcttacggataaaatattgaatttaaagctaggattaaatagcacattgttaagcacaatgtctcctgggatttcaatagttccactttgctgcacaactaaaaactcattgttaggtaatattagtttagtagcaagtgctttgcatatatatttaaaaggtttgacattgttacatatatgcctagtagcacccgaatccacaatccaagaatctttttcaataaaagaagagttatatgttaaggccatacccgtgttacctgtagaagtgctggcctcagaattagtcacatttggttgctggtttgctaataaattgagcaactgctggtactgtgctgtgcttagttgaggaagaagagtgtgagtctcttcactggaagtgttattgtcattactggtctgtacttgattggccgtggcatccttagacttactttgcttattaaatctggtggaaatctatggattttgtagcacctttcaatggtgtggccatgtatattgcagtgggtacaaaaaggtctacctttcttagggggataggatttgtttccttggttgtcatttttgttctgcacattcttgtccttttgaaatgcaaagggcatgttggagttgggatcattagcattaccaagatttcctttctggttttcttcttgagaaaccaggtggaagactcggttgatttcaggaagagtttccatcaacaatatgctactcctaacttgggaataggaatcacttaaacccataaggaaagaaattatgtattccacatggtggaattcctggagctttttcattccaccacaggtacacccattgcaagtacaagtgggtttgtaattagacaattcttcccaaatggatttcaacttagtaaaatacattcccacagattgagcatcttgcctaagattcatcaagcctttcttaaggttgtatatatgaggaccattcctttgatggaatctaaccttaagatcatcccaaatagtggctgcggattcatcataaagtatactagaagatattgttggaaattattttaccaggatgttagatctactcacaagtat

SEQ ID NO: 220699 - DNA, 1208 bp, Cannabis indica
tatatatatatatttttatataatagtgtacattataaatatttaaaatattttgtaaaaaattataaatttaaaataatttacggtactgaaaaacaaaattaaaacataaaataaattatttaaaacattattttttacatgtagattattatagttatcatgcacgtcatagagaaaaataaaattaaagttataaaaataaaaacataaacaaatctaattaaaagaaaatgttaaattatttttaataatttaatatgtagatttataaattaagacaatttatttaagatttattcaaaaaaaaaagacaatttatttaaggtaatatttttaattgtgttagataagtgatacaactaaatgagtctataataaacatcttgtttgacatgggcttacaatgtgtctaatacccattagtaaacttaattagagtttatagcgctatagttagttggctatataaagaacatcagagtttggttcccaagactaatctttaagcactctttttctccattcccatcaagtgagagaaaactcatagagaaaatattagtttgtgaaagatcacatacctacactctcttctcgtatcctatatcatgtaatcatcaatcatgtatgttctccatcttattgattaatataataaccttaaacattcaaaaaaaaaatgtatgataaccttaataatctgtcatgagtttaaaatctatctatattttagatctaattttaacttaaactcctcaacctttaattgattatttccgagtccttgatacatgttgataaatgtaaatgaacgattcaaggttacaaagttttacaacttgctatttaatgttgataaagtggattatgctcatgtggtatggagagggcttttgattcccaagcatagatttattatttggcatatggtgaactcttagttgatgaccaaaataaacttcaaataaagttataattttttattgttttttcttactgtccaatttgtaataattttgttaagagttatgatcacttgcttttttttttttttgttctttctctgttgtgttgctacgcatggttcaggaatgtgcatgtttcaatacttgacccattgtgtatttgaattgcaaaggttggattgagcaattggggtttggtgtataatgtcaaatacagtgtgatttatgttatctaggtta

SEQ ID NO: 220700 - DNA, 3743 bp, Cannabis indica
attgctttcgcggttaataagttaagtcaattcttaaggagtccaaccaccatgcactggagtgcagtgaagagagtcttgcgatatctaaagggcactatctatcatggaattcatattaagtatagtgaaaaattatctctggttggatactgtgatgcagactgggcgtgttgcccagatgataggaagtctatagccggctattgtgtgtattttggagactctcttgttgcttggtcatcgaagaaacaatccgtggtggcacggtccagtacagaatctgagtataggtctcttgctcaactcactgctgaagttacttggatcgaatctcttcttaaagagatacatttcaaccttcctgcaacaccaattatctggtgtgataacatgagtgctaaggccttagcttccaatcctgtctatcacgcccgaacgaaacatatagaacttgacattcatttcataagagacaaggttctacaaaagaaaattgagatcagatacattcccagccaagagcagattgcagattgcttcaccaaaggcctcactcatcctaaatttcagtacttcgtggacaaacttggtgtgacaagttcccccctgcgtttgaggggtggtgtcaagacagattagtttatgcctaatacctgattacctctaatcataatcactgtcttagtattccatcattctaggagattccattttctgttagccttttttgtcctttgttatttttcccttttctgttatttggtgtagtgccagctggcacattgttttctgtgtaatcattggagccgttatgctcccctgcctataaatgaaatcctctgccctcagtctcatttgagctgagcatcatatctgcctttcttcactatatacaaaataattcttgatttatagcataattgaaaaatgtatagctaccaagttttaaatgggttatgtatattggttttaacaacataattggcttagttcttttatcagacttttaatgtaggatgatcaaataactacactacgcgatcttagtgtaaggcttgttatcttaacagaactattcattttattttgatgtgatttttgttgattttattattgatcaggcaaatgagtgtgaaagaataaggtagtttaacaaaaaattattgaatagattatgttgcggaactcttattgcttgtgaggtttattatttcttctgccgttgagttcattgatgtttttagtacttgtaaaaaaaaaaaataggttatgaatttgagtgaaaaatattgtagttttacaaaatattgtgttgattatgttaaaacccctgatagtgagatcaaaatatatacaagatgtagatgcatagctcttattggctgaggtgtatggttgcttctactattcgactattggtatcatttatgtttatgccactatgaacacatagttaaagaattgatttcattgtagattatgaaaaagagtgaaagaatagtggtttaacaaaaactagtgagtaaatattaataacttattatatactttctgttcttaaaatttggggaaaacaacattattttcaaactaattaaacaaaaacttaaaaagtaatttcaattaaagacaagaagctaaaaatctaaatatgtcaggccgaagataattatgccatctctctctatactgcttgccaatttttccaggtagcatctgagtaatgtaggaccattttctcactccatgccctcttcaaccagtccaattaaaatcttgcattttgtaatacacaccaaaaataaaaacttagaacagctacataaacgaaaatcacaacaacaaaaatttaaggatttaaacaattatgtgaaaatggaaagaaaagaaaaagttattgtatgtagtttcccatttcatgacaacttgttcttgtcgagtacactatagttgaatgttttctttagaagcttcacctattggttttcctgaatacattttgttaatttaattatcatttttttttttattttcttaacaacttgttcttgtcaagtacatgatcatgacaaatacagacaatcacattcacatttaatcgtcctatatcccattcattattattatttttataatgggaaactatataatttctggttcagaattatgagagttttgtttttcatgataagtaggactttctaatgtaactatatatatggaaaagtagggtgtatcttgaaataaataaattctagtagtactactagcctccaatagtcaagaacaaacactttctagagtttataattctttgaaggttctactcaacctcaattttggtaaaattttaaacattagaaacatacttatataaatatatattataaacaaatgagtaaattgaactactcgatttcaatagtgtacaaaatcttttactaattaatatataatttttttctattttgttttccagggtaagagaaatccgtactcaaatgacgagatgaatctcttgcgtgatcagtggattgaatatgtccgagcacaggcagtgcaacaaaatttattacgatgattaatttttgtttttgtttatactttacactataaccagttactttcaaataactaataattaaagttagaataactaataaagttagagtacatagtttgtatatatttcagtttctgttcattttaaatttatgtttatattttaccataactaattagtgacattgtataaattagtaaagttaattaatataagagaaaaatagcaaaaaatttttattttttaattttttttttataacaaaatgactggcaaaaatcgtggctgaaaaatacaaaatttataattaaactgaaaactttactataggcgacgatttaaaactgtagcctatatatataagtcatagttttaaaccgtcgcttatagtgttaactatacgcgacagttttaaaccctggcccatactatttccccaattgttttcaactgtcttctattctatacccagcatttgcgacgctcgtataggcgacagttttatgagctgtcggcattcttcactcgacggtgtaaaccgacgggaattcgaagttttttaatagtacaattaatcacaaaacctacttcactatggatgaatatctaacatattcaaactccactaaataaaattttttaaagtttaagtgattatatctttccccaataaaaatagctacatttgtatactcttcaatcaacacaaagaacccaatacttataaaatattgaaaatattaaattaaaagcttccatttataaacacgttacattaaagtaaaagtagataaaagtttaatttttataacatttatcaacttataaataaatatgtataaactaaaaatacacaaataaatatatggatgcactcttatataatgcataatattaatcatgaatgagtgtagtattaatgcaccgcatatatgatacattataagttattaatgcaccacatatttaagagttatttgcggcataacctccttaagtggtcaggtttttgtcaattaacccccaacttctaaaatttttagtctgtaaaactaccctaaactcaaattctgttagcacttagtcctttctgttcatttttagtctgttaactgtcatggtggaatgtccacgtgtacacagtgtgcacgttgcacaattttattggtccacttaa

SEQ ID NO: 220701 - DNA, 2477 bp, Cannabis indica
atggcacattgggaagtatggttcgatgaagaaagagttgttgaagctcaaacccgtgttaatgatctcaacaataccttggatcgatcgaataacatcatggaagaactcaaaacctctgaatcgatacttgatgatttgttagaacaagaggagatatattggcaacaacaatcacaggtggaatggatgagttcaggtgaccgtaacacaaaattctttcacgcaaaagcttctgcccgacaatctaataacagaatacaatttctaattaatgatgctggcctcaaagtgcattcacgttcagatttggtctatgtaactgaagaatattttaaaaatatttttcaagcttctacaacggatgatgctgcaatgtcctctgttcttgacacaatcctatcatggtcactgctgatatgaacctcggtctcacacaaccatttactagagcggaggttgatgcagcactgaaaagtatgagtccggataaaagccctggaattgacagtatgtccgccatgttctaccaacaacattgggatttagtaggggacttagtctccaaggcagtactgggagttcttaatgatggagctgacccaactcccttgaaccgtaccattatcaccctaattccaaaaaataagaagcctctgaacatgaaagattattgaccgattagcctttgcaatgttatttcaaaactcattaccaaagttcttgttgcaatatttaaagttgtgctcccacatgtcatttaagaaactcaaagtgccttcttgcctaagcgcctcatcactgataatattttagtggctttcgaacttgtccatgcaattaagaatagaaccgcgtgaaggaaggggattgtctctcttaaattggacatgagtaaggcctttgaccgagtagaatggagctttattcaagaagttatgaggaaaatgggctttgctgaacaatggatcaagcttatcatgacttgtctctcaacaaacactttctcttttaatgtcaatggtgaagtctctggatctttgaccccaactcgcggtttacgccaaggctgtcctttgtctccatatttgttcctcatctgttctgaggggctctcgagattgttacaatttgaagaaaatgaaggatggttgattgggttcaagctcactagaaatgctgcaccgatttctcacttgctcttcgctgatgacagtctccttttctgtcatgccaatgaaagttcatgtcttgctatcaagaaagtcttggatatttatcaccgtgcctcaggccaacttctaaaccatgataagtcggtaatgtctttttctccaaacaccaccttggcatcacaagttttttttcacagacatctctccatgcccatctgtgaatgccatgaaaaatatttgggtctaccgtcatatactggacgagaaaagtagcacctgttcagtgacattaaagagaagatttggcgcctcatgcacaatcagaatgagaaaatcttttcagcgggggcgtgaagtgcttcttaaagctgtggttcaggctattccaacatatattatgagttgttttcgacttccagcctatgtaggtaatcagctagaatctatgatggctaatttctggtggggatcaaatgaaaatggctcaaaaatacattggagagcatggcacttactgtgtaaatctaaaatagatggtgggatggggtttcgatcttttgagcaatttaaccaagcattgttggcaaagcaagcgtggcggctgttggagaaactagattcgcttcgtggaaaattactcaaaagtcgttacttccctcacaatgattttctacatgctcctcatggtcatagcccctctttaacttggcaaggaatcgtatggggacgtgagttactccttaaaggcttgcattggaaaatcggtgaaggaagactgattcgagttgcacttgatccttggatacccagccgtgatactttcactcccactcttttttcaagtcatgctaatgcaatggtcagccatttaatcacagatgaacgtgtttggaatgtccctcttctagaacaatggttctctcctttagatgtggatcgaatcttgactatgacacttagttttctccagcattctgatgctcttgtttggcactataccacatcaggcgcctacacggtacaatcagggtaccatcttgcaacctctatagctgatactagtgctaataattgctccagttctgtctcacaagcttcttggtggaagtacttttggtccttgcaactcccccaaaaagtcaagatctttgcttggcgggttatccacaatgctctaccagttgtaacatctttggtaaggcgcaagatcatcacggactcaacatgtttagtatgcaaatcaacgtgggaatcaattgggcatgctctatttggatgcaaatatgcaaaagctgtatggcg

SEQ ID NO: 220702 - DNA, 1668 bp, Cannabis indica
acagtcactctctactctctagtctctacctcggttattgattgtatttttctttcaacataaaattatgaaaataaaaattatctaataaacattaaatattttcaaataaaatacaaaataaaaatgtaaatatttaaatattatttatttattacataatataatttattttaatatttttatttttagtaatatacaatagataagtaagtatattttcgtacaaataaatttactatagatttttttaataaaaattgagaatcaactgtttttaaaagtacggttctaccaactttaacttttaactgtaaattttttaataaattaaattttaactatttatcaaataccttattatactacaattttttttaaaacaaagtttttatcttttttaaaaattagagaaacttacaaaaatactgtaaaatgaaaaaaaaaaagtttacaaaaatactgtgatacagagttttttttacagttttactgtataaactttattaaaataatgtgtttaaagtttcaaaattacaaaaatatcgtatttcagtaaaataaaaaaaaaaactcaaaaatagctctaaaacaatttaacaaacaatatgaaaacaacaaaaatataactacaaagcaatagaaaaataacaaaatattaacttacttgcaatgagaaaaattatatcaactctttaatatgtttttgtattacagttgtttttacttacatgtgacaacttgatttatctttttgtactattagattgatttcttttttttttttcatgaaatttgttgttaccactttaaatatgattaattttaaataaagataattagttacaattatttattaaataagtatattaaaattgtgtataatatatatggatgcatatatcgttataaaattttatatttttttttccttccacggtagtattttcggtgaactgtgtcagattggagaattatatgtacatggagatttggaaattgctcataatattgaacaaattataatacataagatcgaccatcaattaatgaagtagtgtgttaataaagacaaaagtataatttggaatggggacacaattatggagttgattcacctcataagatggttgacatttgaattccaaatccaaccgccaatttaaataaataaataatccatctaattattaaacccaaaatctgtgacagattcagaggatatattcaagctcatcctcctctcctcgtctaccatgcatccaaaattctctcatcaattctttataacttattgaattacacaaattagaaacagtcagagccgcccaacaacaacttgcaaattttaaaatctaatgacattaaattttggttttgaatgaaacaataaactgtgactactgactagtctagtcttgttgtacaataattttgacatatttgtttggcctattaaagtattacgtacgtatgaatgatggagttatgacctatttttttttttttttttcttatcttcaaataatatgtacattacatgtaattttatttattttagtatttggatgatcagttaggattatattagtttaatgaggttgtgtcaaatctaatcttctcagagtatatcccagaagcttgaacacgtacgtctttttttggtaa

SEQ ID NO: 220703 - DNA, 2286 bp, Cannabis indica
ccgcaaattactcttttattaatttcttttatgttcattttgtatcctaattaacacttgccgtattcaactattcatggtttgttgcttgcgttataaacttaccttcttaacttgttattgtgtgggttattaacttgtttcctaatgatcatctcttaattaattaaagtaggtaaaccgtatttgatatccatctaaatacttaataattcatggaaagtcaaagaggaaactacatacaaagtctataatgtatgctatattcattaattgtacaatacattgttgatataatttcatagattaatttatataatccgtatatgtgatattgacatctttttatataattaactattatttgcaattatattagaatctttctttggagctggttcttgcaattatgagattcccattaggtggaaagttctcaagatttgatgaagttgaattaatcaagttcaatgcctgtggtctgtggataaccaacattgaatcagccagtggtgcaattaataatggtttatttattgtcataatatgctcatataaaaagaggctctaatattgtttaaaaataaaagagtgagagactgattaaacatattaattgataggtatctaaacaaattcactttatttatacatgcaaagccagcctggccaattaaataattaatttgcttataaagttttgatgttttttttttatttatttttatttaaagagcttaacttctgctacaagtcaatgattattgatcatattttgactttttgaggttaattaatgtgattttctattatcttgttagaccatccttatatgaatgcagagacaatttaggtagatttctaagtcaatatcttatggcaatataaaaatgagccattcccaatttcacaatgaagctacaattactctctcttggatcaaccgtcctcaggtaatttcatttgaactgaaattgagataattgtggtagactgactagttgagacaattagactcactttttctaaagcttgaccctgtcactgtgattatagcacgttaattaaaaacagttatatgattaaacaaagacactaataagcaaacatatttcgacttatttaagatgtaaattaaattgaatttaaaaattagtatgtgtattctatactaaagaatgaatggtagtgggtgtgtaatactataattaaatgacaaatgtcatatttttagattcttttatttgtaccttatcatcttattacaattaaaccttgtcaatgaaactaattatttatcatggaaaaacattacaaaaaaaatagttttgtaaaaaatgaataacgagtacaatatatttgagcttactcgaaaaaatacgaaatcattcaaaatattcagcacaatagatatacatatacattaacttacttaaagttacgatagtgtataccaaaaaaaaaaaagagtcaaaataacaatcatttgccaatttaaattcattcaaattaattactaatataattatctaaaaaaactgataagttcaatatttcatcagcagtgataaaattccatagaaatactttgtaataactctagagagagagagattgaacaaaattcttgttatacctattttttgaactattaatgaacaccaaaacgtttggggagagcaaaggttcccaagttaaattgtatgccacgttgcttaaataatggtctgtgcataaataataaattctcatagcaaatacattgtgcgataggtcgaaaaaactcaggactcaacctgtgaagtgacctcatgaagtgaggtatttcagcattgtcgggacgatatttcaataaatattcaaaatctcgcaataaggacctcgatgttggtcataatataaggaccttgtagttgctcgtataatacaaggatcttgtagatgctcctaatataatgaacttgtagttgctcgtaatacaaagatcttacatctcctcgtattacacaatcagtatgcattgcctcatattacacagcaactatgcatctcctagtattacacatcagtaatgtatcacctcgtattacatagcaatgatgaatcacctcgtaatacataaacagtgatggatcagctcgtaatacacagtcagtgatgaatcacctcgtaatacataattagtgatgcatctcgtcgtattacacagcagtgatgcatcacctcatattacacagtggtggatcacctcgtaatacatactcagtgatgcatcacctcatatta

SEQ ID NO: 220704 - DNA, 2586 bp, Cannabis indica
ctacgtaggcttgacacgtaacaatcacctagtatatatatatatatatatatatatacaaacataaaccccataaacccaaaacaaatatatcatgtaaattaattaatctaattacgtacgtacaccattttaataatcttcttaattaactaccaccattaattaattaattattattaatcggatctatttgtaaatcttaaataatgctcatatatacttgccaaaacttgtttattatttatatgtattacgtacgtaccaactactattaattgtgattgaagaaaattggccacgaaacattactatatattaccatatttatatccataaatataaatttaattacataatttatatttatgttatataattacataaatattataaatataacaccattaaggaaacaaggtcagaaaaaactacaattgtccttgttttaagtattatagttaatcattgtcaaaaaaaaaaagtattatagttaataatgtttcaaaaaaaaatactatatatagttatttagattctattataaactatttttaccatttctttttcttttttttttttaaaaaaagatactttctaagagtgtttagataaaagataaaacatacttttttttttaatttgtaccttcttttacttttgagaagctattttaatacttaaattaatttatataattcttaatttactcaaaagatattttttttttaataatatctatatactttaaaaagtattttttattattttattttcatataatatttatttaaacgataacaattaataaatatttaagtttatacttatgcatacttttagctataaataaaaataaaaatttaaccaaacaacactatatatatatatagaactagctaagactattactattaataattaatctataattatatataacataataatctcaatacaaaagtattgttaaaaaaatcttaataggaaagtattaactgctcttccttccctggatacacctctatataattaaatttaaaaaaataataaaaaagtctattatttaagatcaaaagatataattaacctaagatttagcatcatatatatataataaaaatttacttaaaaaaaattaaaggaaattaattatatatatctatggctttatttctttttctaataatctgagtttttggttagttggccaactgtatttgactagtaataaagatgcgagagaagaccaaatcccataataattaaaaagtaattaataaaaataattatatataaaatatatatatatgtataaattatttaaggtgaaatttggagcggtctaacacattactttccacttactcatttcccaatcaaaaaaatatacataaaataacatacatatactcattttttggattgttatgtgtataaatatatatactgattaattaattaataataataatatataaaaaaaagggtgttatataatgattgccactcgttccacttgggtgatccgaatcttagcaagaggattcctttttttttttaagtaaaaaaaaaatcttcacccttaaaattagggttttaacttttccaataattaattcctctaaaacattattattattattattattattattattattatatatctttgctttgatgacactaatcatttcctctcaaaataattggatgtataatatctccataattgtattatgtatatatacatcaatgatatgagtgaggtgtcatttctcttatggaataaggttgtcacaccatcaaacaatattattcacttaacgacaaaatatatatacatatagatatatctatatgtaatatatgtatctcattttttttttttttgataaaaaatatagaacgatatatgacaaaaataactccacctcattaagaaaatatttgagaaatgagaaaaataaataattaaaatgagttaattctaagtgtatttggtaacatttttttaatgaagttttttattttttaattaaaataaaattccaaaaacatatgttataaaataatttttactttttttaattttttaattaagaattaaaattttaaaaacaaaaaaaaataattaaatttttttcttaatcaatattttggactctgaacttaacttgaaccttgagactcagactctaaccctgtctcaggaccctggaccccagaccccccaacccggccccagctctgaacctggactctagccctgacccagacccaatcctggcctcaactccggaccctaatccagaccccaaacactggacccaatcctggccccaaatttagacccggaccttagacctcgtctcgaacttaaacctgacttaaataaaatcaaaaaataaaatgatattcttaaatgtcacaaattttgcaatgttttggtctcagacccaacacaaatcaagagcccaacaaccaagccttgtacaccaaaaatcaagagcccaagaagggcaagagtcaaacacagactatatcttgggaaatttagatagtatactaacttttgttattttt

SEQ ID NO: 220705 - DNA, 2373 bp, Cannabis indica
aaagaatgcatttgagtacataaagatgttgttaaattatgctggtacaagtttgtctaaactcatcactgattttattttgatgattgtgattttgggtgataggaaaaaaatattgaagaatcttgaagatttcaagaatatggttaaactactaagtttggataataatgagaataactcaaattccattctgatcaagaatttggtatctgtgatccaattgataaaaacaattgtgaaaaagaataagcgtttggttttgccaaaaccggggaagttattaagcgatgatggggacatagagttcgagctgcttcgaatgatactcacagaagttttgtgtgttgaagttgttttttgtggtcctaggatgattgaggttttgacggatgatcaattcggattatatggattttatcttcataaataccttagggaaagattgttcgctttgaatttgaagatgaatgagatgagggtgcaaatatgtttgatgccttccgtaaatgaagaaaccgcaaagaaagtttcaattcttcgaaaaacaatagatgaagggcacaaaaacatatggaacaaacttgatcttaactcaacatcagcagctgcatcatcatcctaataatttggttttgtattcgagtttcaagtattcttgttcgagatgaagatgaagattatccgaaggtttggttttgttttgtaactttcttttaactgtaagtgattctttgttttagtatttgaaaatatgagacatggatttgatttaatattgagagtttatgttttgtttgttttatcccaagatgatttgcttttgcttgagtttcatttgagtattgttactggctcagtttattggttatgaatgttcaaacttgactaccttcactactcattttatccaaatggtttaagctcagataagatatgattgacattcatatctgaacattttgagtcttcattattttcattgcccatttcaattgtttttcttttacttgcttggaatggagtaatataataagtaactggggtaaatatgttcatgagacttgcaaattgagagaggaatctaagatcactatgcttaattagttctgagttatgatctgaatcaagcttagattaggatagattagtgttgtttgatgatgattattggtttatagggaataatgctaccttggacttggaaagagttgaagaaatatgcagtacagccatttgagttggcatttgctgatgcgtaccaaggcttttaacagtttttctaattcggcttagttgccacttttacttaactgtcctaactctataaatagacttagtcacattcattttaattagagattagaagaatgagagagagagagagagagagagtgagatacatcaatgcatttcaattctaaattttgcagtcttttagctattgaatggtattttcatcttcctgatcaattttattgctgctatgttcacttggttttgttgttgagagtgatatcaaatcactacaatgatcccatacagaggcacacatacatcatttctcaacttgaaaagatttcctcaacatgcaaatttgactagaacaaccatctaagtcttaatttttttcatttataaactgattattgatcatttccttttggtacaaaaatgaatgatttatttactgatatataaaagcaaaattaccagtacagtactcctcaataagatcaagtttgttccgttaagtacttacaacatcactgacttcaccaaggacttcgatccattacaactcatattgactaattcaagagcatcaaacatatataccaagattgttacattttgtaaataaacaaacaataaactattctttcttgaattaaacataactaacaagaattaagtacatcagataaactcaaaatcatactaaagtttcataaataactctgctaatcaacactagtctaacataggatcttactagtccataactcatgagccccagtttccaaaactttccttaaacacttcaactctgaagaaagtttccttaaacacttaaacacttcaactcgaatctaataccatacttgcacacaacagtaattacttcttcaagttttttcaatttctcctcgaaaacattatcaacaagatgccttgacatagagaaaagtacatcatttgtaagtgttaacaaactacttagtgatgtcacctaaataactaattcgtgtctgttaattagtttgttagagttagttgatttctgttttctttgtttaactgtcttcttcttgactgtacttactggatgcatataaataaagctattgcctactctgttgagttaaggct

SEQ ID NO: 220706 - DNA, 5451 bp, Cannabis indica
tgcaattgtaatgtttctttaaaattgaattttagaattaaaagaactatttaatttctaatcgataaaattcgaaatacaaattaacaaataattaattaattattatcattgcatcaaaattcaattttgaatttaatgcaataaaaaaaaaatcaaaatggggtgtaaaatttcattgtaaactttttttttgttcaaattaaaatagggagttagaagtaaaaaaaatatgataaatgaaatagtataaatgttaaagaaatggtgtagattggagtgattgtaagtgtaaatttaataaagtatttatttacctttatttattcaccatgtgccgattcaccatgtgccgtattgatttcttgttgttgtcgtttgataatagcatcaaacatatatttagaaaagaatcttttaataataataataataataaaatgaagaagaatctttgataaatcagtcagaatctatctctatactaaaactagattccaattttgtatttgattacatgacaaaatatatgctgaggaatttatgcatccattaatatttctcaaatgaattactctacttatttatcattgaaattaattaataatatataaacctaatctattttttaaaccacatttctacatttctttttagtgttaatgtttatgttttgatcaatggcggagctagggaagagccccagggtgccatggccaccaaattttctttatttttttaaaaaatttattaaagaaaataaaaataacttatctagttatcttctaaagtttaagttttggttttttcttatatatttgttccaccaatatattccaatggcatgtttggatcctttgttgtcattatgaactttgtgttttgaggtttgttcctccttttttaatgaaagtattttttaaacgcataaccaaaaaaaaaaaaaaagacatcgtttaaaaatcaataagataattttgtaaatgaatgagtgttgaaaaagtggctgattaaatatagtggaatgaaactatggattactattttgattttcacaatgtaaattattacaataaaattaagatttcataatgtaatcaaagttgtgtcaagaaacaaaagaaaataggaaaatttaaatttctactatttttggtaaaaaatttactgtcttaagtttaaagattttttttaacattttcacagtgtttataaaaataatacaaaaacaataaaaaaattacataaaaatataatatacaaaaaacaataaaataataaaataataagaatacaacaaaaaaaaaaacaataaaaatatatcaaaagatcatgttttatgtaaataaaatcttaaaaactgtaaaaatatttaaaataccgtacaatctttagtttcttttttgtgtatttttgaaatagtcccaagaaaataacttgagaattatttaggcccagcatttttgaatcacatacttataggcccataatgttccaggcccaacattggcccatttacttcccaacgagctagagaagaaaaagcgcgccaagcgagagagagaattgcgttgcgtgtacttccgagtattaattgtacggaacagttgggaaccagaaccaacaggcaccaccacaacacccaatatgccggagctaccggaggtggaggcggctcggagggccatacaggaaaactgccttggaaagaagatcaagaagtcggtcgtagccgacgactctattgtcatcgatggcgtctccgcctcagacttcgaggctgcgcttttgggaaagactatcgtcgccgctcaccgtaagggcaagaacctctggctccagcttgattcgcctcctttcccttccttccaattcggtatattttgttttaaaaaccctaatgaaacaatgcagagttgttctaatagcgtcgttgttcttttttgtttccttctttgaaagtttgaaggttgagctttacggttatttgattttaggaatggcgggtgctatatacataaagggagtcgctgttactaaatataagaggtaagcattggtgggttgtgggttctactcgtaatcaaggaatgtttatgggaatggaagtatatttagtatttatgattgtgtataatgtatttttgttatgatgagtttaacaatggtattgggatgagctagctcacatttgatggttctattggttacttacaggtctgctgtgaaggaagatgatgagtggccttccaaatattccaaggttttcgtagaagtaagaatttttctgctctacaaatggggattttccatgttgcatttggcatataatgggatcaaaatagttttattatttgcatttacacataagagaaaacaaattaacttttttcatcagaaattagagctaactgaaaaggcttttgatttcgtattttattataacatctacttttgaaggattttgtagtttctattctgaaactatcactttatttgcagctagatggtggaatggagttctctttcactgacaagaggcgattcgctaaagtccgattgctgaaagatgtatgtatgatgaatgaagatttaaagttttcttacttttgagtgggaagacaacatgtttaattttgtctttgtttacagcctgcgtctgtgcctccgatatctgaacttggtcctgatgctctcctggagccgatgacggatgatgagttagttgcatcattgagtaagaagaagaaagttgcaatcaaggctttgttgctcactcaggttagtttagttcttcatttctgtttataatccagtttttttgtttctgcgttcaaaatcaaaagttatgctatctttttgtactatctagattggttaaatttcagttcattggaaaaaaatttcttctttcttttatttcatgatttttgtactgagtttattatatcttttctaatcctatgttattatttgttcattttttcagagttttatttcaggtattgggaattggattgcagatgaggtgctataccaagtaagtacaattttcatcatccgaaattcttgttggtattgtttatacattttcatttttacataatttagcttctcatttggcggttaagtgccgttttccagctcccttgttaccttttaatttgagtttttctgtttatacatgcaggcgagaattcatccagaacaacctgctgctacactgtccagggaatgttgtgcgacgttgaacaaatgcatcaaggaggtggagattaaatttattcctgaatgttcttgaactattaaatttcttctctagaaatacactgtccattgtgaatatagagaatgatgactgtaggttgttcgttatgcggttcaagttgatgctgagtctagccgctttccacttgaatggttgtttcattatcgatggggcaaaaagcccggaaaagttaatggtaaggaactgttgatgtttgaggtcattttgaccaataattcattttacaggctattgaaaaagcagtggaagttggagcagatagtagtcaatttccaagtaattggatttttcactcccgtgaaaagaagcctggcgaggcttttattgatggtttggcttctgatctttaacataattatatccaatgccaagcggccaattagatatttgtattgattgatcactttgtatgcattgctactgcgtaaattttctacgaacccatttgaattcattttaggtttctgctcattaggccgtgtttcgattggcctactggattaacttgatgttcattgcaatgcagggaatcaaatcgagtttatcacttctcgcggcagggtaagtcattttccaaacagaatttcacacttgtggtttgtttaaacgtattttttctactaactggtctgtacaattgtttagacaactgcttttgtacctgagttacaaaaggaagtcggaaatcatgctgcaaagaaagttagtaaacaaagaaaacaaagtactcggggcaaaggaaaccgagatggcagtgccgacaataatgtagatgaaccagaagctgatgaagatatcaatgctgaagctacaaaaggaaagaaaaggaggaagccccagggtcaagtgaagaagagtccagcaaaagtaaaatctgaagaaagtgatgatgaagagaatgataatggtgatgatgtcaaggaggaggaggtggaggaggaggaggaggaggataatgctaaaaacaagagatctaagaaagaaacagatggtaagccatctaaggcaggaaagtcaagaaagaaaaaggttctatccaatcaaaagagcaagaagaaatctaagtaggtagcccacttaacagccatgccagtcgttttctggagaatatgatgaggagaaatgggtgtacggatgttttttttccccttcgtatttagtttcgtagctctttgccatgaaactggtactctggtgtattttgtactcgattgaaatcgaaaagtaggggaatgaaatcctattttctggtcagtgattatttttttctttcaatggagagattgaatctatcatcaaagataaaccaaccacaacttaactgtatgaacacttgttgcttgaataatataaagacaaatacggtaaacttttgtctttcactgcgttttctgaatgtatattaaaaggcattatatacacgtactaattacaagaagacaaagcataatagattcaagttagcagagtgatccaactttcaattgttgtcccatgccttttcagaagaagcaaactacaatatgagcaacaaaagattataaaaaataagtctagaaattgtgtaaagaatctttgtatacagagtttatttgggaacaatttctatagaaagtcttttataccttcttatgtgttgaccttcagaaaaatgctcttagagcatcaacaattttctcgggcctgttatgaaatgtaaaattttgatgaaaaaaagaaaaggttttacatgaaaacttgagaaaccagagcgagcagacttatttaccagtcctcctgaggcatgtgccctgcaccttctatcaacttaagtttgacagaagggtttcttttctgaaattcttctgcaatagattgaggcagatacttgtctgataatccccatgcaactaatattggtgcatcccatctgaaaatcccaattcagaaatagttagcagaaagtgacacaatgtaaacattatttttttaataaatattcaatctttttggtttaacatgtaaaccagaaccgatgtaaatgataattgtagcttttaaacttatacctttcagatgcgaaaccgtcttctatttgggttaagatacttttgaaattaactttccttgcagcttcaagcaaagctgaaaaatcaacacaataacatcaaaccagaatgtta

SEQ ID NO: 220707 - DNA, 1729 bp, Cannabis indica
ccccatattgttacttgtgggtctgtcaaccaaaagtatatttaggaattttgtactctgtattattgtgccaattgaactattcaacttgttaaaaatggttttttaattattcagagtattgtaaattagtcattttatcaaattttatcacacgtatcaaataaaatgatggcatgactacttaattagttgttatgtatcagtgacatatcaacgccaagtgtgtaattaatttgatttttttaaatgcatataatttttatttctattaatgttaaattatacacgtgatactgatgtgacaattgactaagtagtcatgtcattattttgtttgtcacatgtgacaaaacttgatagaatgactaattaacaatactgtgaatagttcaggaaccatttgtaatggcttaagaagttcatgaggcataataatgcatatgttataatttagggtaaaaatcataaatagcctaactaaaatcatttataactaaataatatcatacatgctaaaagactatacattttaaagaataaaataatagatagtcatctagccaaatgagttgtttatccatttgaagagcatgtacatttaatctatgtgtagccacattggccgactgatgtacatggattagagtgactcttgaaaatttgaataacatacttattacatcatctaacaacgattctagatcactgaaaaataatatctcctagcaatagcatacacaattgttaaaaggttagaattaactatgatatacaacaaattttgaagaaaaaatctatccaacatcacttatattgctagacaaatgcttgaaatacttaaaatctccatcttctactcttaagttagcaattaataaaaatcactaaaaattatttttaatgagactgaaaataccataaaaaaaatcttatttgtaaaaaatattattctccagctaagtatatcatttaaagtcgccaaaataatttccattccaatatacattaatcttgaggttttaatgatttttttacatgagatttttgctttaaggaaaaatatacatatttttcttttgaaatggaggaaaaatatacttaaaggctagtaattgtattggcaagtttataaccttaagcaataatcactttagatgatttaaaagttaaatatctcatcccttacaaaaataataataaatagtaattaatataggatgattttgaaaataagctaattcagggtgcatttgtaagtagttttctaaggactaaacatcaaatatctccaaccaagatgtataaatgacactaaattagtaatttattacagtgctactgcatatacgtttttgcactgtaacttttgattttaatattaatatgtatataatatttgtattataatataatataaagagtatttcattttattaaaatataataataataataataataataataataataataataataataataataataataaaaagtataatatttagtgtaagttttaatattttagttggaatgaaaaataaaaatataatacttgttgaacgagatttttggcaactaaatgaataatataataatgagagcttagggataattaatgcatgtagtttttacatagtttgggcattaatgagtcgtagtccacgagtctctattattaataagagattattatttacagagaatgtttctgtgtctt

SEQ ID NO: 220708 - DNA, 2982 bp, Cannabis indica
aaatagtgtgaaatcgatattaaattgtaccaatgttagagaactaattttgtacttaatatcttgagctagttttgttagtttaatagaattattggttgcaagtttgaaatttttgttacagtgatatttttgtatagcttcatctcttgtaaaatcctcttttatatataaaaactcctcacaaatactcaatatcttttacaagtctatgatgaattgcattctcatagattaaattctgatgagactctgtattgataagctccttcacggtattagatttcctttgtacaatgtctgctatgaatccttctcgcccagaaaacccacctcgctccacagttcaacaaccccccactgcaacttcgactcctattttggccaatcaaccatgtaattagtttttagaattccctcaactcctccctcactatcaaattggatggctccaactttcttgcttggaaatcttaggtcatcccaattgttattaggcatggacttgatgatattctcctcacttgcgtatctccacctgaacgattactcaatggccagatcaaccccaagttcaccacttggagaaggaaagatcttctcctcagctggctctgatcatcaatgtctgagatagttcttggcctttttgcttagtacaatacctccttcattgcttggagagcccttgatacaagattttccagtcaatcgaaagctaggtgtttacctggaccctagtgatgtggacatcaatgtttaacacatggcaagaaaaaaacatctcagagtagttaagtagtcccgaatcgtagtagttaacctagtaggggtccctagccccgcgtcaaggttgactcagagaactccagtatgggtgtttggatcccgccaaatttttttcaactcactatctttaagtattttgaaccaagaagacaaaaagaatccaagtccgagacctggaaattgaaaagaaatgaaacatcacatcagaagtaaacccagacgcctaggcttttcacccagcgcccaggctcacattcctaagtaggatttcagttttcgggtccgtcttagtaaacatggctccaaatttgtacttagacatgcataagacctgtcgcaaccaagttataggcatccgaatctaaattggaacactttccgtttagagcacccggtgctcgggccacctggtgctgcacccagcgcccaggttgacatattgtcaatctggagcatttccaaccacaataagaagtatgctaatcattttatttgtctccatccaaaatgaggaatcaagtgttttcgggaaagaaatggatcaacttggaggccaaaattgggacccaatgcccaagttgacctagtgctaggtcttagtgcccaggttgacatattatcaacctaagccatttccaacagtagttcaaataacgtcttccaagaatattctttgttttcatcaacaattaagatttgggtgcttttgggaaacaaacagagccatttgggagccagaattgggacccagcgccctaggttgacatatattgtccacatgggccatttccaaaaaacattttgagaaggctttgagcttattctctattttcaccgataactgatatacgagtgttttcgggaatcaaacataagcatttgatgggcacaacttggacctagcgcccatgttgacctggtgcatgggccagttctgactgttttctcaaagggagagttatgaatagactctacatgctctcaaaaatctcctattatgattcatatgtggagctctagtgtcatctagccacatccttgccaaaagactcagtgtctccttcttgtttgtctaaagattcagagtcttcttcttgttagtcaaattgtaataaagttggtccatcagctgaaaataattgtactttctacaaataataaagatgtgttttcctattcttctgaaagtttttttttgcaaactaactctgatgtcaatatttggcactcaaaattgtgccatccaacacctagaattcttgacaaaacagtatctaaaattaatatttcaaccactttaaaaaaacataaaattttgtgaggcttggaaaatgggaaaaagtcataagctgccttacccaacttttaattcgagagcatctcaacccctagaactgatccacccaattctttaggggccctcgatctcatgtttcatcaatagaaggccataaatattacataattttcattgattattttaataggtttacatggatctttctccttaccctaaagtcctaagcatacccctcttttcttgaatttaaaaatcttattgaaaaacaagttggccttctaatcaaaactattcagtctaattggggtggggaatacagatcattttctaagtttctcattcaacataggattcagttccaacacccatgtctctatgaccatgaacaaaatggtagggttgaacaaaagtacaaacacataatagaaacaggtcttcactacttgtagaatctaggttagctttttcttattggtggttagcatatcagcatgttgtatttgttatcaatagattgccaacccatgttgttgatgacttatctccctatggatgtctctttcataagctaccagattacaaccgtctaaaaccatttggatgtgcttactttccacacgtaagaccttatcaaccacacaagttggacatcagatcagagaagtgtatctttgttggctattcactacatcataaaggctatccatatcagaatagtaaagggaaaatctatatagcttgaaatgtgaaattcaatgagttggacttccctgcactccctctcctaaatcactatttccaaccacaagtttctacacttctcccttagatgctaatgctcctattttaccacttgaggcaccctcaacttatgtgactactagagttgagcc

SEQ ID NO: 220709 - DNA, 6697 bp, Cannabis indica
taagttaaaaaatacttttttttgttttttataccttaattaaaaatatcttcatattatatttaattaaaatatatccacttttttaagtaggttatccaatatacccttactttctatttaagtctaacatatagtttacgttaacctaaatgatccaatgggaacatcatctataaaagtgggtatatattaaaaaatataaaaatggaggtaaatattaaaataagtaaaataaagtaggtatacaatataatttcctctatatacccttagcttaactttatcgtgaaaaattccgagtaggattgtcatggactgtgttgcctcttagagcattttcaaggcaagtaatgtctataaaactcaacatcaccttaaaatataatattttattttctctctcaacgacatcaatattaggtactttctgctaaataaaacactttaatgctcaacaattctttaaataatatctcatacactattatttaatatatcattcattttatttctaatatgttattttattattgtttttctatttcagcaaaaaacttttattatttaaaaaaaaaatagataccacattgctcctgtcaaactacagcagttatccaactatttaactccaatgcaatagctaccattaaaagtagtccatgctatctttgatgtatagagcaactttgatatatagagctgctcttaagataggtttgttttttttcttcccaagttcccaatgctatcttttttttttaatcaaaatgcaatttattaagataaattcgctattacagaagaattaaaatatcgtggacaagtattcgtttatacacaatctcctaaactagtaacaaaggttgtcaatgtataggcaacactattcgcaaactgtagagtagccttggaagaaccaccactaacaatagctaataaaaaaatgaatatctaacaaaatagaatgaaaaatataatttgagtgaggattattaacccaaccaatagctacagtataaacactattaataatggagataatgaacccgaagtgatgcgtaagattcaaacctagtctaattgcaagcagtttcgctacattaacagaaaattcacccaacacacaagatgaccaagccagccaaaccacacttgtagcatcccgcatcgccccacccaattcgacaaaacccctcctaagaaccactgaagaatcagccataagagcaaatgaatcaggaggtggtggcatccaccgagtgggccctggccaactgggttcgaagggcacaaccccatctgaacagcccaccaaacaggctctttgaattctgacatgtgattatgagctaaatttggaacaatatctaatcttgactgtatatcattaaataatattgagtttcgatcatactaaagtcatcaaagggtatccatcatcaattcaaatgcctcaagagatagcttttcaaagagatagaggagaatttctagaattggaccatttacacaccggtggagcaacgaccatacccccaaccggtgccacactagaattaggctagaacagaaaaataaagcatgttctagagtttcagattcttcatagcaccttgagcaacaaagaggtacctaaactttccgagagataagttatgtagctactggtaacaccaaatagaacatacgccaaacaaaaactttcacctttggtggtatagtaaggttcaatactccattccgccaatgaattacctgagatgagtctgctactccctcatcaaactgaaacaaccacgccagtaaatagccacttttaacattttaaaccccatcctaatcatagagccagtaccaaccatcctccgcctctcgcctcgcaatagaatagataaaattatgttaacatccatgtccaaaaatatttgttgaagcttcctaacatcccatgcaccggatggaagataaattcactcacccagcaatcatcatttaccctcctcgtgattggctaaaaagatctcagacgtgggagccatgggtctttgaacgcccatacttacgttccatctccaatatatctataaagaccacatttaagcaaatccaattcccaaatcaaactcgaccaaagatgagatgaactatcctttttaatggcttataggatagagtaatttggaaaatatttgtgtttcagaattctggcaggtaacgactcttagtatagaagtaatctccatacatgtttagccacaagatcttgattaataagttaaaaatcctaaaacccaagtcttctcattgtgttagggtgacacactgtttcccatttcacccaaagaatctgtcatttatcaccattcgaatcccatcagagttgccttacaatagactttaattcttcataagttgccgcatgaagcttaaagacacttatcatataagttggaatagcttgaagaatagatttaataagtaattctctcccactaacaaaaaataaattctgcttccaccatcgaacacacttccagaccttctcacaaatcccctcaaacgtttgcttttcgttcctaccaaccaccataggcaatcctagatgcttatcatgagtagctatagatgtcaaacccaatacatgtagaaccccatcttgatccggtgattgcacatttggactaaaagtgatagcagacttctcaaagttagtcttctgactagaggcagcctcataaagtagtaggatacgcttgatagtttcagtatcacttccattagccataccaaacataagactatcatcagtaaaaaaataagtaagttacacgtggtcttgatctagaatacctaaacttcatcaatttaaatctagcttctacatgagagatcagtgaagacaatgatttcgcacagaaaaggaataaataaggagacaaaggacattcctgtcgtaaccctcttatcgataccactcttcctttagggcggccattgactaaaaaagcatactccagggtcattacacaatccatgatcaccctaatccaaccatgagcagttgccaacaacatcttcaacttctcaataataataacaataatgttctctaaaattaaaagtccaatatttgatccaaaaactggaaatgtcaaagttaaattaaattttcactaatataaaattggctttttccatagatttataactttgttttatactgtattctatcagtttctaaaattgttggctatgtgggtttcaaaaaaaataagaaactttaaatgacgatttataactgtcaggtgctattgtggcagagctgcttgtattggagtcttcaagggttgccattaatggtaatcgttttcccgatttgataccaagttaaaacaggaaaaatgtagagaataaaactaatattgaatgttcttttttactgataataattgcttaacggatacaaaggttgagcatgatacatctatttatatggagtaaaataggggacaaaaggaatatacaattgtacaaaatatccctgaattttagggaaaggcacaacggttttgtacgatgccaatgatatgctagctagcgttagtgtgatcatcactgaaatcagttatagaattttcatttcattcaaacgttagaagatgtgataatatcagaaggtgttgtcaagatgtatgagattggtatttttcaataggaaaaaccaggagaacgttatcggggctcgaggctctgataccacttagtatattcgagaagttgatggatagaccaagttctcatacaatttcgtacaatctttgcatttatttgatatttctctttatttttaaaattaaattttaaaaaatgagaataaaaaaataatatttatggtgtcaagaaaataaaaagtgatatttaataaatagaaaagaatgaataaatatatttttaaaaataaaataatattgaaaataagtaataaataagagaaaacaaaattataaaaaatatgaaaaaagtcaagagtaaataatgactgatgaaaagttatagtagaaattaatgaaaaagcaaaaagtaatatttgtgaaaataaaaaaaaaaatattaaaagtattagtgttgttattacaaatttcggtttgttgttttagaaaactagaagatcttgttctccgagaacaattttttgttttttttttaaaaaaaaaatataatgctaaacactcctcattttttttttaatttggtttcaaatgatggcgataactataagcgttatataatatgagggagaacactccttttccaatttccatgctgagttgggtggaaattgagctgttccaaaagtgaattacaagtgcaggggacccatagacattgggatttggaaggacttttgaagattggtgctcttaacttctttgttgtatattccaatgtaccacctttttttgataatgcaatgcaaaagaagcacaaaagtccagcacatacatgcctacacgtgcgttcgtgtgtgcatctgcattccactccttcaacctataaatgtttcaggttttggtttgtaatttgtaggaaattcgaacctaatttctcctacgtgcaccaactcaaggaaacaattagccaaacaggttgtaaacaaccttcctggtacaatgctaccagttttaccttcctttacttggtgtcaatgatgctaaaaccaacttcggttagcatacaacccaaattagagttttaacacaacaaaacataatcatgaacttcaaaccagaaatcaaaaaaattataaagaaataagggaagagagaagcaaacacaagatttatagagattcctcccaatgcaatggaatacttcctcttttcgagctctcctcaaagatgacaagcttggtctgcactatatcaaatggtggattgcaagttacaacagttccaagacttcatgccacactagtttggcagatagtcatcttcctcgatcaatggtgatcgagttctctcgtctcaatctttctctaaaccactctagttcaagctctatcttttctattaccaagagaggtatttatagtatgcctttttgtttgaacttattctcaaagttaatgaatttcgacaaaatgagtcttagtgtctaatagaatgtctcacatgagatatgagtccttctttataaaggtatataaagagtaactttgacactaaagataagacctcaagagatatctagttttgtgctaatgggtaaggatacagatgacttgccacacccgcacgctgtccggctgtaccgagctggtgtagtgtaacactactatttggaaaaaaatttattattatattaataataaaaataaaaatttcatttttagtagcattatgtagaacacttttactattacattggtttagttttgaaaatataaaggagtaggttagggtctttgacttgtgttgtaactgttcgagagttcgttaaagctaacttgataatctggcattgttaattgacttaatatgatgattggtttcaacacaattattgcacattgtatgcgaagtagattaagtgagtgaatatcaaattcacaagcttattcattaatctctgtttttgtccatttgtgtagagagcaaaaaaattcaacatcacacgaaaaaaaaatgaaaaaaagacatgcattgttcatagaagaaccccagactggaaaaataagaggttattaaacaatagtgatgatacaaaacaattgccccttctatttcctcaaaagcaattggtaaaaaaataaaagaaacaaaagacgtacagcattatgaggtgagccattgctatgttacaagttcaagaagactgcctcaaacatggcttttgattatattaatttgacgtaagaaactgtacagccgcaaggcagaatatacgtgtatgtgtgttgttcatgacagtgtttgcataccagcttctttggcttcttttgtgttttctttcaactgagcaaaggaaaaccatatatatctagtaaatttcttcatacttcatttctaaacatagagtgaggaggcagaaggccgaggataagaactgtttatcttctttttattactgctaacatcatccgcacttcgtctacgagtccttgtcctggattcgttgcttgaattattctggttgctaacagtttcctgggaactctgaagctgctccaaagctgttacaacctcgtccatgttcggcctgtacttgccttcagttgatagacatctcaatgcaagtgtagctgccttatgagctacttccatcaagtactggccttcaagacggttgtccaagattcggaagatcttccgcttgtttgccagatagggtttagcccattccactaggttgtgttctcccgatggtcgatttttgtcaactgctcttcggccagacaacatttctaataacacaactccaaaactgaatacatcactctttgcagtcaggtgaccttcaggcagttatgaaagtagattcattattagtagtaggaaacctgattgcctcaactttcaagaaatagaagatcaagagcgttgaaccaaagataatcacaatctaaatcagtgagcagtagagttaaggaaaatacgttaccagtggctagatattcgggtgcagcatatccata

SEQ ID NO: 220710 - DNA, 2158 bp, Cannabis indica
aaataaaagagactcgaagttcttaaaagtagacatgaccttgacaaaatcgaatagaaaataaaatggatcttgaaagtttctcatcgaacataaataagtttagctctaatatatcttattggctttagacaaagcctatcatggggttaaaataaaatttatatatatatatattttaaaaaaaaaaaaatgaaaactacattgtaaaaacgaagagagattctaagctctagaaagtagacgcgatcttgacgaaattgaattgaaactagagtgaacttttactgtatctcatcgaacataaacaaggctctaatatattaaattggatgcttactgtgtaatatattaaaaaacacaagctgcattgtgaaaaatatacccgagatattaatgtttttcgattcctagactggatctcgttgaaactatactgaccttgaatatatcttaaaaatcatggaccaggtatatactttatctaataagatgtataattgatgctcatgaaacttgaaatgacctttacacagagttttgaagccttttaaaatagacgagaccttgacaaaatggaatagtaactaaagtggactctcacaatatctcatttaacataataaagctctaatgtatccaattaattatagagaagatgaaggccagatgctcgcctctcagactaacaaaaaaaattatgcagatccgaaacgcagaattatagagcttcaagtaggagattatgtgttcctacaggtatctccaatgaagggaattaaacgtattgggaaaaagagcaagatatgccctagatttacaggaccttttgacattctcaagaaggttagattagttgcatattgtctagctttgcctccagcattatcaacatttcataatgtatttcacgtttctatgttacagaaatacatcttggatgatcccactcatgtattgagttatgaaaacttagagctccaaccagatttgtcatatgaagagcagccagtacaaatccttgtcacttaggggcctgtaaattatcgagcagcagtttccactcaggttgactggcacacttaaattcaaaatcaaggtaagattagtataataattgcatatataattacatgttcagcgtacatgtttatgaatgcatgttagataacatatcggtaatgatggtgttagagtacatagaattgcactgaataccgatagatatatgtttggcaaagtactgattgatgttatcatatccatacgactagaataccgagtataggctgatattatggtcattagtactatcatacgaatgttatagactcaatgcgcgtgggatgtgggatatggttataattgggtgtatgggcgcctagttataatccagtttataattatgttataattatgattttcttattgagtctgtcaactcacagatattgtttatatgtgtaggtaagggcaaggtaaaggctgaacagcaatgagctcgagctaatgaagattgtacatattgcgacaattagacctggagtgttcgatcttcgggacaacatgctgtattttggtggttgctaaacgacaacttttgtaattaattatcttgtaatacaattttaaattttaaagaagggatcccaaattatgtaaaacttttgttgatttaattttaaaggttaataaagaaagttttaattatctatgtttttccataaacaatctgattagtaaaggagagcacaacattaagaaatcacaataacacgtctaatctagtagggtgttacagtaaataattaccatggctctgaggccaattgttggaacttattttaccaggatcttaatttactaacaatgtttgattatattcgttataatctaacatcctaaaatatgaaactcataaaatgataattaaactcataaatggaatagaatcctcacattgggttcagcagaaattagtgactccttccgttcaatcactataacccttgattccgttatatagcaaggtatttgccaagttatgaacatggataacttccttaaatccgataagtgacaattctacaaagtcttctataaaggaacaattttcggatagaaattatagctatatttttttaaaataatatatata

SEQ ID NO: 220711 - DNA, 3350 bp, Cannabis indica
tgaaacttttacctgtgcaaaattcaatacccttaaactattcttagcattggctgccattgacaactagactcttcgccaaatggacatcgataatgcctttttacatggggatcttaatgaaaaagtttacaagacactccctaaaggatatgtccatgagggggagctgcctccaaatcttttttgtctactacacaaaagcctttatggcctcaagcaagcttatcgacagtggtttgcaaaattaagcaccactttccttgagcatggatttcatcaatctgcctatgatcactccccattcatcaaaaaatctaccacaagtttccttgccttattagtctatgtagatgacatagtaattgcaaataccaatgctgctgaggcaacatcttttaaagcttttctcaactcaaaattcaagctcaaagaccttggcaacttgaggtttttccttggtctcgagattgtaagatccaaggaaggaatgtctgtttctcagagacattttacaatacaaattctaaatgaaacttgtctccttggctcaaaggctatctccactcctatggatgccaacctttctctaagcaaagatgttggtcctcctgtcaatgatgccacctcttattgcagcctcattggcaagctcttattcttcactatcacacagcctgatattgcctgtgccgtgaatagactcagccaatacaatagtgatcctcgacaaccacatctcaagactgcttaccgaattatccaatacctcaaaggcacccctggccaaggactcatgttatattcaaacaacatctcccagcttcctgtagatagactctttcaactccaagctttctctgatgcagattggggcacctgcctggatacacgacttcccatcactggtttttgtatttttttcaggcagtctctcatctcctggaaatcaaagaagcaatctaatctctccaagtcatctgccgaagctaagtaccggtcttttgccaatataacctgtgagatcatatggctacacaacatcttgactgatttcagcatctcctcatctcaaccaacaaccattcattgtgacaatcaagctgccatccatatatctaagaatgcggtcttccacgagggtactaagcatgttgatatcgactgccatatagttcgagaacaggtcaacaaaaatcacatcaagctctcctatgtcccttctcggcataatattacaggtatgatgaccaaagctctcttccctactcaattcaaaaacttattgtccaagatgagtgtctctaatctctacactccatcttgaggggaagttttagacactgttagtcatcatgatgtcatgttagctacagttagttatattcataaccaactctattttttagttggttgctgatgtcctcatctcactctgtataaataccctttgttcattaataaagacaattcagttttactttcactaatacttttctatatctttctttcctctgtttcttacatgataatgtaactttcatgcaagaacaaacaaaaaaaaaaaaaacaaacaacatgattagtttttttttatgattaagaacttaaaccttaagtttaatctaaacattttcaaactgatcataacataattttttttattatttccgcaattgtttgtaaggtctgaaactctaaaatttagtcaattttgcaagatagtagttttgaccaaaaatgggaagccactttgatcaaaatttcagtcaaagaatttttttgagtggggttctttcctcccatttcttaatacatgctccttctacatgaggctttttccttttattgcattacattctttgtatgtatgactgcatcgtccatttttaatttgtgcgaatgatacgcgtcttgtatttctttttgacgtctttggttgacacgcgtcatttctagctattttcattatttttgaagattattgttttctttcctttaaatcttgtttatttcctcttaagcctcgttttgccttattcgacgttgttttcctagtttattcctaatatacgtggcaactgctgtatgtgacatgtggtcgacataggcaaatcatccggagatgagttgggagttggactaaagaagcaacaagtatggctcatgatgctagctctcggacatgaataaaagatctatcttctcctccgagagtcaagacacagatgggcgtctcagggccagaaaggcttgagttgaacagtcactttgcttttaatgcagcatggagaaaacgtttgggaacgcccataagaagacgtgtcaaacatcataaaactgctttaggacgattacacgataattgaaggagctagtgacggctccatcatgaagaatcacatcaatcaagaagggatgatggctaatctcacctaacacctatgctacctactacataggtggtgcatgccctattttgtaccttctgggaacttgtgcacgcccatagttaggtcttaaagacaagtttctccttttcttctcacaaatctctataaatacccctgataaaaattgagagggggatcggaaaaaagaccaccaaaaaacattctttgtaaggaatactctcattaatcacagagactcgtggactacgactcattaatgcctgaaccacgtaaaaatcacctgcattaattatccctaagctctcattattatcttatttaattagttgctgaaaatctcggtcgaaattttggtgctttcattgagagctgtaggaagcattgttcgaaacacgacaacaaaagatctcagctacaatggtagaaactcgaaaccacacgcgacaacctcgtccccctggatcttgaaacccagaggacgaagaagaagcctcacgggtaaatataggttctgacgaacgagacaaatcaaatgacaaagaatatgaagaaagcccataagggtatggtgtttatgacgatggtagctataccgagttactggccctaaggcacaaagcagctgatcatgaggccaaactggccgctcaaaaagagcaaaatagaaggatgtaagaaataatggtcccatgcagaaagccatggagacagttgaaatccacgtgcatcccaaggtgtgcctcaaggactagaggaaacacaagaagagtcctcactaagcacccaaaaggccaagactagggagccaagcaccatactgtatccttctgaggggaaacctagaaaaaccctcttgtccctgaaaagacaaaaaggcccagatctgtgaaaaggttgctctgatttcccgaaagagaaaggtccgcagaggggcaa

SEQ ID NO: 220712 - DNA, 1189 bp, Cannabis indica
cttaaaatgaggagatatcacctattttttacagactaactatatagaaaacaactcgttaattattcctaagaatagataaatatttgaagttgagcaactacaattttgtgggttgttagagtgaattcgtggctaatagtgaaccattatttgtccagggtgaaagctatagagacgccaactgtgtcagccagaaaggaagctggctgacttaccatttactggagactgaccgacccatgcttcactatggccggtcaggggtggtctagccagaccctcttggttgaccattttgtctctttgccatgcttgattatttggactcttcgtcaactggtactttatgcatgatgacttggtcctcttactgacagactgtacttcacgtggcatcaatcttgcttatgtgaacatgccacatcacatgggtaaaaattgaaataacatcgtaattattacaatcgtgtctatgattacaaatataattcatgtgaaattatgttgtttttttaattaccaagtaaaattaacaaataatttaattaatatagaattattgtaaaattgtttgaacaaaattgaaatatattatactaaaattgaatctaatagattcgaataatagtgtagaaattaaaatgacataagatattttatatgtagtattagctacccttgtagattgttactatttatttttgtaagatacgcacggtcacaccacaagataaaaatattaaatattattatatatatataaatttataaacaagtatcaagatattatatgaatggataattagtatttttttccctaaactttttacactactaaattgtgtcatctatagtatacaactcgttaataatgctcctcaaaatataattttacagtaacgtagtctttctatcatattctattcaattttatttgaatgaatgacacgataaatgttaattaataatgaatgtaaattaaatatctttcactatttctactttaactttaataattaaaaattaaaaaatataaatataaagtattatataaataaaaagtcttttattctactatttattaacatataataattaaaaggatgaatagtatttaatttgcattcatttatcaactactatctaccacttcacgcatttcatgatagaattgaattaaatgtga

SEQ ID NO: 220713 - DNA, 1479 bp, Cannabis indica
cattaaacatggcatagtgaagagcttctcggcagtctcacacccccagtcaaacgggcaagtaaaggcggtaaataagacattgaaggataccttgaagaaaagactcgaagaggcaaaaagaaactggccagaacaattacccaaagtcttgtgctcatataggatgatgaaaagaacagaagctcgtgatatcccctacgcccttacttatgggtatgatgcgatgatgccagttgagctagacctaccctcccaccaatgaatgacatatgaccaagtcagtaatcaccaactgatgggtgagtctctggacctattagagagtcgtagggaggcttcacaaatacggttagcagcataccaacaaaaagtagctagatacttcaattctaaagtcaaggaaataagcttcaaggtaggagacttagtactacgaagagtcttggccaatactaaagacccaatagcaggagtattggggcccaattaggaaggtccatatgagattacagaaattgtacctcctggcacgtacaagcttggttgttatgactttaacatcaaccttataccagtaccccgatattggacggccagcacctttgcaaatattatcaataacggttgctcttcagcaacaattcatgctaagggtatgcccgtaagcaaattagaatctttatcagtttttagtcttttcttttagatttgttttagttttatgcacatactgctaatagtgatgtaatatggcattgtggctgattatcaataaaattgcaagttattttcacataatgacgcaacttgtatgattgttattgaattaaattacaagcctcataatggtcaatgatgtatgggtaagagtgggcagccaaaacttataagtaacaccccggtcataggataagtgactaagaggtgaacctacttagtcacttggggggcaaccacaccaatacatagactagtaagaaaaaattcaccccacttaagtagatatcaaaaaaaaaattaaaattttaaagtgtcggtgcattactcaacattttgagcaacttttgtatggtgaatggttggctgtaaataaatgcctacgctatgcttaaacatagtatggcacacatcaaacaaaagtcaacatgtaaagccatatataaggataaaggctgtatgaccaagcaaaaagattaaacgcatgaatgtctcaaaaataaagtcacaagattaaagactgtcgaacagtcttaaatctctataaggtattgttgtgcataaaaatggtaaaagtaaaggtgcatcgaaaggagccatcaagcaagttgttaagaggactgtcatccattgcttcaaccccaaagttgaggtatgaatcggcttgaatgcaagctgtctgtgccttctgcttagcttctgcctcctcacagttgtgacaataggatagcatgccttccatgttcttacccagataac

SEQ ID NO: 220714 - DNA, 4565 bp, Cannabis indica
gattcataattaacgagaggcattgaagcaaaccttaagaaaataaaggctttgatagatatgccatcaccaaccaagcctaaggaagtccagtccttaataggaaggatgctgcacttaacagattcatttcgaagtgaactgataagtgtctataaattttcaatgtattgtgaggcaacaagaaattcaaatggacagaggaatgcgaggaggcctttaagagcattaaaaggcatatgtcgacacctcaggttttggcaaaaccagtaattggagagacattactcctctatttagttgtctcagaaaacacgattagtgtagcaatagtgcgagaagagagaaagcaccaacaacctgtttactatgtcactaaaaggttagtgggggaagaatcgagatatccatctcatagaaaactttccctatgcttaatccacgcatctcgcaatttatggccttacttccagatacacccaattaaagtgttaattgatcaacccttgagacaagttttatcaaaaccaggcgtttctggaagattgataaaatggtcaattgaactgggacacttagacataacttatcacccacaaacatccatcaagggccaagctttggtagatttcctaataaaaggaataactccagaggaaaattttcttgttcagcgagacgtggatacttggacgtttttcatggatggtgcatacaacgagcacggctcaagtacaggggtgatattaatttcaccagaaggtttcaagtttcattattctttgagattctaatttgacgtgttaaacaacgaggttgaatatgaagccttgattgctggtttaaggatagctgaaacattgagggtcaaaaatggcaaattatctagagaaagttcggaagaacttggaaaagtttgactatttcaaaatcgagcaaatccaagagaacaaaactgtaacgcttgtgtcgtagaaaaattggccttacagaacgacttagatgaactaaacttagtttaggtggaaatgctaaacgagttgagtacatgcaaataggaagatggcaagatgatagagagctcgcccacgtgcatgactctcataattaactatctactcgacggaaaacttccaatttacaagaatgaggcacaaaaactcctatatttagtgcctcgctacacgataatggatggaaaattgtatagaagaggctattccatgcctctccttcggtgtgttcttccctcaaaagaaaatgagatcattatagagattcatgaaggcttttatggggatcatgcgagttggcaagtctatcaaaaaatattattagtcagagatattacttgccaaccatcaacaaggacacccatgaatttgtcaaaaagtgtggtaactatcaaatattcttacatatacctcgcatacaaccaatggaactaagaatgatgaccttggcttaccaatttgctatatgggggattgacctaactggggcacttcccacagagcgaggaggagccaagtctgcagtggtggcagtcgatctcttcactaagtggaccgaggctgaacctctagattccataacctgtaagaaagtcctcgactttgttgtcaaaaacattgtttgtaggtttggaactccaatgaacatagtatgtgataacggaactcagctcgatggtgacatattcattgagttctacaaaaggaacaagataatgaagagcttctcttcagtatccaggcctaaagcgaatggatgagtggatgttgttaacaaaaccttgaaggatactatcaagaagaaattagacactgccaaaggtagatgggtcgacgaactacctcaagtactttgggctcatagaacaactgagaagagagcaacggggacatactccattctcactatcatttggcttggaggcaatgttacatgtggaagtaaatatctcgattcatagacgagagttttataatcaagaagaaaaccaagaactcttaaagttgtccttggatctacttgatgaaaaatgtactgagttgcaaattactaatgcagcgtatcaacaacgagtaacgagatacttcaacaaaagggtgaagaagaggctattaaatgttggagacttggtgctaaggcgagtattggcaaatactagaaatgcacctgtaggagtattcaactgaaattgggagggtccttatgtgattgaagcgatagtaggaaccagggcttacaaattggctcagccgaatggctcgctgataaagaactattggaacgtggacatttgcgaccctactaccagtaattgatgttgtaactcacatttttgatgtaatattttgaatatgagctattaacaaagctaatcattttttcaagtaattacaaagtgttactctttaaattacttgaggggcatatgtgtatgattaaccaaaatttatttggaaatatatgatatagtgaaaacccatcactttaaaaattttcaaaaatttttaaagtttttgttgatcaaacctttcttacgagaaaggaagatcaaacaattatgaatgaccttttgattaaaacagctatttaacgagaaagaaaagttaaaagttataaatgagaataacgcataagctaaatgtgaagctgaactaacgactcacattgtatatgaatgtattaaatgagacaccaaggtgccttgaaaatatacttaaacctaatatatgaatagacgacctaactatttatataagcaatcaaaaatatacaaagtgataaatcattaaaagtatattcaagtttcctgaaatagattataactgttattgggaggcagaattgataagtgctcgcaaatcaacagcatagcagaactgctcgtgcatatagtagattaccgactacttgaatattattaaaggaaaatatgagcagtggaaaggcccaaagtattttaaatttgatcaaaatatgattgtttaaattgttaatgaaaataaaagcaaacatatatatatatattaagttaaaatataaaagtacgaagcattcaataaagataaaataaaaaaagtaaagttggccatccgaccttgcaaatacgtcttcacgaaaaaattgttacacaaggggcaaaccactatctcgaccttagggccatcaacctagatgaaataaaaataaaaaccaagcctacacagtaggagacttggccagttcttctttcgctgccttctcggcatcgtcttcctcctttttggtcttctcgtagaaagcaataatttcctcctcaaatttttccaagaaacttgtatccatatcacaatttgccatccatgctcggtagatggtacggaggccaacaacattgcattgttgtttagtttcggcctctttcccatcaagtgtcaccttggctgcagcaagttccgcgttgagcttctcgcattcattggccttgtcctttgtctctttcttcgaaacggcgagcttggcctcgaggttctttttcaccttcttggcatctttacttacgcgagtgttctcagacttggcatcgtgccagtgattggtcaaagtctcgtgctcgcctatcaagttttgaaccacaccttccaaatattttagtttttccataccacgttgttgggtgacgaaggagaggaaagtttgctgaagacaaataaagaatgcgtaagtaagtctgaaaagggttagaaggaaaagtaagaggatagagaaaaaaatattttaccgagaggccacgagcaacactccttttaagaatattctccaactccccattattgatcaaatcccattcatgggggagaaaagccatgaagtgacgccaaaaggttgcgccaaattctccagtgtacctcaagtgaggactattagcatcgataggaagagtctcgagggcttggcacgaagaggtagaagcttggctcgcattgggaaggggcttatcagtacttgcggagaacagaggaagaatcagatcctggtttttagactcgggaatctcgacgaactgggaggctcgcttgttgttggctgtggtcttcctctacattttgaggggcttcacctcaacgttaaaaggagcctccaagttggtcactcccttatttcctttcttatggacgaggccctcaaagttcatttttggaagataagataaactgtgagcatttattgaacgacaagtaaaaggagatatttagatataatttcctgcctaaggaatttaccacaatcactagaagatgaggaaaaaggactataatatccactaacatccctacaactcgtgatcttaaatatatcatagggattaattggttttaaattccagctctcgtctaaatggctcgccctatcaatcatagtcctgttttgctcggctatcccatagtacgactcagtacagctaatttggacgtggaatctgggataccaactacgatacctatgtgtaataggatctacggaaaggggaggccaagtataaaagttatactggctatctcaaaatgtaacta

SEQ ID NO: 220715 - DNA, 1449 bp, Cannabis indica
tataatatttatgtttaaattagaaaaaaatatgaatattgttcatttttttgctttttatttttctatagtctttttttataagaaagaaaagacataattacgtaaaaaaaaagacataattaggaaaaataatttgtttatataattaatagtatgattctttttgaaaactttcttttttaagtaagatacttatgttattaattatgaaaagaaaacttagagaagaaaaatcatgtttcaatggaagaattttgtttatgtatagttaaaaaaaacattgcttatgtaataataaataaattaattaattagttaaattcttttaacataataataaaaatataagtaaaatatgtaagtaattattttttagtgaaatttctatatataaaactttctaaataaaattaaataaaataaaaaaaaaaaatacaagaacatttttttctatatttcttaacttggtgtcaataattaaattttgaagacgtaaattattgtgattttattgagttccgtaattttttatatttgtaaaaaaaatttagcatcaagatatttgatttaatgcattgagctgtacaataattaccttgtactttcaaaaatcatatttatcaatggttaaaaaaatatcactatgctataaggacaaaataagagtacctactataaaaattttctatatatatatattagaatgagcattttatatagtttccccagaaatataatttccaagcaatattattattattattattatttcattataaattgaaataaataatgtgtagttcaattatctatgtgtttatgttgtatttatatactgcgctgcgctatttttagactctagttacgtactaagagcatctctaatgcagtgttaaaaaattagggtataattatattttagcatatttaacaaaaactattacttcaataataggtattaaaatgtgtgttaaatttgacacatgctaaaaattgtgaagcattgtactaaatttatcttacaataaatgcaatttttctatttactgtaatattactaattattatgattcattggcttgtactaaattttacattcttttttactatattaccattatttaaacaatataaaaataaataataataataatttttatatattctcaataaaaaatcaaactgactatcaacataattatttttttttttacttatttatacatcttgtgcattggatcttctaagaaatacattaaaatttttaaagtggagagaagattaaactgcaaatataatagggataattacataaggtactatttttttgtaaaaaaaattacatttttacgttttaagaatttgttttacatttttacgattttttataaaaataacacgaaaataacaaggagactacataaaaataacatctaagtaacatca

SEQ ID NO: 220716 - DNA, 1483 bp, Cannabis indica
atgtccgaggagccaataatcaaactaaacaacaattaataaagaattttattaatgctcaaaaggttaattttgtgggtttcctcgagactagggtgaaggctccaaagcttcgagccttgtactctaatgtttttgatggatggtgcttctcttccaatattgcttggcattcgggaggtaagattactatggcttggaatccctatagatttactattgatatcatcaaatgtactagccaactaatgcatttgaggatttcaactactgagggatttaatagtttgctcactatggtgtatgcttctaatacccaaggagaaaggaaagtattatggaaggatttatgtgatctttattctgatggaaactggtgtgtgatgggggacttcaatgatattttagctaaggaagagagggtggggcgtagggtgagatcttatcccgactctaatttcctcaattgtgtgaatttctgtaaactcgaagatgttaaagctagtgggaattttttcacttggactaataagcaaccagtggctgaccgaatttactctaagatagataggattatagccaatcaagcttggattaataagtatgaatttgttgaagctgtctttcttaatgagggactgtttgatcattctccagctatcctctcctggcatcctcatatggtgggggggaaaaaccgttcaaatattttaggatgtggaaatcccatcctaagtatgattctacattaagagaggtgtggagcttgagtatttcgggtagcctaatgtttcaagttgtttgcaagttaaagcaacttaaaggtagattgagggagataaacaaggaagcttattgtgacttacagcaacaggtgcatgttgccaaggcagacctcgagaggctccaaaaccagctgcaacagcagcccttcgaggccaatttacaccagcaggagaaaacagctcgggaaattctggctcaaaaacaacaggattacactttgtttttgaaacagaaagctaagatggattggatacagatggtgattctaattctgccttattccatgcttgcattaatcatagactgaggcaaaaccgattttatccattgaaaatcaagagggcagcagagttactgaaccagctcttattacagtagcgtttctagacttctacaaaagtgtactgggaacttgtagagatcaaaggaagaaagtggaaagaaatattcttaacaattgccctttagtcactacaacacagccagattggtgattgtaggaattcacaaagggtgggataaaaaaggttgttttcagaatacctggaaataaatccccgggtccagatggcttctctagtagcttctaccaagataattgggatcttattggagatgatatctgtggggctgttcaatctttcttgacatcgggtaacattctgaaggaaattaactctaccataattactttggt

SEQ ID NO: 220717 - DNA, 1041 bp, Cannabis indica
ttttaaaattttaaaattacactaaaatatattatacatattgtaacttgtattactatgatgtgcatgaataagtaagtagtcttatatctaaataaaaaataacatttatattttactctagtgaaatgaagctatataccaaaaaatgattgactaagtctttggcttcatcatttatttttgttgtatatatatgtgcttatagttataaagataagattatatatatatattaacataactatcacagacacagagttggtagcctaaaaaatattagaaggtgagattgactcaaatcaaattattcctttttataaatattaaaatatctatctatctatataaaaataaataaaaattcaaattatgactagtcacataagttaatcataaacaaaataaataaacgattaacaaaaatcatttataaaaaaaaaaggtaactacactccaatatttttttttttttaaaaaatgtaatttaaatatatttttaaaaattaatcttaatatattttttttaaaaaaatattttcatattattttgtattaaattcaataattattttacttttatttttatatttttttaaaagtatacttgtagttatttattattttttttttttaaaaaaaaaacaaaaaatttactacattattttttctgttttagtgtctaaaatatattttatttttattttatatgtatattttttaagaatataagataaaatataaaaattaagaaaaactaacataaattaaagctataatttttatataaaataaaaaaaaaaattaaataagacatttctataaatttttaagatgcaaataaaactatcggtaccaaaattttgttttgaaagtatatttaatgaatgtactaaaaaaatcactctcatggtaatggtaagtctattgtcttaaaagagtgtttggataggctctctatttttttcatgagagctttttaagtctaattttttttaatgatgtgtacactataattagttaagattacttgtaaaattt

SEQ ID NO: 220718 - DNA, 2482 bp, Cannabis indica
catatggacatctaaaaagaaaggaaattttaattcaaaatcaaaaaactcaccacacaatcaaggatttggtccaaaccagtagaggatttgatatatccttcttcttgacccacatctgtatatcaccgccatcttcatcagcagcctaaatacataaacagattaaaactcaaaatacataaatgaaaaacatataacaattaaaaaagagaaaaggaaatcaatataacagatgaaaccaaaataatcaaaaccaaacaaactaagaagactttgcaaaatagaaattgggtgagaaaaatcaaaactaggatccaatttcgtttctattttggtctcggctggacccccattgattttgctacttatatatatatatatttatatagataaaaatttataaaatgagtggattttgtcccttacatttcgtggtcttcatcataactattagatcaaagattgaattgatctaaaaattgaaagctaaagtccatcaaagtttctagagtacatttcatcataatcaaagtacatttcatcaaagtttctagagtacattttttcataatcaaagtacataatcaaagtacatttcatcataatcaaagtacatttcatcataatcaaagtacactacacaatcaaaccattctgtaccagcttgccctcagaatgtagattttcaatttggggctatggagacttgcccgaaaaagtctccacagtcgccatgaaaatcctagcttggaactgtcgtgggctcgggaacaccccaacagttcgacaattggcggctttgatccgccagcatcaactcgaaatggtccttctctcggaagtcagattaaccatggaaaaatttacaagaatcaccaatcggttgcactttgaaggaactcattatatccccccaattggtcaatcgggtggcttgggtctctgttgggtgaaaggagtagcttgcagtatcatatcatccaacaagtttgttattgttggggaaatatctttagacccccctggaattccttggctgctttttggagtttacggtcccccgagatatgaagataaataagctttctggctatctttaggagatgcggccctcactaaggacgatcctatactgctcattggggacttgaatggtacacttcaagattctgaatgtctaaattacgctaattctggtaattcttctcggtatgcttttgatctaaggcgcatggtgaatagagtgggtcttgtggaccttggataccaaggcccgggatttacttgggtcaagggctctagccgtagcatgaatgctggaagaagttgtataaaacgtgcaagacttgacagaggactagccacaacggattggagaattcagtttcccaatgcaatagtagaacacctctaggcctctgtctccgatcataggcctatcctccttgatactataggaggagttcgatgtcgtagtcggcttttcaaatacgaaaatatgtgggcttgtgacaaacgctgcttttgggtggtcaaagaggtttgggcaaagcaacttcaccataaccctctggttaatttccacagaaaggtcaagcaaacatgtcgaaaacttagcttctggaacaagacccaattcaaaaatatacaaaaccaagtcaacttaaaaagattagcccttcaagaagtggagaaccgtaaccaagacgatcttttggccattgatatggcaaaaaatgaactcaatgaagccctccttagagaagagattcactggaagcagaaatcaagggttcaatggctacaagagggggacatgtgcactaaattctttatggcttcaacagccataataaggagaatgaactatatccaatgcattaaaaggagtgatgatgggatttggataagagagcctaaggaaattgccaaagtgtttattgagaacttttcccagctgttcacccgaaatgccccttctggaatgcccccatctagcagaattttgaacccctgtatttcaacacaggagtgctgcgatctcaccacaatcccctcggctgaagagattgctgctgcgttgaatgagatgggcagggataaggctccaggcccggatggtctttcccctagcttctactctcatcactgggacaccgtgaaagaagacctgattgagatggtgacatacttcttcaaccatggttctctgcctcactttatgaatgacacatcctttgtgctcatccctaagaaagaaggccctgcttacaccaaagattatcgaaccatagcatttgattacgcccaaacttgtcttcacaaagcggttgttgtagtgtagcatgggcggtcgtgtccacagagagatatcttatcaaaaagtgattagtagaactttaagcgcaaaaagtaaataaatcgttggtggtttttgagaaaattttgaaaataaatttaaagcaaataaaattggtag

SEQ ID NO: 220719 - DNA, 1785 bp, Cannabis indica
gttgttattcaaaatacataacagacagaacatatccctagaaaataggacagttacattctggtgaagctttcctatttttgtaggcagttcaagtcgtttcgaagttgtagaggcgattggaagtcttctagaaagcccatggaaaaaaacccacaacccattcaagttgtcaggatgaaagttatgagttggccgaccaaccttgtctggaagctgcccgattttgtttgaagttctcccttggtcagccagttgatggtccgaccaggatcttgtcaaaatcctatctttagcttctgttatcctgtcttaagacctcgaggcttgacggtcaaggagttgttcagcgttatgctggacggttcttagtggtttatctccacatgtatgattggacttgatgacatggaaatgccacgtcataatagtaataattgagataatagttgctccctaagtccctgtctgaaagtctgttcgaatagggactttacactccgtctggtcttatgatgcttttgccgtgcagctgtgcacagtcacacttcgatttcttcgattgattagtcattgcatcagttatcaactttatgtcaatcaatgtgagaaatcgagtgacagcttacactttctcatgtttaaactcttggccttctctctctcatgcatgcttatttttgtggcattaactccccattaagttttggagggaaaattaattttttagaatctatataagtgtctcacctcctcagtcctctcttctcatttttcacttttcaatttcaaaagatcttctcaaagctttctaaactccgaaagtcgtgaccttcaaaattttcttggagtctttgattttcttagtgctacggtcttcagtttttagagaatcaccctcgccgagcagcctcaagtcagcttagagccatccgtttgtgggtaagttctcaaaaccctctcttttactttcccaagtttttgagttttgtcattgatgagtttctaagcttttgaactttttgattctcgtgctttagagtagtttttatacattataatatgttcaatagctttaggatgtacaatgcgtgactttttgataataaagattgaatattgcactgtagtttgatactttgaacttcgggattcgaagaacacaaagaacttagctttaattttgaaaataagacacttttgatccgttaggactcctacctggtactttgggtctgttagagaccatgtccggatattcgaatctatttagaaactctgtccggttattgttgaactaactttaagctggctggttagtgatactttgtcttaggctattcagttaatacccttaggttcctattttttttatccaagtcttttatgctctctgattgttcacctccatcttcctttctgcacagatgaaccgaatcaatgaggaattacttagtcttctatacgaagactatcgctcagtccggacaactagttccacctctgagagcttatcaggtagctcttcgagcgactttgaagtgagtaggggttccccagaacctgatatctagcatcatcactattctaaatgaataggtggtgaaacttacggacggttcatttgggaactgaactaggggtggagacagttccttcccaagtcgtggacttatatcgtccaacatggtgtgctatatcatgtatttcattaagtctcattaatcaaaatttatatagttttatggattcatgattattgtaaagaatattaattgtcttagt

SEQ ID NO: 220720 - DNA, 1422 bp, Cannabis indica
gtgcgtaattattgttgaaaaaagatgtaaatataattaaaactataaaatacacatattttagtaattaactcatcaatgataataaaaatacaaaaatatagagcacgaatttgagctcatataagaaaatgaattgatctatttaagaaatttaggttgacccaaattaagcacgacacgaatccgagcacggcacaaaactaccgagcttgcagaccatgtcgggcctaccctataaaattattgcacgccataacacaacccatatttttttatagcacgacatgatacgacccatattttttatagctcggctcggcacaattcaaactttaaaaagactaaaaaatatgattcaagctagcacgaaacaaacatatttgcacccatattttgagtacttttatacataaaaaaaattacacccaccctaaatcctaagtccgtctctgggttacatatcatttttctcgtgtttgaacttattcacttcaatttttctcaccctctctaactgagctagatatcattaattttaacatggaaataaatattttattttaattttaaatttatataacttgtattttttatataactatcagctaatgattactattagacttggaaaaattatgccttattacacaatgaaaattattcttatttataaccccaatcccaagttagagcctttttcctttttttaacgagtaaatgatttttttttttctcatacagctttgaagaaggttttactgtaataataaaacggtctttctttgtaatttcaaaagatcttatagatgctatcaatttgtgctttaaagatgtaaagatgcccaaagaaaaaaggactgggcagcttcaaaatttattagtcaagaaagaattgcttctttaaatttcacaatttcctttacattaaagcatatttttgcatatgttaattattatagtggggaaaaaaaaaaccgttacaaacaagcaatcagactaatataaccacaaagaaacataaaatttgatcattagttggtggtttggggtttgtatattgtgtgtggatttcatttcagggttggaagagcagcaataatatagagagtttaaataaggtcaacgcagagataagatataatagagccagccctccttttggtcctctggctgacttcgtcttctcaacaagcaatttctttatatggggacaacttgaaaccacagtggcgaacaccagaagatgagatgcctgggcaatacaccatgtggcaacattcaagcagagtgcagtttttaacaagatgggatagcccaacatctgttatttgacggcaatgagacaacactattctttcagatttgaacagccttctcctagctcggccattgccatatctcccaaaattctgtcccatc

SEQ ID NO: 220721 - DNA, 8213 bp, Cannabis indica
taaggaaagagaagagttcattctaaacctgtatgatattttaagaagattaatttttcttgagattgatggtgccatatacagttgctctagtttgttccacaatccttttgcaggcttttcttggattagatttcttctagcttaattgggcaggtacatgatgatggtgtagtatgccatctcctccatttttgccattttctctggcctcttctcagtcagcaatttttcatctccgagtacctttgccaccttttggtgcacaagtatacccttcaaactctctcgtcatagtgcaaaatcagttgatctatcgaaattctctagtttgaacctagccattgacatcctccttcactctgtgttcttataaaattcctcgatgaattcttgatgagttcttggtgaaaaattaattgatctttgaatcccccttgatgattgaagaatcaagctctaatttataggaaatttagctttaagacataggaattatcttctataattctagcttcaagatcacatttaaacaaacaaatgttaaatcaaaacaaataaatcaagaacaaaaaattagcaaacacattaagccagaaaaataacacagatgaatctagatagcttccaaccataacaacataggataattatactggttccgaccctaagttcaatgtgaacttggtcatactccagtttcaaagtattgccacgaatctttattcatattgagaattagagatattaatcttaagagctataagtaaataatcacagtaagtactcatccatggtgtaatccctcaacaatcattaactcactaacccgagccaacataatcgacaatgttgctcaatgcaattttccaattccagctctctctctctctctctctctcaaatatccctcttcatttctcactctctaacttctctctcgactgtgttgtgtctctcttgttattcatcttcatcttctttctattctctttaaaaaataagatgagtagttctctttatataattagccaaggatccaatatgtaagctgtattttttgacagttaagttagttaaagactaactaattaactgaatgttgattggagatctaagaaataataccacagtatttgtaaaggagactaagctggtttctgttagagttagttacatctgttgtcagttagttagttttccttctaactgttttttgttttgttcttggcttgtatataaagtttttgtaactcttttcagataatatctgttaaaagtgaagtaacatgtagatctgttggcttcggttggggagactttgacagctcgtgatcacattgcagcaatcttcaaaggattactgagtgtatatgatacatttatcatatcttcaaatacttgaattgaagaatacttagttggtgaaattgaagctctgcttctagcctcagagtcaagaatcaaaaaatcagacaaagaaatggagaagtctgttaatcttgctgctgatgactcaacaccagtatcccctgaagcatttttgcaacatgaagcaaatcttgcacattttcacatgaacttcagacatcctgtatcgcaaagaggtcagttttatccctcttatcctagttttcctcctccaaatttttccaataatccttctaatcgtgcaccttatactggtaacttctctcgaggttcacaatcctactacaaccttggaagaggctcaaatcgtggcacaagaggggggaaaccagctcagaatcagaacaggcctcaatgccagctttgtcataagctcggtcatactgtaatcgattgcttttattgatttgataaaagttttacaggagttgctacacctgttcaaacttcatcaatgcaggctcacttgactcaaactacacctgctgaggatagtaattggtatcccgattctggagcaacaaaccattgtactcccgatctgcacaatctcacaactacagcagaatacaatggtcaagagcaaatctttgtgggaaatggaacagtccattcaacattatggtaacacttgtgttgcttctaataagtatgataagcctttacttcttaagaatttattacatgttcctgagattactaagaatttgctaagtgtgtctaaattttctcttgataacaatgttctctttgagtttcatgctgatgctttctatgttaaggaccaggttaccaaggaaatcctattgactgggactctccacaatggcttgtatacttttgatcccacccacttcaagattctaccctcctctacactctctgtcagttcagaaattcacccatccaacaaaaagtctgccttacttcgcactagtgaaccagttgcacctacattaggctcagtactcactgtaatagatctgttgattctgtgtatgatctttggcacaacagacttggccatccttctcataatgtggtcaaatctgttttgcattcttgtaacatcacatgtaataaaaccaatcccagtgtatgcaaagcttgctgtttaggcaagattcataaaatgccttttccaaagttttctcacactgaatattctgaaccattgcaacttattgtatctgatttatggggtctttcacacacattgtctcacaatggttataagtattacacgaattttgtagatgcctttagtaggttcacttggatctatttactcaaaacaaaattcgaggcattaaagacttttctgcatttcaaaactgaaactaaactgcaattaggaaagaaaattaaggtgttccaattcgattggggtggggaatataagaacttttctgaaccacttaaacaagcaggaattgttcataggcacccatgtccaaaaactcatgaacaaaatgggttagttgaaagaaagcataggcaaattgttgaacatgggttaagtttgcttgctcaagcctctatgccgctaaaattttgggatgaggcttttaggtgtgctgtctacctacataatagattgccaaccccagttcttcatcaactctcacccattgagattttgttccaaactaaacctgaatatgctaatctgaaagtatttggttgcctttgttacccaaatatcaggccatataatagacacaaattggatttcagatcctcaccttgcactttcttgggatatagccttaaccacaaaggctataaatgtttagacataaatggtagattgtacatctcgagagatgttatttttgatgaattaaatttccttatgcatcaatttcaacagatgcttctgcatatgattctgagtctcacatttccagtgctattccactaaattctctcccatatactgtcgagtctctattttctattccctctgcatctgttgaaaatcatgctcctgctgctactgttgtggctctttctgatatggttcacaatgagaattctctcaattctcattctacctcagatataccagtacctccagttgtttccactacaaacatgcctcaacaacctgaacccatatctaccagcaacactgaaaccattgtcccaagctcaagtgcatccttgcaacatcttacacctggtccccacattaacaatcatagcatgcaaacttgagcaaagtctgggatatataagcccaaagcattcttagtttctcaagaacctagtaatgtaaaggctgctctaaaggaagagcaatggtgtaatgctatgtctgaagaaatggtagctttaaagaaaaatggtacatggacctatgttcctcttcctagtggcagaacggctgcaagtgggtttataaagaaaaattaaatgttgatggttctgctaacagaaacaaagctcgtctagttgcaaaggggttccaccagcaagcaggcttcgattttacagagacgtttagcccagttgtaaagccagttactattcgtactgttttgtctcttgccgtgactaaaaactggactttacaacagttagatgtcaacaatgcctttttgaatggcgaataaaaggaagaggtctatatgactcaacccccgggctttaaacttgttgatgctcctcacttagtatgcaaacttcacaaggctttgtatggtcttaagcaagcacctcgtgcctggtttaagaagttgcaccattgtcttgacacactcgggtttcagtcctcaaagtcagatcaaagtttgttcatcaagcacacatcctcctctgtcactctcattcttgtgtatgttgatgatataatcatcactggcagtgactcttcacttatctccactctcatatgtgatctgaattccaagttttcacttaaaaatcttggccagttgcattattttcttggaattgaagttcaacatacatctgaagggcttcacttgtctcaggccaaatatataagagatttattggttaaagctcaaatggagggagctaatcctgttcctacaccactgatcagcactctcaagttatctgcctatgaaggagaaccagtcactaatcctcagctctatcgatcgatagttggtgctcttcaatacctcaccatcacccgccctgaaatatccttcagtgtaaataaagttttccaattcatggccaatcctttatccacacattggaatgctgtaaaacgcatattgagatacttgagtggcactgtgttccatggcctgcatcttaaaccactcatagaatatgatatcacagcctttagcgatgctgattgggctagtgatcctgatgatcaacatcaggtttcactatcttttttggaccaaacttgatagcttggcagtgcaagaagcagcaaaccgtgtcacggtgaagcagaatatcgaagtgttgctcaagccgtttctgagcttacatggctacattcattacttacagaacttcaggttaaattggctcgaacgccaatactttggtgtgacaaccttagaacagttctcctcacgactaaccctgttcttcatgcaagaacgaaacatatattgaactagatttgtactttgttagagaaaagatctcccagcaacttgttcgtgttaatcatgtcccatccttagatcaagttgctgatgggttcactaaagctgtgtctagttctcgttttgctgtgttttgtcacaaacttggtcttgatgcgtgcaccaattccaagttttgggggggggggggagtgtaaaggagactaagctggtttctgttagagttagttacagttgttgtcagttagttagttttccttctaactgttttctgttttgttcaattggcttgtatataaagctgttgtaactccttacagataatatgaagctactctttcagctcagtctctctctctctcttttctctcttcttctttctctgtcctttgttcatggcaaggtataacacgagatcttatagtattaatcttgtttctaatagttttttcaatatataattaattttgatgaatttagaatataaataatttgaaataattctattaaaaaagaattattgataaaatttaaattgatagtatattaattatgaaaaattttaaatataagataaaaaaatttcagtaacaattttaattttttagtgtaaaattacaatgctaattaatatgattaaaggtttttgacactatttacttttaacaacaaaatatacttggaggcaattgatgatgttgatgtagacatttgacatcaataaaaatttaatgttactatatgtactttactgatcatatttataacattataatgaggtttactttttcttttaatgtacataaaagttaaaatgtactaaagaacatgaactatataaaattagtgcaatcaatgatgctatagtagtgtacatatgtatatatttatggtcccagacatatatttattccaacctaacacaaactgttcacaataaacatcaaaagaaatcccacaaattatatggagtacttgagaagataatctttttacagtatcatctttctctttaatatacctaaacttctgttcgtatgtatatctgtcgctgttgttgcttgccccatttcataatagaaaagaacaaatttgattgaatcctcatgtagtctctcagatgaatcattctgtatatataacacaaaattattaattaatttcatactataattaatatgcatgtatataaaagcttaatagcaatacacctgattataataacagtaatgtgataaaatgtaaaataaaaatttgtagtagggttgattcgattttaccatttcatttagcaaatgatcgatttcgcaactgaattttccccagacctgaaatttagaaaaaagatcattaattaagattaataatggcaaacaatggtacatttttgttggacagtactacatttgtatatattataactatatataagaaataaaatggaagttattaattattacttacccttatacaaaagttatgttttgagcgtgcacgtaatgaccaaggaagaattggtgacactgtaggtaatcgtccaagttcatccgcaggtttaaacattatctgtacattatttaagtaaatctcaaacaatgcccattcttccaaaatttctttcaccaaagacttgtcatttttcttaccctccaacgaaggaatcacctgaaaaggaaaacagattatatattgcttaagaaaactctctgaacaaaaataaagcaaaatgaccgatcacgaatacattattttggttttcttgtggtttttaagaaataagtaagactagtaattgtaattgattacctttcctaaaatcctttctttcaagacacaatcatatttgttacaaagggatctcgacaaataattccatactttgggaccaatattttccgagaacagtttgttgacggttctgcatgtatagataataaagatcagtatgagaatatacatgacaggaatgaaaatagatataattattattcttacatggatgcaatcatttggtccacttgagtccattcttcgtcattattttcgtcaagcttcttccttattttctcaattgacgtatctattaattccattgcctcagttaacataatcttcaccttcttccaattgatataatcatcgtcactcaccgccctcctcttagtcctcatcatttctattttcttggctttcaaatgtatatataaatatatacacaagaaattaatattgaagatgacgatacatatataatcactttatattatatatatatttatatgtaaatctaatagcagtgttgaattaaaatatgattaataattttttggtggattcttgaacaaacgagtgattatataatggtggtaaccatgcattatttgcttaattattcctattagaaatcatcgatttcaagaatttatatgtgtatatatatattaaaaattatctctttcttgagattattaaataagaaaataaagaaagaaagaaatgaaaagaacaatatatggttatggtacgtataatgagagatcaaaattaaatcagaaattatactgaaatttaataaacacaatacaaaattatcttcaaagtataaaagatctgattcagaaaaatatatgatctatcatatttgcaacaattcattaagtatatatacgtaccagaggtagctactacggtttgaatcgcgtacgtgaagaaagttttgttacaatgtgtgatgattgaggcaagggctagtgactgctgccgtaccaatgagctatatatatctagctatctatgtattatctctctatatatctagctagtgatgattgaggttggctctgtaccttttgagtgtggatcctatcccctcttcaaagactgtgttgatggttttaaggagtttaggtctgtttgtgtagtggctataccgagatctgacaatcttgtggcgcgcggatgcccttgcccgttgggctatagactagaaaaacaatgtagtactgtggtcactatgtttgcctagtttgtttgaataaagtttctcttctaatcaaaaaaatattaaaaaagaaaaaaggcttgagatgcaaaatgaccttaaatttggtaactaagttagtaaatgtccactttttaaaaaaaataaagaaaatagccaaatctaataaatta

SEQ ID NO: 220722 - DNA, 4079 bp, Cannabis indica
tgtctccaatgaaggggatcagacattccgaaaaagggagcaagttatgccctaggtttacagcacctttcgagattctcgagaaggttggattggtggcatattgactggctttacctccagcactttcagcagttcacaacatgtttcatgtttctatgttatagaaatacatttcagaccccactcatgtgttgagttatgagaacctggaactttaatcaaatttatcatacgaagaacgaccaattcagatcttggatagaaaagataaagtccttcggaacaagattatagctttggtcaaggtactctggaggaaccataaggtggaggaatccacctaggagttagaggccgacatgaggactcagtatcaagagttattcaggttagattttgaggatgaaatccttttaacaggcagataattataaagactgcttaattttaacttgtaaattagcagataattagggcttaattatgaaactagaatattacttatgcttaataattttatggagatttatttgaagtcagggtgtattatttatgccatatatggaattttgcatttttgcttgttttatgcccgacaatattagaacatggcatttggccaatagaatcacattttagtattttagtagtagcgaggcaattgagttagatattgggaatgtcaagaattatttgaggtttagaaatgaccaaaatacccctaagtgacttagaagctttttggtttagtgaggggtagaatggtctttttagactttttgatccgttgtccttttgttggattatgtagagttaataatctgattattttttatttgattaagttagaaatacaattattttattcattttatccaaatagataagaaatcaaaaacatcacattttcacttagccattctctctccaactctatctctttctcgagcaccctagaagcagcaaggttttggaatctttagcttcatttctggataatctagcaagttcttggtgtttccaattaattgtaacccctctagaaccttttcccttggatttcttaagttttaagttaaggtttttgcatgattttgtgagttagggttctgtagcttttaaggttgtttgaattttccttctgaggttagattaaggttatttttgttgaattgaactggttttatgtgttgctttgatggttgagcaaggtttgagtttatgaactcaagctttgctctctaatggtggtttgtgattctagatgtgttgtggtgttttattgcatggattatgttcattatggtgtaattagaaggtctggaaggtttggtgtgatttggggttgatttgaggttgtggggtgattttgtgtgtttcctacactgaactagaattctggttcagggggacctgtaggaatctgttgattggttggtccccaggaaaccccaaagaaccagaatacaggttggggaactggtctaccggttggggcatttttgggatccctagtttttctcatttttgcaatatttagggtattgccatgttatccatcaatagggaaacttttagtttcaagtttaagtccctgaaaagtgatatagcatgtcactcatcagttttatgaataatatgatttaggggcctataaattgtcgagcagctgttccactcaagttggccggcacacttgaattccgaaatgaggtaagattagtataatgatatgcatacgtatttacatgtacatcgtacatattagttaagcctgttagattacattataatagtggtatcaatatatttagtattatattggatatcaataaatgtatgttggcttaagtattactcgatagtatcacatcagtacgactagagtacgaatagcgtatcgagtataggctgataatatagttgatagtactatactacttgacagtatcacatcggtatgataagagtacgactagcttaccgagtataggctgatattatggtcagtagtactgtcgtacgaatgttctttactcaccaccgtgttggacatggggttagggttacagttggcggtatgggcacctgattattatcttggttattgctatgttattgatcatgcttttcttactaagtctgtcgactcacagatattgtttgcatgtgtaggtaagggcaaggctaaggttgagcagccgtgagagtgagcagatgaagattgtacatgtcggggcggttaggcttggagtgtacggtctttgggacagctggacatattttgtatagtcgctaggcgacaccttttgtactatgcactgtgtaaattttataaacattttgtaaacgagatcccagttttatgtaagtacgttattttgatatttataatagttaaataaagttttaaatattcacgattttcaataaactcgttgattagcaatgagctgcccaatttagttaaaaatcacgttaacacgcctaaactagtaggttgttacattaggtctggtgcataccattgcatacattagggcactaacaacatttgcatatggaatacgctccatttgcttcttctcctctgtggtgctaggtgacatctttgcacttaacttaaaatgagatgcaagaggtgtactaacaggtttagtcttctcatctgtgtcaaacctttgtaatactttcttaggatattgagtctttgtcaaacagactgtccttggaactctatttcttgtgatctccatcccaagaatcttcttagcttctccaagatctttcatttcaaattttgaacttagctgagtctttagcctagcaatctccaccttgctcttagatgcaattaacgtatcatcaacatataagagcaaataaatgaaagtaccatcttggagtttttgaaagtatacacaatgatcatattggttgcgggtgggtgtacttatgctctctgatgaagatgtcaaaacgtttgtaccactgtctcagtggctgcttcaaaacatatagtgacttgctcagcttgcaaacccaattctcacgtgctggaactttgtaaccatttgtttgggacatgtaaatttctttatctaaagtacaatggagaaaatctattttgacatcgacctgagctaactcgagatgaaactatgctgccaaaggcaaaaaaattctaatagatgaatgcttgatgataggtgagaatacctcattgtaatctattacttcttttcgggcataacattttgctaccaatctggctttgtattggatgttgtctttaccaggaactccttccttcttggcatagtcccatttgtagccaataacattcttttctttaggaggtcaaaccaacacccatttttgattctggtgtagagacttcatctcttcatccattcccaacttccatttcttgctgtcaacactttgtacaacttatctgtaagtgcatgggacgtcatcaataattattggaagtgcaaatgctacaatatctgtgtatctagtagacttttcgatctcctttctcgattgagtagtgacaatagattctgattgctgattggctggtggtgatgctgagggaatctccacctcagttgagatctcttattgatcatcactttcatcttcaccatgattttcaataatatattttggatcttccagtatctcaaactccaccttagaaagagtatttgagctttcattctctttctctaaggtggttttgcttagcataatagactcgtcaaatgtgacatctcgacttaagactatcttctttgattcaccataccaaagtcaaaaacatttgactccttcattaaagcccaagaaatagctttcttttctctaggatctagtttggattcattgacatggaaatatgcaggacatccaaatatgcataaggaatcataatcacaaataggtttttcaaacaatacctctttaggtattttccaatctagtgtagtagtagggagtctgggttgcatatggcaaagcctcggtcaaaaatacttttctcaatttggattgagatagcatacatc

SEQ ID NO: 220723 - DNA, 2258 bp, Cannabis indica
ggaagtatttcccttctcgttacaatggatataagcagaaagattgcatagtaaatacaaaatacactaatcgtgggatttagacagcttgtcatatctctacaatctgatcccgaagttatagggatttctttgatgactcacaatgcgaaagtttaattcgctaagtgttggtcgcgctggacggattgctgattgctttgcctagagcatgcatatgaagtatcctgtttggattatatcctgcgagtagatactctgagtcgactccatgtgtcaccatcatgtgatgccacgtcacagtacaaaaattgtgataagagtttcaaaactcaattttgaacaaatatatatttaatattgaatatattaaatgattaattaaacaaagtgaacttaatagaaataaatggacaaataaactaaatatactagaatctaattctatatatttatctaatgataatgttgttttctttgagatttggtactacattatgtggagggtctcgttcacacgacttagcttgaatagtcgaatgagatacattgtccataagagttacagaatgagctgcacttacatttaatgcaaatgagaaattattggaatttataccctaaaagaaagtaattaatgggtattatattagagaatatatgaaatataattataagataagtaattataagataactgatatattaattataagactataattattcaatatttaaaatcttgttattcatatggagaagatataaaattttgtaaggatgtacaagagaattaagattatacaatatgaattaaacaagttggtagtgtattaaagttctaagagtctataatatgcacttgctaagtacggtttactatacattgtacttttaatgtgtgtgattttgatttagatcaaatatatagatggacatgtagtaaaggtactgtgattagattacgcatgattggactgataggtattaaacttctttcatcaacttgtcgtttacaatgaaaatatagtttatcagatcacaatgatgattattagtagatcagccagaatcctgagtgtaaaggaactcctatttgtgttcattcaattctttgattgactcgttaaagtttctttaagaagatgattcttacaacttctgttttgggagcttaataacatgagtggctgggaacatgttatactataatagaatccaagctttcctaatagatcaaatattagttcccttatagtgttaattttgtgaatgctaactgttagatccaaatctataattagtaatagattaatttttcacattaaattaatggtacataaggaatcaagagataattagaagggtaaaattatatcttgaccaactctaatgatgaactactaattggagggtgagctacttatattgattatatcaatagactacaagtaagcattctctaaatataattctatattgtcaaagagtgcaattccatatttatagtggagtaataatgaaattaataaaccagattattctattgatgagattgattgtaatcttgagtttattagagctttgaaataaaggttcatgattcccgactcacctccatacaacactgtacaagggaatgttttattttatgaatgaatttcgagtgagagttaatttccatgggatataaatttttaaggacaaaatagtaatttgtgaaattattgtttgattaattatgaaaattatgaattgtataattaatagtatttaactatttaattttttagataaaactatattaagtagttaaatataatattatgattaaataatattaaagagagagatatataatattttagaggaaataatattcattttaatctttgtaaaagaagacattaatgagaattaattaattattaattattggtagaataaataataaatcttatttgcggtaaaattgagaaatcaattttggaccttaaaatatgacccatacatgtaggtccattctatacatgtatgtcgatatataaaggctcatgattaatttggtttaattattttattaatttaaaataatttaaattaattatgttttatttattaattaaacacattattagataattatttaattaaaaaataattattaaaataaaagatctactaatatttttatattcgactattagatatttatatttgaatttaaatcaaatgagatatttatcttttattttaaa

SEQ ID NO: 220724 - DNA, 986 bp, Cannabis indica
tgtgtcgatattacataccaattaactagcataatcagcatcattgttatttatttttctgcgtaacatttctgtaataatacgtacatatatatttataaaaaatagtactgtttcttatagatataatctgtgatgatgatcatgggcagaaagtgatgagatagttaggattggtgcaagtaaaagtactgtccttatcatctttagcgtagctgtaagccttagggcatttctcctcaaagaatctagaatagtccgtgggaggacaatctggtttatcaaaagctcctgtacagcaaaacctatcctcattaaacttggcacaaccactcaggcatccaacgacgtcgtttccggatttaaactggagttccggtaggcaatccccattgatgttcacaccgcatattgactcttgacaatcgccgctaccaccttgtggcacaaccgaaactggaatgttgaacccgtccacgttgctcacgtcgtagaaatctttcccgccgtctcctctgatggtaaattctaccagagttgccggtgtagctccacttaaaccgttgcattcgatcttaccggagccacagttgccagtggcgcaggtgaagctgccggatgcgtcggtggagcatatgtctctggcccagaagcggccgatccaagtgccgtcggggatgtccaccgacttgtttccttggggtgctaactcaaaaccggtgattgatagttgagatgagccgcctaatgttgctggccagatggttctttggcagttgtttttaatggtgatggtagtagcatttgcccctgtatgtacacataatatatatagaatcaaattgtaaatgaaaaagaaatgctaaattaactgttattggtgcccagttaaacaatatcatatcctccaagttttaaaataattattatttcattaaacttaattgttaagagatcatatatggtgggtgtttgttaaactacat

SEQ ID NO: 220725 - DNA, 2237 bp, Cannabis indica
aaaatagatatatcttaaagaatataaaaataaaggtataaattaaaacaaataaagtaaagtaaatataaaatataatttcctctataaaaagtgttggcacctgtgcaaaagcaataatttgtatattaaagtttatcattaatgatcaatagtaaaactataattgaaaaaattgcatttttcaaatttatcactatattatatcttatgtcagatttgatataacatttagcattgtcaaattagctcaagatttagcacactattagaccatgttcaatataagatttaaaatttgtactaaatttagcacaaaaatgagtttgttttattatatttggcctattatttacaattatattctaatgcacgtaaaataagtcaaacaaataataattaattatatatttatagtcatttaatattttattgataatatacaaaatcaatttctttatttgtttattatttaaataatggtagtaatggtaaataaagaatgttaagtttaataaaagtgaatgaatcataataactagcgggattacactaaataaaaaaagtagcatttgttatgagttaaatttagcacaatattatatcttgtgacaaaatatggtaaaatttttagcatgttccaaatttaacatattttttagaacactgttaattaatgaggtagtagtttttctagtgtgctaaaatataacaaaacacaatttttttagcactctattagaggtgctcttagagaattaattttcttaaaagtgctaaaatatagcattattttaaaactccattgatgatgctcggataatttataaaaatatatgagatctaaatattaaattgtaccaataataatttaacatttttatactgatacctttggtgttatttctctaataaaaattgtaattatctcgattaactaattaaagttaattttctttccaataagagcatctttgatgaaagatatacggaaattgattttatgatatatttgtatcaattttttatattttgctcaagaatattgttattaggcacttaaaaatgcattattattaggcattttaagtacttatatcgatgtgtcatgttgcaagtaatcagcgatttttttaaattatttattaaatttaaatgtattgtactcgattttttatattaatggtaatattaatgtattttaccatgagttaaatttagctcaagatttagagcattctcaccagcttctgccttttatactctattcttaaaaatacactactatttttttttttattttacattacacttttacgttataccatatatcaatttttttatatttttctttacattattaaattaatattatttttattttctacactatcaaaataataatttttgaacatatatacaacatacataaataaaatattatttatatattatttaaataagtttagaaaatctactattcattatctatgtagatatagaacaagttgtattggtgtgagtgcacctctaatatacatatatgaattaaaggagatgatagaagttttttttataacatttaactaaaaagtttaaagaatctctattataaagagaatgttgtcagtgctcttagcaccatctccaatacgatttaaaatttatgttaaatttagcataaaaatgagtttgttttatatttgacatactatttataatcgtgctctaatgcacaagatgtaaaataagtcaaaaaaattataattgattatatattgatagttatttaatattttatagaaaatatacaaaaataattttttatttatttattgtttaaataatagtagtatggtaaataaaaaatattaagtttagtaaaagccaatgaatcataatagttagcgggattatagtaaacaaaaaaagtagcatttgttgtgagccaaatttagcataatgctatatcttatgacaaatatggtataacttttaacatgtgacaaatttagtacactttttagaacaccattaatggaatattagtttttttagagtgttaaaatataacaatcactactaaaaaattaggttatctcagcaccccaatctcgacacttctgtgtgtaactgccgagagtggtgaatttttttttaaaaagaaaataaaatactattttcggaggccaaatcttagcatgtcactgttttggggggggggggggggggtagga

SEQ ID NO: 220726 - DNA, 1934 bp, Cannabis indica
ttctgttagccaaataacacatatggttgtagttagatcttctgtttgtcccttgtttgatgcataatcagcaccaacatagccatctaacctcacattttgatgagtctctttgggagattaaccatacttgagtgttcctttcaagtatgttattaactatttcactgcattccaatgtctaaccgaggatttgccataaacttgctcaatacacttagggagtgagttatatcaggtctagtgctaaccatgatatacataaggcatccaacagccatagcatattgtacccccttcatactttcgctttctgttttagtcttaggacactgctcatttgacagcttaaagtgcccaacaactggtgctgctgttgtcttggatgaatccaagttaaactttttaatcacattctcaatgtagcttttcagagttagcattatctttccttcttgccttttttcttacagcttcaataccaaggattttcttgacagctccaagatccttcattttgaattcagaacttagtttgtccttaatgacttgaatttctgtcttgtcttcgatgatgatcatcatgtcatcaacatagagcagtaggtagacaaccttaggtgtcctaatttcttgtagtagagacaagagtcaaatttgaatcttgaaaatccaatactttgaacaaacatgttgagcctttaattccactgcctaggtgattgctttaacccatacagtgacctttttaacaagcataccgattaagttttaccattttctacctgataatcaggtggttgctccatgaatatctcttcatctagaaaaccatttaggaaagcagttttgacatctaactgctcaacctccaagtcatagtgtgcaacaatagcaagtatcatcctatggttttgtatttcaccactggtgagaaaatgtctatgtaatctatcccttctacctgtgtgaacccttttgctaccaacctagctttgtagctaggtggctcaccttctgtcattccctctttctgattacacaaccacctgcaagagacaaccttcttgtcctgtggcctagtaaccaaaatccaggttttgttcttcttcagagattgcatctcttctcccattccagctagccatttcttccttgatttacttccaatagcttcttcataagtaattgcttctggatcatttttagactgtaccacagccaaggcataagctattaagtcagcctcagcatacctgcttgggggttttatttctcttctagttcattctcttataaattggtagttagtcaaatctggttgatattcttgaccatctttcaaagtgtccacctcagatgttccctgagcatgttcctctatattagcctatgtttccacctcagttttcgtctccaatacaggtgtgtgtggtgattcatgtgagaattcaatttggtcaatatttatctccaactcagttattagtacctgcaacattagaaactttgcctttcttggttgtcaagtgcatgaagttatgctcattaaagattacatctatagatataatagtcttaggttttctattttcaatttgacacaacctatatcctttaagagccttaggatatccaagaatgaagcatttaatgactctaggttccaatttattaagcttttggtgagcatatgcagtgcaactaaagattcttaagtgattcagttttggtgtggtgccatgcaatttttcatagggagtttttcaggtcaatgactctactaggagttctattgatcaagtagcatgtagtaatgagaacttcccctaatagattttccccagaccaaaactaatcagcaagcatcttactttatataataaggtcctattcattatctcagcaacaccattttactgaggtgtgtgctt

SEQ ID NO: 220727 - DNA, 1257 bp, Cannabis indica
atatggtcatgacacatgtaaaacggtagaaaaatgaatcggctcaaacactgaaataattcgccttggagaatacgaattgtagatgcatttaagtctttcctcaatcaattaaggacaagtcataaatatcaactactatttaataagaccagcaagatataaaactaagaaaaaaaaaaaagtccacctcgagaagcacaaagtaaaagataaacaagacaagtatagaatatgaaaggacaagtcgctggaaatggtagataacaagttctttaagaacttacaactcattgacccacatactcgtgagtatgttaaaagactaagggatatgagtagaaggcaattcatctaggaatattcatgaatgacgcgtgaggattgactctaagaagcacaaaggattcaatcctaagtactatctaaatacttatctcaaacagtaaaagcgagaaagatactttaattaacatcttgcaaaacatgcctagtcatttccaaaattactgaagagtgcgaggcgcattttgtatatgatatctcgacaaataaattgccttcacgataaggacaaaaaacgattactatgtactgcgatgtatagagaaagatgtaataccacgtcacaactaaacttagtcagcactaaccgttttgtaataaagacaaagacagttataactagttatttcttttatccatatgtgttagtaaatatagaaacgtagaaattgtccacgtttcatgaacggttacaaagataagattaaaatgaataactaccacctacaaacaccgtaggtaaaaggggggggggggagggggggaattgagaatcctaagagaagatacaaaatattgtatttatactctgtaaagtcataaaatcccaagaataagataaagtagtgaactatgaagaattaacttcaaaatcttattgtttagtatttttaacattattattattatcattatggagtatatttattaaatttaaatttattcattagttaacaaaaatcagccttatatataatttagtagtgtaatcttcttgtattttaaataaaaatttcaaatgatgaatttagctatttaatataaaggtcatacattgctttaaaaaaatgtattaagaccatgcattttgtattgaaaaaatatagataaagtttgattaaaattgtggttaggaaagtttaaatattatatataaagttattgttacgtgcattgcacgtatatttagtt

SEQ ID NO: 220728 - DNA, 3957 bp, Cannabis indica
tcaacaaaccaaatttctcaacaacctgactaaatttaccaaaccaagcacgaagattttgtctcaaaccatataaagacttgcaaagacgataaactcgccctaactctccctgaggaacaaacccgggagattgctatatacacaacttcctcaagatctccatgaagaaaaacatttctaatatcaagctgatgcaaaggccaataatgagtaattgctatagaaatgaacagtcgaacagatgtcagtttagcaacaggagaaaaaaatatcacaataataatccactccataggtttgagcataacccttagcaacaagacgggcctttaagcgagcaattgttccatctagattgactttaaccgtaaacacccaattgcaccatgtgacccgttttcctaaaggcagattaaccaagtcccaagtatcattcgcaactaaagcattcatctcttttagcattgcagcaagccaactaggatgagacatgacttcacgaacagttttaggaatagtgatagaattgagagaagcaacaaaagaacaagaagaagaagacaaatgattataacaaacaaaataagaaaatggatatgtacacttacgtttacctttacgtagtgcaatgggaagatcatcgttgagttctgaatctgatgacgaagatgcaggtgcaggacatgaaacagaggtggacgtctagagtacactatgataggaggcgggggaggtggtaaaggtgcaagaactatgaccaaagcaagtgaaggaacaagagacttatcaaaacatgtatcaggagcaaaggatgtgacagaatataccaacaaataatcatcatctcacagacgagtaggagtaggtgaagatgaagatgaaaaataaggtgcattttctaaaaacataacattaatagaaagcaaattaaaggataaattaagtaaaagaaagcaaattaaaggataaattaagtaaatgtaagacagacgacaaagtaagcaaaagtgtaggtgtaacaacgccagacccgagaatagaagatggtgaccataaggtgtagatgtaacaggtcaaacccaagaatagaatagactagaattacctgtcatgtgatttgtggcaccagaattagtgacccacttggaggatgtggaaagaaagcatgcattagatttaccataatcagcaattgcaatgacaaaaggagatgaagacttgagtgttcatggtaccttgagaatttggcaaattcaaccgcagaaataacgaccgatttgtcagatgtatcgctagtgcttgcaacattagcaaactgtctttgttgattttttaactgcaactttctacactcaaatttggtgtgatcaggctttttacaatagttgcaaaaaatgcctccaggatccgatgttcaattgtcaaacccttgtggataacccctttctgtccacttgaggtagaagagcttccaggtgaattactattattgcaacttaccaaaccactggtaaacaaagcaaatggagtagtttcagtatgaaaaacacgactaaaaacatcttgcaaagataagatgtgggatccagaaagaacttgtgttttcgcaaaatcaaattcagaggagagtctcactagaaagctcatgatagccatctgctcttgttgacgttgttgaaccttcacatcaggaataaaaggcaacaacgtattgagttcctcatatgtcttcttaaatgtcataaaatagtttatgagggattgatcttgtttttctacccgataaaatgctttgcacacatcatacatgcaagtgagatttcctttgctagagtacaaaactttcaaatactctattagtttttaaacaaattcaaggtgattgattaaataatttacctcattttcaatagaattttaaatctgaaggaataagcaagcatcctccccaagtcatgtcaaatcagttttctcctttgaatgactttggaggatcattagtcaagtgatcatctttgtcaatactccgtagatagaggtgaatagccttgctccaatccaaatagtttgaaccactgaaattatggtcagtaattttagacattaccggcatcatattcatcacaatggttgacttattttctgccataatcctcaaatagcgaagcaagaacaaagaaacgaagattcacaccaaaagatgacaaacaaacctcaacgatcacaaaagaagaaaataatgtcagaacgaatgcaccacaagatcaaaaagacagaaaaagtcaactgagggagaaacgactgagaaaaagctcctcacgcacactcaagcgccggcgcatggggtttaatgtagaatcttcaggcgtcgcgtgtggttcacgtccgaggattctggccatcaaactttagggatctgcagatcggcgattgggcagtatgcgggtaccgacaatgagagttcacgtgctctctaagtatgttttccagaaatgaactttaaggaaaaggaagaacgaaccctaattgcaaatctcaatttggtgaaaaaccctaatttcaaattgtgctctgataccatgttataaatggtggatcaaaagtgtagtttattcaatagaatagcaagtacttatatacaaaactagggagactaaaataggaaactaagaaaaacttgaaaactaagtaattacaattctacaactaatatacaactaatatatactctaacaagaatcaagctttagtacaaacaatctagagatagaaacataactacatgttccatttacaattcaactgggaaacacaaggggcggtgacctgtgcaatttacattaaactttaagaggaaaataaagtttagctataccttaccttggcaaaagtatattgctcgaggactttctcttcaagcttagaaaaagacatcattagatcttgtaggtcactttcctcttcatccttttccctaaaacaaaagacatggcacgatcaatggcatcagtaaataaacaaaagaatatttcaagatacataatacaacttaacgtagccaatcagtagctaaggagattcatcacatataatctggtacaaaatactctccgaacaaggaatttagctcaatccttgctacagaatactctccaaatcaaaggacactataatggtaaataacaattataaaagcaaataatatttttatatatacagtataattgtatattagttgtagataatagtaaattgtatttagtaattttctatttgtatttagtttcccatttagtcttctagttttgtatataaatatatattattctatggaatacaacaaacaattcaattcaccattttctacatggtatcagaacaatacttagaattgtaattcgaaattcaaaaataaagttcataaaaaaaaaattagggttcgagtttatggttcctttttcgaaaccctaattagagtacgagttctttctcacagcctacatagacggattcccaaccgtcgatctacaaaaccccgaagtccggcagccaaaatcattgcatgtgggccccacacgccgccaatcgtcgtcgccctgactcttgcgcgtcgacgcatgagggcgcatccagcctcctttttggtgacggtcaacgtctatcacgctcccggcctttccctatcctccttgcatcggtttccggtggttcttatcattttgtggtttgatattattaccttcttcgtgtttgggtgttcattttttggtgttcgctttcttccttttctctttcaattgtttttgctttcaagattatggcagagataaaatcatattctaaatcagtagttgtgtagttcccatgatgtctaaaatcacagaccataaattgattggtttgaattatttagaatgtagtaagacgattcaactgtatctgaggagtattgac

SEQ ID NO: 220729 - DNA, 1747 bp, Cannabis indica
tgtcgttgtctaaaagcgaagtcaacacctatcaactaagaatggtcataaaaggccaagctctcatcgacttcatgactgaatgtacatgaatatcttctgaaatctctcaagatttgggagaaaagcaagagcaagagtagaagcaagagcataaaaattcagtctggaagttgcactaactacttgtacggtggaggcattgcccacattacgcatgggggtaatagttgcgcggagcaacaaagatcgacttcaaagcttccaacaatgaggaccgaatttgaagctctaattgctagcctaaagttagcacatgaagtgcgaactgaaaagaaatgcctggaacacttttccaagacactaattagaaagggcccaggttgacataggtgtaaaccttggcattggttctcgcttcaagcttgttggaagtttcatttggtccccgaaagtagttgaatcttaatctttactgaaaaaaaaagaatatacccagatgagttcttagaaaaaatgcttgaaaatggcctgggttgacaaaatatcaacctcgacgttgggccagcctcaagtgtcaatgtaggcactgggccttggttttggcacccaaaaagtgttgtttcttcccctaaagtactttttccacatttttagtgaagacgaacaagatgtaggagtcagattttttatctgatacttgaaagtggcctagattgaccaatttttaacctgggcgctgggtgtccgagcaccgtgtgctctgggtgctcaaaatgagctttcactactataaaaagagttttttctatagttttttaagttgcgtataaagtattaaatccggttggtgtaactgacactataggtttggacataaatactaatttttcttgcttcgattctgacgctaatttactttttctttggttaataactgaagcaaaaaatcactgcactgacgctaattgtttttttctttgattattaactgaagtgaacatattttaaaataaaaaaaaaaatctgaaaccaaacaattttgaccaaaaataaatacaatataagatcaatcatttatgaaaaataatacaatatcagataaataatatgaacactatttgtttaatcaccaaaaaataaaaatccatatcttaaatttaaactaaatctcaaataataaaaacatgtaaataccattttggaccctgtattttaaatatgttatcaattggatcctctattttgttatgacaaaactatttacatattctgtatttgttcgtgttaggaattatcttcaagttggttatattaaaaaaaattgtcaaaaattaagctcatggtcctatttttactattttggaaaatacagggtccattttgtcatttaacaaaacaaagggtccaatctgtaacttttacaaaactcagggtccaaaatagtatttgccctatctcaaattattcaaacagatgtatataaaaagtaggagtgagatctcccaaaatttgaaaaagtaaaaaataaaaacaagcttattctaagaagacatcagagaaaaacaaaattaattgaaaaattaacttgaaaaattaaaaatagaaataaaaaacatctcagattgtggaggaggaagtcactcactgttcatggacatcgacgttgactgcctgaggacgttagggctaggtggtcctggcttggcttacatagaaacacacacatagagagagagagagagag

SEQ ID NO: 220730 - DNA, 3139 bp, Cannabis indica
agaaaaaaaaattggtccaataaatgcataattagtcaaatttctcaatatttttttggatctctaggcaagatgagctctaggcacaggcttaacccgtctatgcacatgacttagcctgcacaaatatcaactaaatacataatgttgccatttttattatctattaggttatattattatattttatgggatattatgtagggtaacctctagcactagtctaaatgtaatttaatgaaaatattatgtgaaaagaaaaaaaagagtgatgcttgcaacttaagaaatcgaaatcatacactaatatgcatgcatgcatgcatagcatctcgattttgtggctgaataattcagtaatcagttagaacaaaagtggtgcccctattgtattgtgttgattctctaattataaattactatcaaaagatctttagattcattggaagaaaataaagaaaactacttatgaaaaaaaattaggaaagagataggacatcaccttggttttcttcatcgacttgtttttgtgcatcagttattttttctgtctctgttattgaaattaatttagtcagctatctttttattaatttaaaactagctataatgtcattatcttttttatttttatgtaatggtataaaaaatgtataaaatatttattaaaaaaaaataattcgttgttcaaatatatatatttgtatgagatatatatatatgattatgagcaatgcatttgaaatgttatttgcatatgaaatgttattcatggtaaaaaaatcatgatatattttcatgatgtacttaaaaaaataagaagtttttcctatttttggattatgtgttttaatcaattagagttgtatatttatatttcttaataatatttcatttaaggcccatattttgtatgaaattatcatgtataacaacttggatttttttaaaaattctattttgtaactaaatatatacggtaaaaataaagtattaatacttgagatcaacattaagtactttgagtattaattaaatatattattactttttaattaattcattaattcatctacaaattcaagggtgtgtttggtgttatgtttgaaaatatattgacttaaaaattaattttagttttttttagagatcatataattttaatttcttattataatctttcccaaataataataataatttattgtacataccaatctttacaagctttcgtagaaaattaaaacaggtgaaggtggtgttgtttgctggattttgatccttctgcttttccactttaatacctagaatccacaatcaaaattcttgggaaaattaattaattaattaattaatatttttttatgggtggattttaatataattcaaactttggatcttcttattaatgatcacatctaaaattctccaaaagtaattttaataattttaaaaaaaaaaattacaagagctagaaagcgataagtgagacaggtattacagaaagtaaaaagataaaaaaaaatgagaagaaagaaaaagtaaagcaaaaaaataataaatgaaaaatgatgaaagaaaaaaaaaaagtaacaagagagctaaaaagcaactattcagacaattaagaaagaatatgagaagaaacaaagagtaatatgaaaaaaaaatatgtgagaaaaaaaaacaaacaaaaaacaattttgaaaaatatgaaaataaacttttgttaccctaaaatatgaaaagagtaattattttaatgttatatatatatagacatttataaaataatgatagtgatatattggcttaatttaacctaatataattagatcttctttttatagacaaatttagaatttacaatcccaagtaattaagatcggtttgctcaccattgtgatctcctcctctagggctctttgtatgggaattaaaaacagtcactgcaaattagtgaaacttaattaaaatctacattactaagctagttgaaatctagacaaattatacataatttagtttatacatacctatttttacaagcttccatagataatgaaaaaatgtgaacaaaacagtgtagttttgtggatactttatctcatcgcgaggatttcttgatggtgtttcatctggctttgcgtttttctttaggtttttcacgtcaatacctaattatcacgccaaaaaatattgagaatttttttttcttttttgacattggagtaagtgaggattcgaatttagaatcttcttagaaaagatagtgtcaaactattaggctatatgctattatatgactatatacaaaaaaaaaatggaaaaattaattatgtatgtatatgaattttattttattattttttttgaaacacatatataaacataaattattaagataaataagaaaaatttacactcaatatgagtttaattattttttatttagggaaatttgcggtcaaacttgcttaacttaaagtttggcacgatcaaccccttagactggaaaaattagggttaaaatcccaaacctccataatcattttgctttttactccttccatccatttgatatgttaagcgtcaaagttgactgccactgtgtacacaagtgcacacgtggcaaaatttcattggtccacctaatattaataattaaaaaattaaaaaattaaaattagaaaaattagaaaaaataaataaaataacggttctcttttttcaaaacgataatggttctctttttttctttctttcttcttcttctttgttcactcaacctcacactagagaaccattatcattctcccttgcccaaaccaggtcgtttttctcgcccaaactaccgccatctttctccctcacttagatctcatcgcacgacaccaccactacctccttcccaaatctccctcggccagaccacactgattctcctattttggatctctctcactcctcttcttcttagtgggcgttgaggacgatgggatcaaggctcctccgcgtctagatcatctctggcactgtatggtgactgaggaactcgtgactacaggaggttgggacgaagaagctttggatcttaacggccttgaggatgagatagttgtccggagttaggcttttg

SEQ ID NO: 220731 - DNA, 2127 bp, Cannabis indica
tatctttatagtaagagccaaaattttattttttgcctatagcccatttcaactcagggccgaccctgttaataagatccatattttctctttaaagcataccacttgggatcaacaagggcttgtttaagggatgtgggttcttttgacaagagagattcaagtagggggtaggaggtggcattgtaggcctttggtttgtgtataccaaatttcgatctgatttgtattgagtcagagttgatggggtgctgaacagagggaattggtgctggtatgtgctgagtaaaaatggtttctgtgggtaatgatataggtggagtttgaccctgctcacttgtggatggggttgaaatagtgtcagtactgggttgagaggtagttgcaatatgcataggaggaatagtagcagcttctgttaaggaagagactgctggaacctcaggtatatcatgggctgcaacactatttgttgctggtgtagtagcagcagcattatcaacagcaacatgtgttggtaaatttggtacctcagcaagtggagtgttagcattagtatgcattattggtgtagagaatgtagtagtaggaatagggagataagagttagaaggtacctgagaagtagatttaatgagtgagccaggaaagtcaacttcattaaattccacatttctggtaatatagaccattccatcattattttcacaaaggtatcctttgtgattaagagagtatacaatgaagatacatttgtcagatttaaggttcaacttgtgagcattatagggttggagatatggaaagcatgcacaaccaaatgtcttaagaaactcataatctggtgctttgtgaagtaaacattcaaattgagatatatctcctattgcagaggatggcatcctgttaataacatatgtggtagtgtgaaaagcataccaccaataggataagtcaaggccagcttgtgccaatagggtcagacccgtttcagtaatacggtgatgtttcctttaagcacggccattttgttcatgatcatgtgggcaagggtgctgaaaatgtaccccatgttgctgcaagagctttgccaaagacctatactcagctccccaatcagattgaacactttttatgggtaaattgaactgtttttcagcaagagttttgaactaaaggaatattggataagcttgagactttagggtgagtggaaaaattcaagtatatctgctaaaatcatctaaaaaatgtatgtaataccgatacccttccttagaaggtgtgtgagaggggtcccataaatcagtatgcaccaattctaggggttgagatgctcttgtttcatatatagattagggtaacctatgactcttcccttttttacaagctttacaaaattttagatctttcaaattcggtgatatgtgcaattaagttaatattttagcaagtgttcttgaagcaggatgtcccaatttagcatgccagtgattaacattagtcttatttgcaataagagccatattagggacaagaaaagtagattgaaaatcattggctctattaacagaagagtcattacaaagagttaaagttgatgattcagctatgttattacaaggcatttcttaatctgatctagtatcagtaagagaagaaatagtagaattaggagtggaagtggctacatggcattgaagatgaacatatggtgtgacaaaagaccgatgagacagtgtgtatagaccattttaaccctccccttgagcaagacagtccatgtggccttgtccttgacaaaacaacatggcatatatgttgtgctttaaaatatttgtgatccagtactccagctagaaaatattttttttcctccaattaaaatcttccgtaactcttctacgtttcacgctcctaaaatcttgatgatattttggaatttactgttcgaaagcattgacttgttctaatatctcctcacacgtaaattgtctcgaaggatgtcttctttcaacatttccatcaaactgagtgtcccttctcattgcatgattacttggcaagaatcttccatgaccaacataagaggttttcccgattacttgaatggaagttgtgtcttca

SEQ ID NO: 220732 - DNA, 3059 bp, Cannabis indica
aacccgtgaacccgacccgcccgaacatttttaaaaaaaaaaactgtgggttcatcggttcgggttcgggcaggttgctcgggtttgggtcgaaccaaattattattggcgagatgcctctacccacgtcagcgtcaaccgctttgaagataagaatgataagcgattatacggttatctagtgttatctacacgtgtttaaatgaaacgtgatcaaatctcacgtttcatgacacggttatgtaattcaaatttaaatgtaaataattgccaacttatattcctataaatagagacagattctaaagaaaaagagacaaaaaatctttgaaagaaaaagatcactacttgtaatattgtatcaaatactcagaaatatcttgaataagatagactcgtggagtatgcaaaaccacgcaaaatacttggtgttattattataattattatacttattaatttttttatatagatattcgtgtttaatttattacgaaagatgcttattattcgttaacgaaaatttgcgataacagcagtaaaccacaaacttttctttattcgatagtagtgctaacactggagctctaatcaactgttgttacacatgtgatgttgacatgacactgacatgtcaattatctaagcacatcatctttttgattgtcatttgtgataaaacttgacagaaaaactaatttataactataatttttcatgaactatttttcataaattgaaaaatcatcataatttacgagataaaaatcatcataatttgctggtgtgaagcaaggtgaggggcattcaagtttcagctgtgttgttcgggatgcggaggggcagtgcctatttgcctcggcttctgttgtgccgaaggagtttacaccacttcatgtggagttgttggctattcacaatggcctgcaaactgggatacaacgaggactacaacgatttagtattgaatctgactgtcaagcaacggtccgtttaatccatgctaaggaggacggctgtagggacgttgatggcatactaaactgtattcgaaatttgatgtgtaatagttctgttgttggtatctcctttgtctatcgggaggccaatgaggtagcacatgttttagccaattacgctttgattaacaaagtgagagctatgtggattggggttattcccccttgtgcgagacttgcggttttgcaagacttgcctaatcctttgtattgatttgttttaatgaagactttatgttcaaaaaaaaataaaaattatataatacatattatatatgctatcctcccgaaattacaaacatataaaggactattatattttatgttaccacatacatagcgagaaatcaaataataaacctgatgaacccttttgtttttgtataattattattaattttaggtttttttttctttgggtaaatattccatcgtaatataaagagtgaaaagagaatcaaatgagtgtggtgggtggtgtgagaaggtggatgctgtctcttagaagaacgaaaggaaatgagtcttaattttgtacaatttgtttataaatatatatatatatgtatttttgtaaaatatatataacatacaaaaataaatataataataataataaattatttatatttatatatatatataatatatgtgatggtaacaggagcttttatttgttgagactgtagcagcgtaacaggaaatttattcctatcccaactctagtcctttcatattctactacgtgggaattaattattcacacttttaattcattattacatctagccaaagccacctataaaaataaatatctttttacttatcattttattgaattattgatcatttaatcatatttatcattattattattactactaattactttttgcatgcatagtcttgaagaaattaatttttttttcaaaatataattattttgataaatatgctattataaaagaattttaaattatagacaagcatttatctatatacactctcctaagttagtaatagaagttgttaatttataagcaacaccatttattgatcgcagaatacaaaataatgctgcaagaaccaccacaccaacaacagttaataaataatttatatgtaataaaatataatccaaccaattaccacaatagaataactattaataatagaaatagtgaaactaaattgatgcacaagagtcaggctcaatctaattgcaagcaactctaccacacattaacagattaatcacctaacacaccaaatgaccaagccagccaaactacacctgcagcatcctgtatcacccccccaacaaagtccctccccagaatcaccgaagtatcagtcgctagagcaaaacaattagaaggaggtagcatccatctaggtcatctttcaactaggtttgcaaagcacaatcccaaatgaatactccgccgaacatatttctttgaattccaacaaatgattatagactaaatctgaaacaacatctaatcttaactgcatatcactaaataatagtatatatttatatataatacaattaaaaagactccatattatagtagctactataactagctagctattagagtagtggaattagtctgtgaattattaagttttaatggtattttggtcacctagataatagtataatcctataattagctacacatcatttgaccttaaatctcatccttattctatatgttgttgttattattattattattattatttgtttgtgtaaatatgtgattattactctattattatgacctttttttgttttgcctcatttttgttttaatttgttttggaataaattcctttgaactataaaactaattgcatacatccttttggttttatttttttttttattgttttttttaaaaaaataatttagctgatgtaatactgatctgatatgtaagagtccaaataaaaaaaaatatgtacttagtggtttaatatctatatatttatacttttagaggggtttattttttttttttttgtgaa

SEQ ID NO: 220733 - DNA, 3108 bp, Cannabis indica
taatggaaggtttatgatcttcgcaggagcaagaggtcccgcctttcaaaggagagggttgttgactcgtggacacatcccttatagtctccaatcgtgaggaccttgctcgcagaggtctgtgaggactgatccatagggttagagccttaacccttcgggatcacggattgaggcctttaggtagcttaatgatttcttgtctctctttaattattccctacgggttatgcaagcagaaaagcagataacactacaaataaggctttactcgaagggaaaagggacaacaaatctgacttacaaaaaatctactaaaatttatattcacttaaagaatatctaaaaattacattgacttatgagataggtagatttaactactgaattacataaaaatactatgttcatactattatttatataagtacttattacattcttcatctaattatttctaaagtattagttatccaagtggctcaattattgttaacgaatttctaagaagacagaatcttttaaaagaagttgccaccaaaacttgtttatcaatttttctaaatcactacacattgtaacatgtaagagaaaaacattcattacataatttgacaatagttgagctacaattttcagaagaatttctttaccagcacaggaaagtaactttgcatcccaactttcaattctttttcgcaacctctcttttaagaaactaaggattgtatttttatttctacctattatattcgacagccccaattaagtactattatccccaactttttgagcgtgtaacactgaacagacttgattttgaacctaaacttcaatatttatactaaagaaaaattgaagacttatttaaatgaatcttttggcttgaagatctttcaaactgagacaacaaactcaccacattatgagcctccctttcatttgctgggcaaaacaaataacatatgtgttacattctcaaatcttgctagccactttacattcccaaagccacccctagcctcataattactaatcaatgcaaaaaagccttcaacacatttaataactaaataagatgaaatgggataaccctgcctcaattctctaaaaggtataacaggacccatttcatgcgacccatgaaccaccacgtatcgaactgtcaccacatattgcatcactaaagaaatccacctcttgtcaaaccctatcttctccttcattaaaactaaaaaatttcattcaatacaatcataggctttactcatgtcgcattttaatgtcatatacccttttttactaactcgcttcctcttcaaatagggcatgacttcaaaagagaccatagtattatctgcaattgatcttcctgaaataaaagtactttgtgcatctaaaataatagtggaaagaagttgcttcagcctattcggaagaacttcagaaataactcaacaaatcacattgctaagcaaaataggtctcaaattcaccatattctgcagaccttttattttaggaatcaacacaacattagtataattcaaacctaatggaaactctcctatttgaaaaaaaaaatctttcaatcaactctactgattcaccccaatagtatcaacaatgatgataaaagacagactcatactatcttgatgcatttgacaagagcagctcggacttccacatgtgtaatatcttccaacaaaaattaattttgattctcggtaatggaaggttgaacacaattaaaaaccccattaaaattagtatttgaaccttgaaaaaaattattaaaatagtctaacatcacccctagcccactactcaaatcaactcaaaccccatccagtctcaacaagctgtcaatttgattgatcttccttctattagtagccatggaaaaatttattattttgatcttttgccttcaatcacatttgctttgagcattacttccaaaaaatcttcctacgtgtacacacctaagatagatttttcttagcctccttgtagtccttcactgaaatcatatctcttttatttttgagaatttttatcaccttttgacaccgtcgaattctcttttcagtataattcttaccccaaattattaactccttaccaatgccaaagcctggtaatgaaagggaaacttacaaaaatactggaatttgggttaatttttacaaaaatactatcacgcggaatttttttcaaaaatactgtgtttttataaaacaccagtaaaacacaaagcagaataactcaaaacaacaatagaacaactaaaaatactagtagaacaccagtgaaaacttatcacagtatactgcagtatgaaacttataaaaaaatacagtaaaaagtaaaaataccgtctgacagtatttttgtaaaaaatagtaaaatttagtataccacgtaaatttttctaatgaaatcactatgatgacacatctctcaactctcttcaataatttgcttacactaatggctcccttaactaagaattttgaatttaaattttttgaagaattagggacaaaaacagtattacaaagattaaaaacaacagattacgatatgaggtagacacatattaaacatttttatccatattgaaaatatcataccgactttgagacaccagcgccctttcggagcctcacctctacccaattatcagtgtcgcaccttttttctcaagtgtattgatatccatcaagcttaagagcaattaaaccacaatctccaactatctctcaaaaaccttgcactaaccaatttaagtatggttgacccctcttttatcatcttggctcaaaacattattgaaatcaccaactacacaccaagacaactcagattcttcattcgatttccccaacaagtcccatgtatgcttcgttaacgctttattgggctccccatataaccctgtgaccagatactcttacatcccaccaatatgaatgtgcaaatcaatatgatgttgtgaatacttgagaacgtaaactcctccaaatcctcaaaacattcttaaccaccatcgtgtccctgggaattaggggtgttcatccgatccaatccgtacttttttag

SEQ ID NO: 220734 - DNA, 1432 bp, Cannabis indica
ctaattagataattatgaataattgcaaaattatattattatataatttaatatatgtgaatttatttgattaatgacatgttaagaccccattggtgagctaggagcattttagtaattttgacccgggaagggtaaaatagtgaagttgatatattagtgtgcttatagaactatattattatatagtatgcctgtgttgtcttttttaggtgtgttctgacaggttggcgcggtatagtcacaaccgggtatttcgggccgagccggttttgggcccgaaatgcaattgggattgagttattggcattttaattatgtatgagaaatctaaaatttaattggagttatttatgtgtgaattgtcataaattcccttgtatgtatgaatatgtgagaaatggccctatgggcaatttggtcttttgacccttaatttacaaataataaaagagctgaattttaagtaaatgaaaaggaaatttttggtttattcctcctcttattcgaaccctctccctctcaaaccttctttgatttttccaaattattttggtagaaattgcttgaaacttgggtattgattgaagcttgttgtggggggatctttgagcttgcttttggtgtgatttgaggtagttttacaacttttatttttaagttttgttgctgaattttattgattaaaagcatgaattaattgaagtgctcttgaagttgcatgtttatggttttggtattaaattctggtaaattgattgtgaatagcatgatttagttgtgatttatgttgttgagcatgaaatgtgattttagggtattttctaggtttgaactcatgttatttttggtattttggtgctgaaaattgattgagttgtttgggtttgaagctctagttcaagagcttgaattttgttaagtttggagcttaattttatgcttttgggtaatctgattttaggggtttaatgttagattttgatgcatgaaatatgttattttgaccctctaatatttgataccaacttaactttgtaatttgaatgtttggttgtgatttgagatgaaatagttttgttttggttgctgaaattagaggtgttcttggctgatttctgggtttggaacctaggtgccgcggcatggtctgggcatgtcgcatcacggcccacttgttggaacctgggagttagtcccaggtgccgcggcatggcttttgtatgccgcggcccgcctttgaatttttgggcagttttgagttcaactttgaaatttcataactttatgatccgaactccattttgggagttctatacatcgttggaaagctcgtttcgagctctatgtgattatctgaattttaaatgcctcgtgaatattttatgaatgtgaaatcaggggttaaccctatttgtgtaaatcccagaat

SEQ ID NO: 220735 - DNA, 1618 bp, Cannabis indica
ttgcactttttttaagttcaaattttaacggtagtgatacttaactggatgacaccttaaatttactaccagttcagtagtttggaaggttttaccgctaaaatttaaacttaaaaagttaaatgcaagtgaaacgtcaattgaaaggatttaaccgccaaaaactcaataattaattatttccaaaatgactttctagacactcatcttgtttaaaattgtattaaattttcgaaaacgacatttaaaataagttattttaacaaaaatactttatattttcaacactaattagtactaatgaacctaccatccaaggagaaaatccacatatctttctgccgccgctttatcttccaaacattcaggatttaaaggctctataaattctccaacaagggtgattccaatttggccaccttgtagagcctttaaaagtgggaaaaagtgatggagattaattataagagagatgttggtattgtaaatgaggcataattgaaatttgagtagtagataagcttacttgaaacttctttttgtagagcttagcagctctagcatgagcaaggatgagattatgggcaataatgtaaggttctatggatgagttaccagccttacatggaccaatgggtggtggcaatgagcatctactagtaggtgctagccctatgtcatatccaagtgcaaccacaaatggttcatttattgtgatccaattttttactctatctccatatgttttgaacaaaagttcacaatagtccttgaaatcatccctaaatgaccaaataatgacaagctttatcaaagcatgaatcaatgtaagtgaggaaattacacattttatgagtttttatacaatgtgtgtaaaatatgttttttttttcgtgaaaaaattaataaaataataaaaataataaaaaaatatataggaaaaattgctaaagttaaccttcataagacaatcaattatcttatactatttttttttaaaaaaaaaaacccataaataacctttctcttttgaaaaaaggtcatatttcaaaagaaaaaaaaaatgttaataatgaactaataaacttacacaattgaaccattcaagaagcctccatatctgtcttctagagcttgtggggtgtcaaagtgtaatattgtcacaaagggtgtaatgcctacatttcaaaccattttgttaactttcctaaattagactttagcaaataataataataataataataattcaccaaccaaataaatgaatttcttaccattactaatcaattcatcaattagattgttgtagtgatcaatgccttctttgtttactccacctcttagtgaaccctctgaaaattttcaagctttaaaaataagtctttgttttagcaccattatttttagacatcacattcatacattataattttgggtgagggtaaatattattttggaccttgtgttttgcaaaagttattaattggaccctctatttggttaaactatttcgttaaatgacaaaatagaccctgtattttttaaaattatacaaataggaccctgaactgattttttgtcaaaataaaatttaataataatctgatctaaaaat

SEQ ID NO: 220736 - DNA, 3220 bp, Cannabis indica
atatatataagcactctttaataatatatttttcttttggtaaggctccttaatgatgtttgaattaattaattgtaatttttttctcacatactcctattcattattaatttagtaaaaggaaaaaacaaggtcatcactcttcacacactaattaacaagtaacaactaaatatcttcttacactaataaattactaaactaaagagcaattaatacacattatccccattcaaaaaaaaaaaaaaaaaaatacacattatccaatataaaactaatatagataatatttctgctgtcttctattaacttttcagaaaattgttgctaagaaagttactatatttaatttttattaaaaaaattaaaattaaaaactaaaatttattagttacccaactaataatagaaatatttttagatttaacttcaaaagtcgaaaaataacttataaaacccaactaacgggggccataaccaattgattattattttctatttttctctaatattagtagtgtatcaacccccttaatgatgtttaaattaaattacaattaatttttcttttatatacctttttagtttttatttgtagtataaaattcgtaaccaaaaagaaaaacttacatttttttatacatctctataatttagttttaataaataaatgaaaaatatataattgtaaaatgatcaatagatatagttatatatgaaggggaaaatatgtgagtcatgactgagttcttccattaattaattcattaattcttcgtgcttgagagctatatatacatgtatatacacataaatataaatatagtaataaatggaaattaaatgatggtgacttataataacccaagttgaggcaatttaagcttgtgagattattaaatgcccactacacctttgagcaactccactccattggggtaatatattttgttacttacttgaccctaccaacttcttttaatcaaaattaggcaattttgcccaatataagtacaaacaacttttgggtaactttaattattggagtagttgctcaaactttcaacaaattttaccaaagctattgttgtgaaacacaactcggcaagaacaataattcaaccaataaacaatgagacgaaaaacaaaacaatggactatgataaccatagttagagttagttaatgagttagttaatactagtgttttactgttgtaacagtttgttttgccacttgttttggtctgtttttttttgctctctgttttcgtttttaccctgtaacaaactctggctctctctataaataacatctctctttcaaggtttgtttaatttttgcaagttttgtgatttctttctctgattgagtcctgttagattgcatagatgagttcacattctacatggtatcaggaagcttttgaccaacgtcgattatggatccttgccaccctgaacccactgcttagccctctgctgctctgattccagctgcttcaccagctcatcaatggaatccattccagaattctctgaattcctctctcaccgttcgactcgattgagccaactttcttacgtggaaatcgcaagtcaatatccctactgtcatcggtcacggcctcgatgacattcttcttgccggagttgctccagttcgcactctcgttaatggtaacgtcaacccagaatacactacatggaaaagaaaagatcaattgttacttaggtggctctgatcttccatgtctgaaacgattcttggatcgttagctcaatacaactcatcctatgatgcttggcgtgctctggaacagagattttccagtcaatctaaggccagattgcttcaaataaagtctcaactctccacaattcagtaaggtaatctttttattactgattactatgataaagtgaagcttcttgccgattctttatccactgctggtcatcctgttgatgacagtgacttgattatgcatatgttaaatggtttgggacctgaatatgatcccgttgtggttcatgtcacaagtcttgtggataatctctctttagaatcaattcaatctctgttactaacccatgagagaaggctggaaagacattacaccttgaatgattcgttatcccaagtgatggccaatctcactgtccataactctcgttcgaattctggccctagataccgtccttatgctgctcaaggtcgtggcaattatgcatataatcgatctcagagacgatcttatggtcgtggcaacctgtctattccacacctcttgtgtcaagtttgtcacaaatctagacatacaaaagcagtatgtcattaaagatttgacaaaggctttgtgacacccaagatcaatgagtcacgtgcctatcttgctgaaattgatgatcaagaagacccttaagtttattccagctttgccattcaagaatttgcagatgaccccgattggtatgctgacacaggagcaacgaaccatattgctcaaggcattgaatatcttgaatttgaaaccccatacttaggatcaaacacccttgctgttggaaatagaaaacgtctccccatcagtcacatttgtaactcctctctcccttcatctcatgtttatttacatcttaaaaatgtccttaaagtccctcaaattattaagagcctaattagtgtgtctaagcttactgaggataataatatatttctagaatttactccaagtgttgttctgttaaggacaaagtaacatggagagtcttgctcaaggggaggcttaaaatgacttatacacactgtctcacaattcatttccatcatctaaatttcagcttgattgtcaccttgccacaattcagtccaagccaaagtctactacagtgtcttacactatagtccttgctagtcccatagaagttaaatcttgtattattgagcattgtaataaaagtgttgtttcaacaacatcttcctcatgttatagtttacctattaataaaaatgacatttcttttaaatctgatgtcaataactcagttctttatcttactgaaaaattaaatattaatttgtggcattccaagttaagtcatcctgccccaaatgttcttgccaaaatcttggctgcattgaacataccagttaacataaaagacctaaaattctgtgaagtaggggtgagcaatggtcggtttggtcagttttttac

SEQ ID NO: 220737 - DNA, 2110 bp, Cannabis indica
gacaaaggagaagaagatgaaccttgagtattacgacatcgcttgagtaatttccgcatagacaaagagtcattggcccttttaaaggtggaatgtggcggctggttttcttttgcagaagtagtatttgtggaaaagtgagtggtatcgtgtttcataggcaaggtgagagaggttgagtgggggtgagagttcatggtgataggggtgaggacgggtggataggtagcaaaagtggaagagtggacatcgggcacataaatgtgagaaaggtctgtgacaggtaaactagccgaaaaaggagttttagtagcagaggacttgggcacattgtgtgttttcttatgatcatcaggtagtaatttttgtttacctttaaagtcatggttcggatgcataggctgactcatagggaggctagttataaccgaaagaggagggtgagatgataaaaggctgctgttggaaattagtggaggagagtgcatgttgcagagagcatttggggatggatgtgtaaaagcttgtaccgttggtgagggtgtttgagtaacagtcggggtgggagagttggaagcagaactggcagggataccaaaggggaaaccagcagtgacaggcgtgtgagaggcaagcagtggcataggggaagacacaagattgttggctaaaactcttgggtttggatcagcagtagcagattcaccttggtagagagtagacggttggggctgcgattttgaaaccaagtgaggaatggatgaaacaagagctttgcgtgcaagtcgggtaacaaaaggccaagcattggctttcgaaaaatcagtgcgatatttatcataacccgttgttggaagtctagcgcccttcatccacggtccgtactccaaatcatcatcattcccattatccattctttccatgaaagcaacacatttttcaaaaggatgaccaataactccacattcaaagcaaaattccggtagacgctcatatcgaaagtcaatccaaaaatcatctttaatttggggcaaactaatcattcgacctcttggaagtggtttgttaaccaatatccgaactcggatacgtaggaaaggaccccatccctcatcaagggattcctcatgaacatcaatataatcaccaatgagattgcccaaagcctttgcaagagttttagacttactgagaaacggtagacgatacacttgaacccaaaaacaactagaattgaaagtattgactgaggcattttgcagagcatctggtgtgcagaaaaccacaaggtgattttggaagtgccatggttctttgttcaagaccctgaattgatcaccatcacagccaaaaacaatcttgaaataatcatctctgtactcagtgattgtgactggaaaacggcccctccaatggtcggacatttggttgataaatgttggtttatggacatagttttgggtaataactctagcaaggagtgtaggggtagggatggcagtggaggacggaatcacatcatcatgtaggaggaaaactgagcgttcttcatctgctagtttcagagttgaatccatggagcgtaagagagggtcaatgtcggaggacatggctatggtggccggtgtaaagagaggaagaaggagggtaaagggcggtgctgatgaaaaaaactgccaggaaacacaggaaaaaaggtttgaaatggtagttaaaattctaaaaaaaccgttaaaagcacaaactgctacagacccaagcagggcacttatctgtatcctttgttctgaaatgcatgtctttaataacttttacaatgcaaatgaaactctcccataaaatttacagaacgtggacgctggagacaccacccgaaaattatatatgatcacataattaggtagaaaaattaattcgagtgtcttcaaaattgttgtagtaacacttgtatatacatatctcttttatattaatgtggctatttaatagaaattattagtttaattatttttttctattaaagttaagagttaaaacgaatacttttaagttaattaattaattatttttttaaaataataattttaaatatctaaatttaatttattta

SEQ ID NO: 220738 - DNA, 1350 bp, Cannabis indica
aattatttcaagtcgattacgcattaaggtgggctaagcccatgtctaggacccacctaaatacaaggcccaaaactgttatacattatatgaatatatgggaaaaaatatgataatttgtaaaattttgagaaatagactcgctaatacccaaatccactcttacctagactaaatctatacctaagacagctatctttctcatacaaaaatattatttgttttcaaattgtaaaaagataatattatttcgtttatataataatattgtataatagaatatcatattttactctcgtaaatttagggtaaatatgttacatgtttgtctaaatataagactagtaatttattttgagacaatgtcttagcaaacaactaataacatgtatgacatgaatttagtatgtaaaattgcatatgattctcttaactaaaacaattgttttaataacattttattgttgttattattttctagggtttgttatgcttgtgtttcaactatttttgtaccctccaattgagaggatttttggacctgtacacttggcaagaattggagctgtatgtctctctctaaaagtactcttcatctatatatattttaaattttattatattctaataattttcttttatttcttgctaataattatttattaaggtcatcacaatagctttgctatcaagttacccttttatagcaaagctttccggactcacactcactctattagttgatcttgcagttgtcttaaaaaatttagtttcagtaagtattttttttcaattttaatttactttcttgtataattccatacattttaacttgttttcaaatattaaaaaagatttgatactaaaatatatattttttttattatttattttgctaaatgtcaacatcgaaatatatactctgcattaaaaaatttcgatatgctattttacatagaaaatttttgacccactcccaaaagttcttaacaccttttactaattattcttgaaattattaggcaatattaattactggcttaactaatttttttttatttgttaaaacatgattagatatgtattacaacaggattatttctactacaaaacaaagctgtggtaatttttctctcttactttgctaaatacatgtatgaaatttgtatgtttaatctaataattaacatttcaaattaagttaaagttagtaagttttattattgggaaaatgatgaatttttgtttgaagggtcaaagccaaagaggagctgcaaatggcatgtctatggcggcaatgtctctattcaaagcggccggtccggctggcggaggtgccatgtaagtttt

SEQ ID NO: 220739 - DNA, 3342 bp, Cannabis indica
tcatataataattgagacataatctatttagaaagatattaaaaaagatgaaattagtttgacaattcaaacaataatatcttttaggctatgagcgaggggagggattctaactactctcctttttaaatgaatcaaaccgcaaatattagattaactctgttcgtggatgcaattatcttaaaggaatctaaggcaattagagtagggccattattatgtcagcacatcatatagtgttaacactacgaaattactaatgtagataaattttttaaggtttatagttttcatataatggacaattgtgttttttgaaaagaaaataatgttataagggctattactaactaaagaaatctatttagagtagtatgagttattccttagtttcctcctttagtatagaaggggtttgttactgccttggatctagttttgttttgtgatcttcattttcttggaggcttattgagttttgtacaggaattataataattttgatagttactaaccaaaggtgtgacctttggttagtattggttgtttggactgttttattttttttctttgttttaaaaagtagtttcagttttggcgtcggttttgctttggttgatagtttcttctttgttctctagttttagtgaataatactttctcccacttgtattaatgttgttctattgtatggtgttttgatatttagtattactgcttttcaagttggaacttttgctcttctggttagattaaactgggctcattcatgtgggattctctagaaacggttaaatctaactcgctctcagtagtattggctatcaataagaagaatgtgtttttaaatgagatgggtgtgctattcgaggatgtcatgatttattgtctaaattttcgaggacgattttgtcccatatgtcccgcaaagacaatactgtgacccatggtttaactaaacatgctcttagactagacaataagttatgttggtttgaagagctctcagcgccaattgttaaaatcttctagggaatgtcttactgtgatctagatcatgttttcaaaaaaaaaaaattatcttttaaatttcatagaaaattcggtaatttctagactatgcatgcttgtttatactcagatcgtaattatagtaagagacttgtccctacttatttaaaaaaaaaatgctaaattactctaattttaatgatcgttaggcacttatgatctttattagttattatatgcatttattcaattttttattaatttttaattaattaatgatctttatttttttgataaaattaatgagctctaatcatatatgaataaggtaaatataaaaaattaattaattaataatttctaattaaataatataaaattaaaaagttagaaaaataagaaaattaaagaaatatttgatagtggtatttgagaatttttttaaaatccctacactagaaatagtactctctctatatatatattttttataaacatattttagtggttctatattttccagctctcaagttcgaatcatctttctcccgctttcaacaacaaaaaaaaaacattgttaggagcaagattaacaaatgcctttattattggatggaaattggatggaaagatataacaaatcaatatatataatatataattattaatgaatcaaaattatttaataagaaactcaaacaaacaacacttaatttattgatgaaatattaagagtttacagtagctgatataacaaactagatagaaataaaacaagaaatactaaagaaagaaattgcttcagaagatcactgatggagctttattgaataatagaccatggagatagatgtggaggattagggatggaagatggagggtgcacaagaacaaacacacttaagttatgatgaggatttttttaattttttcatcataatacacttttgggaatctatcatgcaatttatacttgtcttcacccacttggtatttgtataaattataatttcgtgacaagaaaataacatcaggattggttggatgaaaaccaagcacaaatgtcttatccatttttgttgtttttctaagtttaactttatgcaccaaacaccataataattcatcatcatcattcaactcccaaattctcaatgaaaagtggctagctccctcgcttttaacaaacgacaatcgcagtcgtcctctaacaattccaatacgaattttgtctttataaaccttcttcattccatgagtagctttacaacttttgggaaactcaataaaacgatgtcgttttggatcagcttcttctgtgaatggattacatgagactattcctttaacttcattcactcctactttcaataaccaatatataattccattgttacttgcaattgaatcttcaaggagtggatattctaccaaatttggccataacaacgagtaaggcaccatcgaactactccattctccaatatccgaacaaaagatcatcactctagcattactattgttaaaatcttgttcaaatataacacaaccttgcaactataattatcaacaatattattgtgataatgataataatcatgatcatattgatcaattttcggcttagctacaaatccacagtcaaggcgaaattgtcgccttactggaggaacagaagtaggtaattcgacccatttttttgtgagtggattgctaatgcaaaattcatgattctgattcgattgcaatttcggtgaaatcaacaacatgtcaagaaatgtagctcgaataaaaaattgactaccccaagggtaaaaactttcgtaatcacatctcagcttcacaatatctttatgaatgatttttgattcttcagaaaataattcatagaattttgtgttactgtttggtactatgtctctaaacaaaatagtgtatggcataatatgatgatatcttggtctgtggttgagaaactgaacaaaaccagaaataaattgattgcgagtgataagagaataccaagttttacaaacgctggtgcattggattagagatcgaagatcagagacacgcatcaagatttggatgagtaattcttcaggaaaaatattagacatgaatcccattaatgcattagcactatatgattcttcttcttcattttctttaactttttcttcatcactggttttccttcttttttggctacacctaaccatgatcatgaattttacaataattattataatatttttgagtgattttggggagatatatatatactaggtgattgttacgtgccatagttttatttaatattttagtttt

SEQ ID NO: 220740 - DNA, 2206 bp, Cannabis indica
ataaaaaattacaaattaaaagataacactatcactcacccagagttatacggtacacataagaacatccttttgtctgctatgcctaagcgttcaaacaaaaatttggctcaattctcgatattatatatttttgtagaaaactttgaagggtccataaacaaaatgtgttgagtaatttttaacttgacaagttcatcatataggcctctacataatcaaaataacatattaattatagttattataagtaatgaacaaattaattagaaccctatatatttacctcatatatggtgagatgacacatgcactgatttcttgaagatacataaactgtgtaatatcatccatatcaagataaatgggtgacggtaattttctaaagacatcctcaggcgctgtaattgtgcacatcaaagaacctttctgcttcaatgtcatttttgcccaagtaagcaaactttttggaaagtgacttggaatgttgatatcattgggccttagacttgatgttttgacactagatgatgatgatggcaatgtctctttaccttgcggttgggttgtaggtgctattggtgaactttggctcttcttttgtcttgttatattaatccttagtcgtgatggtgtctgcaaatgaccaattatattataaagtgatacaattgaataacaagtagtaaaattaaaatatatatatgttacctcaaatctttttaagactaaatattttgaccatgagagaaagagccaatcgcatctcttactttgataatctcatctgatattggctttggtaactttgcatcggcatcaataacttcagatatgtgaactcgtagagatttgataacttttgacaatgaattgtatctatagaattcgtactaataatgtatccttttgcaactacttcgtgtgatgattctatagttactctgcaaggttgaccctattcaataaagcaattatcatttgttagcttaatttgttttataatattatcaaacacaaatatgtcaacgataattgatagtctaaaagataacctatgagtctggagtatgaatattgccaaaggagtgaatatgatcatatcaactaaataaagttgatgcttatttccatacccaggttggacgtcatttgcatactgaggttcattgtcatctacattctcagattgaggatcaactgcaatcttcgattgagcttgagacggttgagtgtcatctgcattctcagattgaggattaactacattcttcgattgagcttgaggcggttgagtgtcatctgcattctcagattgaggatcatttgcattcttcgattgagcttgagacggttgagattgagagaattggcttattatcattttcagttgggcctctaaagaactgaatttttcctccttactcttcaatgcttattaaatttcttgtttttcttgtttatcttgcagtcgttcctctagtagttgtgcgtaagtgctccttggaggctttttgaacacctctctttgacacatagacattcctttaccacgaacacgaccagggtgctcgggtttacctaatgcttgggtaagaacatcatttgagccaatcacaacaagttcaccacttgcttttttctgaagaagttcatcctacacaaataaacatgattactttagtttggatgattatcaaaagattaaatatattttagttaattagttaatataattacttacaatcttttcaccaatttttttggttgattcatctaaaaattcccctttagaattcatccgagatcgcttccaaagttcagctcggtcaatgggcttagatgtgcgacgctctttttgtatcttgttcctatttgcgctattgaagtctgaactgttcgatgaacatattcttgcttagaacgtctctcttgttgggcctttcgcaatgcctaaataattgaaacaaaaataattatcattgcaattatacttatgtaaataaattgaaatattaaaataaaacttactttgaattcaggattattttgggaagctacaaatttttttcattgtttttttgtgatattcttattttttggtagccatgtcaatgcagtcggatttttcttcgcatactctagattttccactactacaatgttagcctttagaggcagtttttttcaaccccatttataaaaa

SEQ ID NO: 220741 - DNA, 1654 bp, Cannabis indica
ttttcatctgggatgtgtactaccccaagtggctcgcaaaaactcggttcttggtctgaaagccaatggcatttggagaatctatatagactttaccaatttgaataaggcccatttaaaagactattttcccctcccaaggataaagtaaatggttgacgctacttctggatatgaaattttgtccttcatggatgcttatcctgggtataacaaaatcaacatgcatgtagcagaccaagaacatacaagctttagaactgataaaggagtgtactactacttagtaatgccttcgggttggaaaacacgggtgctacttagcaacagttagtgaactagatcttttgagatctattggggaggaatatggaggtctatgtggatgacatgctagtcaaatcatagaccacagagaaacacacaagtgacttagaagagtgcttcgtggtagtgtgcaattacgggatgaaataaaatcccaaaattgcgtgaccttcaggaaattttgaggcttcatcgtcaaccaatgaggcatcaaggccaattagaagaaaattcaagaattttttggacattccatcccctcaaaaacatgaacacatccagagattcacgaggaaggtagctcactaagcttcttcatatctagattgacggacaagtacatcttgttcttcaatatcttgctaaggagtcaaaatatttaatggacgatgagtgaaagaagtccttctaaaacctaaaagaagagatggctgatcaccaatcatgtccatgcaagtcgaggaagatcccttgtatttgtacttagttgtcttggagcacgcaatagcgatgcactggtctaagaggaagggaaagcatagaatttggtctattatactagtaagagaatggtaggggtggaaactaggtacccccattgaaaactttgccttatgcttgttagtatcctcccaaaagctttgcccatatttttaagcttacacaatcaaagtgctaacaaattatcctccccgtcaagtgctccaaaagtcagagtcatccaatcgcctattgaaacaggccatggagctaagccaattcaacatccactattcaccttgtatctccaacaaaggagaagctctagctaatttcattatatagaacaatgaggaagagccaaagatgactcgtctgaagcctactattatgacctagaaagtatacatagacagggcatccaaaaatggttttggagcaggaatcaggttaatattctctgagggtattagacttcagagtgctcttcatttctagttgatgtgtctaacaatgagaccgagtatgaagccctcctatctagcatccatctcgctaaagtggttggggccgcatgcatagtattacacagtgattctcagctagtagtcaatcaggttttgaaaaagtactaaaccaggggtgagagaatgacagacatcctttgtctccttggtctcggaggtactccaggagttcaaagactataggatttcacaaattcctcatgagcaaaatgcccaagctaactgactggccaaactggaatacaacatagaaatataagaactagaggtacttttgattaattacctctagagcccagcacaaccacccaaatagtagt

SEQ ID NO: 220742 - DNA, 2995 bp, Cannabis indica
ttttttataacctacaaaatgatgaaaatgttagtagtgtaaatgaaagctcattcatttcatgtcctaggttggagtcctataatgttagtagtgtctgttattgattgctacggtatggcagtttcacattctctaatgtattatttgctgaagcacaggattttcattgcctgatacaaggccttgctcgtgtgactaatgaaatgaactttcaaaagtctgatacaaaggttagttatctagtttcattttcattgtttattattatagaaaacttttttgtgattagtaattataatacttgatgtttgttttatcatctattggatatacatgatctcatataaaatgtgaaaagaaacttggagcttagaaatgtatgtgagtaagtctaactagaaatatacatggtactgataattacagtaatttttataattttatagttagtgatatttcttttgaactttctagctcttggattttgtaccacgcaatagtgcatgtgaaggtagttcatatgaaatgattgtagatatgctgtctttattattattattatactattatttctgttatccactgctgctcaattaattacaaggtcttgctcattaatacttggtgatcggtactgctttgaacttgtaagtgagatgcataactaaattcgtttgctacagttactgttttttaaactttctaatgttgtaattagttttctgatatttttccatagtttctgattgtttgaacttatctaaatgttagtatgactctatgcggcttattaaaagtccttgtttcttctttttgtgcagtccctaagaaatctgttattatttcaatatcttgtcaacattcttgaaggtgattttgttccacgcaatagtgcatataatgaaggtatttcatataattgtcattgtatggttttatggatttagctccacgtgtatgctgtaagtcactgttgtttgcaggacttgtgagctggacgcttgtgaaagagtctttgcttaatatgcttttggtatgtctcaagaaaagaataatgaagggatttactcttgttgatgtgctattttcaaagtgattcagtgtatcatggctcttatgtttgaagctaatcttctgttgtagggatcacgaaaaataaactacaaaaacttggttaaggattgtttaactattatgtgtcaactgtaccagagttctgaagtttctgaagaaaatcagctaaaaattgtgacacagctgtgatacttgctttacctgaagtcggaaagaatgcctgcatttctatgcagaaatttctcacaattgtaagtctcccatgaggtgtcaattagtatattgtttgagccattttcatctggggggctgatttttagttttgcttgatttttagattatggagctagattcatctaagaagaatgctgataaggaaggttctactacaagagctgatggtatcaggtaaatagtagctcaatttacaaatttatttcttcatctcttttatataatactcctataataatgaaaaaatgaattccccactgaaatatgatgcaggactccgatggtagagctaattgtagatgagcttacttataatagggatattttccacccttttcttcattttccacccttttcttcaggtaatcacctccacttcctgcaacttgttttctttttgtccaaactgttcgtgcatagtataaatcagtaaggtgttgagacagctcttttgtccaagttcaattttatgtgttgttgtgttaactttcttatggttacaattgtgtgtgataatatttgatggcctttcaatatttttcttactggtttaggaacaattaagatttcatcttattctaaataatgaatttgctgtgatttgttaccccagttttatggttatttgtataatgagtttgtagtagttatttttctctagaagatatataatttgccaagaatgtggttaccagcagccaaacttgggatgttttgcaggtatacgatgatcctaaatggaagcttgaacttgttgtgctgtatctttggaaatatgtgggaaaggtaagtgagttcttggagtgtaaaaagaacaaagtagttaaccattggtaagactttcacatacattggccaaggacatttcttctatggtgattggctaattgctgttgtttgttaatgtcgtcctatagtgctactgttttgttttaatgataaagtaatgtttttactcatttgtgatatactaatttaccttgtatcattactcttgtaaccaagtgagggttttcctccgccaccagtgagggttttcagtatattttgggtaggggccagtctaagacaatggcctctgtctcttttttttttaaaaaaatttaccttgtatcattcaatgttgcagccttctgtccgaactcgtaggtcaaatggttctataggtgatacaacatttggtggagcattgaagtgcttttcagatgtcgccggcacaaaaagtgctattaaaaaaatagggactgaagtaattcagttactcttagtacatggatttcaggtgattgctcttgctctttatgtatctatatgtaccatttaatatgtatgcaaagcgatccctatactctatagcatgcaattgctttagaccccacaactactctttgttgtactcgttaaaattttgtaggatgactgggaagataaagtactacccgtgttgctaaacacatctgtgttaaaaaaaaccggagttattgagaagattatgttattttaattataattatacagatcactttttttttcaatggaaaattggtttctgccgactttccctctcctgttaagcccagatggttactttaacatgtaaaagttttgaaccagaaccctaatcatctgataagccattctaaattttctagtattgtgatacacccagttttaggtccttacc

SEQ ID NO: 220743 - DNA, 3353 bp, Cannabis indica
tttttaataatatttctgtttgttttacaatatttttctattaatggatgtaataacatacttttttagaattgatacaaattttaaatattctttccttcttttcaagcttttgttgttttcttcctcttcaatcaattaaggcactgaaatggttcctaagaaaatcttattatacatgcatcaacttttaatatgataatcaacacctaataagaaaaaaaaactggttccaatatatttatttaagcacctttcatggtaagaaaaacaaaacttgaatgttatttgatactaagtgtagtacgaagcttcagtacatttttaagtatacattaattctcgtaaacttatattcagaataatattattctgagaaggaggttattcatttactcacaaattttttattagaatttgaaatgaaagagattaagataaatggagttccattgacaatggaaggaatttattttatgtataacaatttatttcaattcattaagaattttcagatgtctatttatagtaaaagtaatcaaatgaaagggcatatttagaaaaaagtgaaagctgctatgaaagccctttctcccaaaacgtgggaaaggggataacttttgtaaggggaagaatcatacacacgagtacaatgcatgatctagttgtagaaaatttgaggtttgaccttacaagaagagcctagatgaacaaaattaaagcacaaaacatgtccagatttttaacaagcaaaaatttctttggcatttacttgagcacatattacattatacataacacccttactagtgatgtatctatgtcgatgataatcatgatacactgataaaaagcatgggttcccaataccataatgacagatttacctatctacaatggcattatcattgtcattttcactgcttcacttacttcatgaagaacataaatgaagatacatattatggagtaggcaaaagaaccgaattgggaaacgatacagacccattattgggagcaccatttatgttgagaattgaagtcaccaagttgtaaatctgaacattttcgaaagatggaatcttcttccctcttggaaaccgaggaccatggccaacaaatatggttctcatggaaaatatagcattgtcataaccatgagctccaccacactctttctcgttggttctcttttgttctactttaaacccttcatcgagtaatccaattataggtggaattcgatcactagcagcataatgaagcctactgggaagctcctccttaagataaactcttaaatgctcaccattccccaccctcctagatttcaacccttcattcattttcttgaccacgtcagatggatcaacgccttgagatggacgaattgcaagtaatggagtgtatgactgcacccaatccccagggatttcaatccaaggagccaaatcatcgagaaatacgcaattttttatcacatgttccaaccattccatgatcaccaactaagacttatattaacatcttcaaaaacacctcttttctctagaccagtaatcaacttttccaatacaagctatcaattctagaaacagcttcagtgatcagaggatcatcaggcccaacttagatgaccctgatgatcaggatcctcaaaataaagggtcagtaaatacaggaatttcactagtgggaagatcaaaataattcaaaatagtatcaactcgttcctcaaatggaacagaaccattatattgttgacaaaacttttttgggcaagttccaagaacctttaattacctcgagaaccaggccagaagtaggagagcagcctttaaaccatgattggccacagtctcccacaacggctcgcctaaccaccacttgggctcgtggctggccatggtgaagtagtccccgctatttggatccgcaaaatggttattgattataccatgataagcagggtaaagaccagtgacaatagagtaatgattaggaaaagttagagttggaaaaaccggaatcaaacccaattcggcttcagtcccattagcaatgaggcggcctatatttggagttggggtcttgaattggtatccgaatcgaaacccatctgaggagatgagcagaaccaccggatgatcgagtttcttgagagggcgagccaatttttcagaatccacagcggaattcgttcggatcgtcgtgtttggagccgagaagaagaggaatgcgaaagctccggcaacggccagggcaacgcaagtgacgaggagtagggagatgaaaacaatggtggtagtcgtgaatttacgagaaggatccttggaagaaggagaatctgtgctgaaagagagaagagcctccgttgggtttggtgggtcatcttcttgggtctgaagtggtttaattggggctaaaatggagggtgaatcagaacccatactatgaaagttggggttttgagttatgggtttggatcacaaatgtgagaaaatgctgggtttgaagtttgaagtggaatggaagagtttagtggaagatgaagatggatttgaggaacagcaatggaggaagtcaatcaaagtaagagtttggtagacagaggggacgagttgttttggctgcaaatctggatggacggtcaggactaattgaggaaattgcttcgttacggtagtattgtggagctcattttacatatctgaaaccgtccgcatgtaataattaagaaggggagcaacgtgttggcgtggacaagcatgatttgctaagctgtagtactctacagatggcaacatatagaagacatctccaatatttagcacgaaagtaatgtaaaatgtaaaaattgagttatattttgtgaaaaaaaaaaataattttgtaataattttaaaattaatttaatgtaaatttaatatgttatggggtgattttataatgcactctcttaaaagggatacactaataaactctctacttgtttcggcatgcagaaaaattttgtagtttatttttttttttcatattcatatacattatagttatttaagatatcttacaaaattttaaaaaaattggaataatttacaatatggaaaataatgttcaaacaatctattttacacgcgtataaaataaaatagtcacgcgtgtaaccagtgacgaagccagaaatttagttgagtgagggcttgaataaatattaagtcaaaactaataaaaataatgataaatgtatctttcaaattttcatcttcaacaaaataaaataatactgttgacaaaaataaaataaaatattgtcaatggtattatttattttttaataaagtattattttt

SEQ ID NO: 220744 - DNA, 3059 bp, Cannabis indica
ccaaggaagacacaatagcgagaagtggacttcctatcataaatagaacttgcccaatctgcatcagagttggcaactaattgaaagctttgtgaaggctggaagtgaagaccgaggtcacaagtaccagccaaatatcttagtattatttccatgaatcatgggagtgggagtaggagcagcttctatcatattggtagatctgagaagatcccttatataattggattgagtaagataaattccattggcatttcttgtaacttcaaagcctaagaagtagttgacagagcctagattcttcaaggcaaactgtttgatcagtaatgagtttgtgaatttgggcaatatcttctcctattattagaatgtcatcgacataaactaggagaagtaatagcttgttgtttttcttggtgaaaaagaaagatgtatcaactttttagttgtgaaatccccatcgaacaatatatgcatttagcttgttgaaccatacccgaggggcctgtttaaggccatagattgctttattaagcttgcaaacatggtttagaaatttagtgcttttgaagcctaaaggttaagtcatatagacacattcttgaagcttcccattcaagaatgcattgtttatatcaaattgttgtattggccaattgttactggtagcaagagagaaaatgactcgaattgttgatggctttaccacaagactgtaagtttcaaatattctaagccaggtgtttgttgaaagcctcttgcaataagctgagatttgtatctatcaactgaaccatcagagttatatttgatgtgatgcacccatttctttgttaccacattcatttctggggaataaggtactagaatccaaggattgttgttaaccagagcataaatttcagtttccattgtaggaaaccacagagggtcttgtagtgcagccttgacggatgtaggttcaagagaaaccttagagatggcagtaagggcatttggtttgattatgccatttttgatcttgttgtcatgggatgtgtgttattggaggcaattgtaggagggtgaatttgcaaaccagaaactagaataggggtgatgaggggtggtggttcatgatcaatttctgtgtgagtagcttgggtgctaatattggttgtaggtgctggtgctggttgacttgtggagggttcagtgggattgagaacaggcttatgtgtaggtaatggggataggggaatggatgagggaactgtttgagtaacaagaacagtcattgtggcaataagttctggttgagtgaatggagtaggtattatgtatataggttgtgtgtttgggttagagttgtaactggtggttgggggtttaaagaaagagttgtaggggaacttttgttcatcaaactcgattgttctagctatatacacacgaccagaaggatgcatacacatgtagcctttgtgtgctgtgttataccctaaaaagaggcactatgctattctaaaacaaagtatgtgactttgatatggtcttagaaggggatagcaagcacaaccaaacacttttaaaaaagaataatctagttatttttgattgaaaagtacctcacaaggtgtgttatgttgtaagatgggtgttggtagcctgttgatgacataggtggccgagagaaaggcctcccaccaaaaactcaaaggcatttcagcttgagcaagtaaggtaaggcaaccttcgacaacatgtctgtgtttcctttctacacgaccctattatttgtgtgtgtgtgtggacaagggtgcatgaactcaattccatgattctgtaacaatggttttaagggtctatatttttttagaaaacatctctcaacataggcattaaattatctgaaaatagtagtgacttcattttttgttgtcataggaaaaatctaagtatatttagagtaatcatcaatgaaactaacataatagttgagaccccatacatctaaatgaacaggctgaaaaatagaatttatctttggtacagttcttggaaaagacatattatgaagtttgccaatttgacaagcttcacaaaaagaaatgtcagaacattttatttgaggactaagcctatttacaacagtttttaggactctagataaggggtgaccaagtctccaatgccaaagtcgagagttattggtagcagtgtgtatgttcttggtgcaattgaaagctcctggtgtgccaagaaattgagaatttgcagaagtagtaaagcaagactttagagagatccctgttatacatccctcctttaagagtaccccaaaaaagtacttggcacgtagtcttgtccttgataaaacatgaatcaaaatcaaaaagaaaggttatgttattatgtgttgtgatttttgaaatgcttaacaaattttttgtaattttagaggcataaagaatgtcttttaagactatattaaaaacatttgttggaattgaagtggaacaaattttagggatagggataatggatccattaccaactgtgattttggctttgcctttgtaatctgtagttgttgaaagttgttgcgtgttcgaagtcatatgatgtgtggctccactatcaacataccagccattatcatcagttgagggagtggaatcaaacagcaaaatttggggattattaatgttagaaaatgggtttaaagttagatttgcaggttcagtgtcatatttgtgataacatttgtaagcaagatgcccaatcttgccacagatttgacacacaggacgatttcctcgaccacgtccatctgaagcaccacgagagggaccatttgtattgcctcgatttgaaggttgaccatgaccatgatagtttcctcgtgaggaagactgacccctgccattggatgatcccctgttttgaacttgagtaagattggcttgtggaagatcaagagaggacaaatgattttgttcaattcacatttcttgattctgtaacatatactgaacttcacctaggatcagaggatcaacacgagcagttaaaaagaa

SEQ ID NO: 220745 - DNA, 6195 bp, Cannabis indica
gtgtaggtaagggcaaggccaaagctgaggagccgtgagaacgagcaggtgaagattgtacatgtcggggtggttagacctggagcgtacgatcttaggggacaccaaggctttcgttgacagtcgctaggcgacaaaacttttgtatatgtgtatagaaaacttttataaatgtgttttgtaacaagatcactacaagaaatcttactttcacctacaaatattttttctacaaatatatatttgtaggtaaatataacttctatctacaaataatttatgtgttataaaatttgtaggtaagttactcataattattttcatagggagtttcatatatttgttattaatatatgtgtagctaaatgatttttcattggtgggaatgctattttgatttggagccaaaagttgccgccattcaattgtgaaaaaagataatcccgctccattgaatagtattttagatttatttttatttatttttgatttaatattaatgacatgtctgccaacatagaaagaaaatgtcacatgtggatagaaatgaccatctcataccataatttattggccatgtgtatattttttaattatgtgtcatcagattaaaaataatataaagataaacatatataattatatacatcctcttttattctaaaagaatcaagaattttaatttaccctaaatcattttcttcttctttatagcctgccctcttttttcaaagttcaaaattcgccatcgtttctcaccgtgaataactgtgtatcgataccctaaatttctttcttcttcttcgcagcctgtccctaattgttcgaagtctgaaattcgtcgtagataagctgcatttctttcaaactcgagacctttctctcattgtaagtcatgtttctgttagtttcatcaaaagtttttttttcatagatttgggggttttgagtatcaataaagaaggatacatcaatatgggagtagttgaagacatttccttctactcattagttttgattgtgggtcatattaccgtatcttataaaactagctatagagaaagatctaaaagtttttatttggcaaattaacattgaagttgtgaatagttctatctttaatccttattttttttgtttcttatttactaattttctgcttatgtgcttaaataatcgttcaatgattgtgcaagccactagttattatactacaagggagttttaaaaaaaaaatagaagagaaagcattttgaatttctatctatgtaagaaaaatgtgagtcattatgaattttgtacgattgctgaaactttgaattaatgacaaaaaaggatagaagggacatgaatgtttcattctttcatgtgaaacattcatagatagttaccaaggcaagtctaatatttatttatagagtactaacttgagttctctttccttttttttttagatttattgtaagtaatactagaagatttttagtttgtatttgatctcgaacatatgagatcgtcaagtggataacacagtccataagaaatgagaaaggttaggtttttctttcatgttttgtatggatttttaaacttttggtttgtttgaagttgagaaagtaacaatgaattgcagggtgggtgattttatagtcatttaggataatatttgagtttgtaattcaccatttgatccttctgtttgtaaattatagcaaaatatcttcttatcctaaattgaatttacaagcactttcagtattaaatgagaaacacaagcacttgccactttagtgttgatcttgataaatgtacctttcactcatttgttgcatctcactgttttattaatttattttaggaaagagcactaaaaaatagtaataatcgatctaaaaggaagtgggaatcaaaaaatggatcagtctctagtacaccacgacatcacatttgacgtggaatggacttaccttttcaaattgagacatggcgtctgaaacattatgatatggagaaaggatggactggaccagatcttgaggcattatatgtaagtaatttatctattaaagttacagttctcataagttttatattattcgaatactaaataataaaaatacataattagaatgaaatgaaagctttaagggatcaacacactcctgaagagttgtcttataaaaatattatggaacgtattcttgggcgtcattctgtatacttgcgagggtgggggcagtcttttagtggtacaagttctacttcagagcatgatactactcatcccgatcgtccaacatatgaggaattagtccaaagacttaatgaagcatataaccaccttgatactactaatgaacaacttagcattgttgtaagcattcttcaacataacaatcttatgcctccacctcatgtgcctccatcggatcaagcttcaggtgcacctaataaagactcgcttgaaaatcaagagcaacaagatgataatttgtttatattttattttatattatttttaaaaaaaattatcaaatgttggaccatgaatattgagatttgttatttttgagttatttatgaatgaagaaaggataaatcttattattattattattgttacagtgtatttatttaattaattataagaaaattaattttatttaggataatattctacctatacttgaatgtatttgtctacatttgctaatatatttatttgcacatactaatgccttaacttacacataatatcagctacagacacttggccctcttatatttatccatgttgtcctatacaattctgccacatggcacttgatatatatatgtgttcttataatattttgccacgtgtacctttcaaaatttgccacattggcctatcaaaatataccatgtggacctactagaatatgccacgtacgtataccaaaatgtgccacatgtgatagcatggcctatgactaagctgacacgtggatggccacatatgtaacatgtcatcctgtgggttgtcagctgccacataaaacgacacatcatcatccacatcacttgcttactcatcatcattgactaagaaaggtgggatccaccatattttcatacctacaaatataattaattgtaggtgaagatctttctccacaatcttttatctacaaataaaaattatttgtttatttgtaggtaaatctgcttgcctacattttggggagttttacccacatttatggtttgtaggtaatggccctattttcttgtagtggatcccgggattttatgaatgtaatactttaagtcttaaattaaataagcaaattttaattattcacgattttcaataatctcgttgattagcatcgagctgcacagtatgctaaaaatcacgctaacacgcctatattagttaggttgttacaaatgtcatcaatggcgagattcgaattggataagtttgatgcaactggagacttttcgctatggagagaaagtctaaaagaaatcttagtgcaacagaaagtctccaatgttcttggatgagaagttattggcaaaaaaaaccagaggaaaaagtagaaacggaggagatggtgtactacacaatcatcatgtgtcgatcaaacagtattcgaagaaaactcatcgtagaaaagacagtgaaagaagtttgggataaattggaagaattgtacttaaaaccatcgataactagtaagattaatttgctagaaagattatacggtttagaatgattttgtccctttctttagatgagaatattgatagatttaatgagattgttgtaggtttggctaacataaatcacaaggttgatgaagaaagtcaggccatcatcctgttgagatcacttccaatcacatattaagaagttaaggcagccatcgtatagcagggatgttattgcattggaagatgttcttgccacacttaagtcgaaagatttcgaattacagttgtagaaggaatccaagaagaataagtgtatttggaaagagaaagatcacccgcaagaaagcaggtttgaagagtaaacaccatcactcttaattttgatcaaagtccagagagaaggaaaaaaagaaagtgttgcttctatggaaagtctggacacttgcaaagattttgcaagaagtacaaggagcaacaaggcttcaacaaatttcaaaatggagataggaaagacttctggcaccatcatcatggaaaagactctgctgcaattgctgaagatagtgatgactgctccatggacggaaagctgctctctatctcagagtcttcaatgaacagggattggattctcgattctggatgcacttatcacatgtgtcctaatcaagaatcattttttgattataagtcagttgatgaaggtaaagttctaagggtaatgatcattcatgcagggttattggaactgaggaggttgccatcaaacagtatgatggtggaatcaaggtgctgacgaatgtaaggcacattccggactttacatgaaacctcatatccctggttgtgcttgaggacgaaggatacagatacaagtccatgaacagaagcttgaggatcaccaaaggttccttagtaatgatgaaaggtaaaaagattaatggtttatatgttctccaaggagaaactgtcccagttggtgaagctagtatggtgaaagggctagaatcgaatatgaaggtgtggcatcacagacttgggcatatcattaacaaggccttaaagaattgcacaaacagggtataattgaaaatttaaattcttgtgccttaccattttgtgaagcttgtgtgttagggtaacaacataagttgaagttcactctggcaacacacacaactaaaaggatacttaattatgtgcacgctgatctttggggaccatacaaggttcctactaactccggtaagaaatactttctttcaatagttgatgattatagtcgatgtgtttggacctacttgttaaccactaaggatgagtttctggaatagtttagaatttggaaaattcaggtggaaaaccaaaccaatcttaaaattaagaaccttaggaccaataatgggttggagttcgttaactccgaatttgacaatatgtgtcaagtatttggaatcacttggcgtaaaattgtagtgaagacccctgtgcaaaatggtattgttgaaaggattaactgaaccttgttgaacaaagttaggtgtttactgattagttttgggttagaaaaaccattttggggggaagccttagcaaccgcaacttaccttgtaaatagaagcccaaatagagttatagaccttaaaacaccttatgaaatgtcgtacaatagaatttccagcctaacgcacttaagaatatttgggtgcactacatatgtacaccaatccattgacaagctagaacctagatccgtgaaggaaactttcctaggttaagacttaggaaccaagggatatggaatcttcattccaagaagggtaaaccaaaggttgtgattgctagaaatattgttttcaatgagttagaatatcctcacttgacctccgagaagggcagtgtgtctttgtgtgttacaggaaaaatgggaaacaaagacactacaagtgtggaagtggagtacaaaatgaagctcccaaaagaaggttcacgagtgggcgaaagatagcgtggaatcggaagacaatgcacagccagaagttgttgtggagacagaagaactagataacaaaaaccaaatagaggtgtcagaagggcttggacatacaggtctagaaggttatcaattggctcgtgatagaacctagagagagattcatcctccgataaggttcgcggaagcatacataatagcatttgcactggaagtagtccaacaaactgaaattgaagagcccaaaaagctatgaagaggcaattttgggaggaaacaagtctaaatggctttaggccatggatgaggagatggattctctaaggaagaacaagacttgggtagttatgctatagccagagaacaagaagattgtggagtgcaaatggattctcaaggtgaaagagggaattgatgagaatgaactagtgaggttcaaagccaggttagtggctaagggttttactcaggtggaaggtatagactatactgaaatcttc

SEQ ID NO: 220746 - DNA, 1313 bp, Cannabis indica
tttttttgttctattacaatcaataattttataaatagttagaattttttggtattttgtaaagtatataactaaatgataatatttaagaatattatttataaattacatttttttataggagcctaaattttacattagaacagagcctccaaaatatttaagacgaccatgcatgttcagaactttcactatttttaattgaatcttggaccttttatagatttagtttataaatttaagacttaaatagtaattttcaagaattttatgactttgttatggtgtgatatgttttttgtttattagagttagtctcacattgctaatgtgttgaataaactacccatctcattattaattggttttgagatagaacttgatgtaccttagccacttttattctacattctaacatatagtatcagagccgcttgtgatctgttgtgcactcaaagtgccaccgacataaaaagatgggtctttgagctatttcaaaattcacaaatttcccggcgtgtacacacgtttcggccagtgtgtatttattagagatagtcccacattactaatgtgtggaaataaattgtcatatataagatgaatgagctactcctcccattgccaattagttttgagatgaaaccccattcaccttatgtcaaattctaacatggtatcagagccacttgtgatccgtcgtgagctcaaagtgccaccggtccaaaaagtcgtttccctttaacttctatttaggacatttcgaccaatgtgtgccagtttcggtgttggggtctttgacctgtttcaaaattcacgaatttcctaacgtgtacacctacaaattttctgatatttggccttatgggattctttcaaatgtcacattcggtcctgtggtctcttaaaggtcgatctttatacctacacttttcaggcccatatgtgaggagagtgtattagacttagtctcacaatgctaatatgtagaaataaattgccatatatgagatgaattgttggaactaatttgtgaaatgttaaaaaatgatgtgtgtgagtaggagttccacatgggatagaaacacttcatttgaagtgtataactagtgcaagtttgagatatgggtttgggccctaaggggtacctagttttgtgtgcatgggtgaggactcacacaccggaccaccaaacacgcgcgcgccgctgacactgtccgtccgaccgagccgagccgagccggcgggtgtggtgtcaccttattttttggagaaaatttatttcttatataaattattatttatttaattaa

SEQ ID NO: 220747 - DNA, 1335 bp, Cannabis indica
aggcaacaatcttcctctcgaaaaagaaagcatatatcagatgtagtctcttccagattgacaccctctgcgtgatatatgaaggtacgcagcgatctttttctagaacaaagcctaaatttaacccttttggcaggtttgtgtacatatttatattatatgcaagttattttggattacttacttcgcaaaggatgatttcttaggacatttttcttaagagattaggtggaccacatgattagcagtgttactggtatcgaatgccttaaaagtacttggtacttcatttttaacctagcgaaataggaacgtagatttgtgaggagtgatgtgcttggtaaagttagaaaaagggttgcaggcatcaaaagcaggagaaattataaactttactcctaagtccccaacaaagacaaacttccaacccttaagctgatcctgattgctagatccatcatccatgtcttccattgtggtttgatctttccatccaccagcatcttttatggcttggattcgccacacttgcagttcctgtaaatgtattgtgaagacaaagtacatattcatagtttgatttcatccctaaattaaaggaaaaacattgatgcggtttactattgaatccaaagaatgaacatgttgatgaccccacttcttgctcaacattgaagtgataatcgagtgacatttccccaagtcagagtcattagacattcatcaacattcattgtagagtaaaagaaaacaaattcaatttttaaattattagagttagtcccacattgtttatgtgtggaaataaattgtcatatataaaatgaataggctactcctctcattgctaattggttttgagatggaacctcattcaatttattccaaattctaacatggtttcagagctacttgtggtccgttgtgagcccaaagtgccaccggtccaaaaaactgtttgtgatccgttgtgagccaaagtgttgccggtttaaaaagatactgctgctatctcccctttaacatccatttgggacctttcggccaatgtgtgccaatttctagtgttgaggtctttggcctgtttcaaaatctacaaatttcctgacgtgtacacatacaaatttcctgatattttgtcttgtgagattctttcaaatgttatgttcagccttgtggtctcttaaaggtcgttcgttatactcatactttccaggcccaaatgtgaggagggtgtaatagagttagtcccacattacttatgtgtggaaataaattatcatatataagatgaatgagcgacttctcccactgtcaattggttttgagatggaa

SEQ ID NO: 220748 - DNA, 8044 bp, Cannabis indica
tctatagttatggtctctaggaaaaatggaggaaaataataaaaagaaaaaaaaattaattgtcaggaatagaaaacaagtatttcatttattcaatctcttttgacttttgctgagttaatagaactctttgatgtaagcgtgaatatatttgtcttgtttgtcttttagttcctaaattaatgtataccatcaggtttcaaaaccaacggtattatttttaaaaatagcggtattttgaacaataaaataccaggaagcaattttgcaattaaaatgtaaattgcgctgcttgatgtaaataatccttaaatattcccctcaactttttatttttttttttaatttttgtggtaatattcctctcaaatttgaatgttaattaaatatgagtgtttttttttttttgtttatataattctcacactcttactactgtgaagtcaaaaaaaaattagaagaatattctaattttcttgtataagtataataatatggttttaatcactatatagatgcacattatttcaacacattaatttaataatgtgtaattattagctaatatataaatatctacttggagtgattaaaaactaaaaatatgacttactaattttcttagcacaatatttatgaaaataatgtaatttatattaaactataaaaaaattatataaaaaagataaaagttaaataattaatttaatttgaaaaagccaaaaaaattatggcacttttatatagttatagattaaaataaataaaagtagcttgttttatataggatatatgataacatgattcatcagtaggttcgataagatccatttacatttgtcgttttcgtatttccattgtgtagttaatatcattgaatgatgtggatttatgtgagtaatgacatcgaatgtagcattgttattattatttttttttaagggaaaatacttatttattattaaacaattaagattcgtttacaataattgagtaaataggcggaggaataaactccaaccaagtacaagcctcatccagccttaatgcaaatttagctagtccatgtgctgcattgttagcagtacgatagacatgagaaacacttacatttgggaaaaaggataaaagactaagaacatcactaattaaatctgagaattctgaatttgaattgaagggagctttcaaagcatggaccaccataagagcatctgtctcaatatgtgtaattggtaattgttgttgtagagcccaattgagactatgaaaaatagctttggcttccatctcatgggatttaaaatttccaattatcggcatagcaagagcaccagtgacagaacctaaagcatcacgaagaactgcaccaacaccaatggtatttgaagagttctcggctgctgcattcgtgttgagcttgtagcaatttgcagcaggtggacgccaagatgataaggcagcagtagcagcaggaggcttggaaggctgctgtgaaggacctgcaacatcagtagcaacaggtgctgttgctgcagcaactggtttgtgttgagccacacggaaattctgcagaaaaactgttgcaaacacggccaaatcattcgcacgtctcgcattcttaccatgaaccactttgtttctctcaccccagattgcccacatgatacaaaataattcttccatttcagctttgttgtaaattgaggaaagatacatcaagtaatccccatttttcattgaaatagcagctgaccaattaaaattgaaatggaaggatcgccaaacagccttagcatatttacaaccgaaaagaagcatgtcctgtggattcccatgcttgtttgcagatggaacaagtggaatctgtgatgattttcgtcgaacgagcgatgtagcaacaggtaaagcatcatgaatgacacgccaagcaaagatcttaaccttttgagggatttggagtgaccagaaatgtttccaccactatacagccgaagtggagctgaagcgcttaggcctcgttttccaacgaagtagcaagatgataagcactttggactgtaaagtttcccgaggagtgatgatgccaaatcagtttatctcttgaggggaagaagctcaatggtaaggtgagtatcttttcaatgtcaagaggacaaaaatattgttgcagcaaaggtatgttccattgtctctcatcagtgataagattagccactacaccattaggtggtcccgaataagtaatcgggagaaaagatgaatgactagggagccaaggatcaaaaccacttcgtatagatcgaccttcacctattttccatctcaagccatgagctaacaactcgcgaccccaacgaatcccttgccatgtaagagaaggagaatgtcccatacttgcctccaggaacgagttgtgggggaaatatttgctcttgagaagtgtactaaggagtgaattcgggtactcaacaatcctccaagcttgcttagcgagaagggcttgattaaattgtataaaagatcgaaaacccattccaccttcacccttagttttacaaagcaaattccatgagcgccaatgaatcttagagccattttcattcagtccccaccaaaaatttggccatcatactttcaagttgattgcaaaagtatactggcaaacggaaacaactcatagcgtatgtagggatagattgaacaacagctttaagtaggacttcccgaccccctgctgaaaatagtttttcactccaagattgcatgagtttccaaattctctctttgatattactaaaaagctccctcttatcccgaccagagtaggatggtaggccaaggtatttctcatgacactcactaattggcattgagaggtggctatgaaagaaaatctgggcagccagtgtagtgtttggagagaaagacataacagatttgtcgcgattgatgaattggccagaagctttatggtaagtatccaagagcctcttaatagctaggcatgaactctcatcagcttgacaaaaaaagaggctatcatcagcgaagagtaagtgtgagatcatgggcgcccttcttgtaagtttgaaaccatgtaaattgccttggtcttgctcatgttgcaataatctagataagccttcagcacaaattaagaacagataaggagataatgggcaaccttgtcttaacccccttgtagggatcaaagatcctgtcacttcaccattgacaaggaatgaaaatttgttagtagttaggcaactcatgataagtgtaatccgaccactagcgaaccccattttcttcataacttcttcgatgaaagtccattcaactctatcaaaagctttactcatatcaagtttgagagaggcaataccatggcgcccagatgtcttattcttgatagcatggactaactcaaaagcaaccaagacgttatctgtaatcaagcgatttgctaggaaggcactctgagtctcagaaataaccaggggaagcacctccttgaatcttgcaactatcatttttataaccagttttgatatgacgttgcaaaggctaatcggcctaaagtccttaacatggtgcggcttcttaattttcggtatgagagtgattagagtgtgattgaagcttgaggggtcagcaccattattaagaacattcaaaaccgcacgagaaaccagatcaccaacaatggaccaatgttgttcataaaacatggccgacatgccatcaatacccgggctcttatccgcactcatagtcttaagagcattctcaacatcaagcattgtgaaaggagcaagcaaggactcattgtgactagcagttaccatggtggggatacagtccaagtgtgttctcaagggcaatagcatcaattggaccagcagtgaagatatcagcataatagtcatggataatgtaagaaatctcagcattagaagtagccttatcgcccgctgcattgtagaggaacttaatgcggttgttggtcttccttgcattagctttagcatgaaaaaacttggtgtttttatcaccacaagcaagccaataaacacgggaacgctgctgccaatacacttcctcttgctctagcaactcatctaggatggattcagcatgcttgagatcattaaagtgagtgtcggtttgggagggagagttattgagccgctcgactttggtttgacaagccttgatttttttcttcattttcccatactttagggagtgccattgttgaagcttttcagcacaaagagtcagattagccatgacagcagagatcgggtcatgagaatcaaagttagaccaggatgctgcaataatatctttactttcggggtcggaaagccacatcttttcaaatctgaatcggcttttacgtttgctgttgctgatccgagaagaaagcaggtggaaggaagcactaacggcgcgatgatccgattgaaagtagtccaggtgacaaacttgaggattatcaaaaaaggactcccaatggctgttgacgaagcaccaatcgagacgttcttttaaggtgttgggagcagtccggtttttagcccaagtgtatggatcaccatcaaccaaagtttctcgaaggcaacctttgtcaatggcttttcgaaaggcatccatttgagattcactacggagagctcctccggatttattattgttggaaaggatctcgttgaagtcaccaataacaaaccaagggagttgaggagccacgtcggcaagccgttccaataaagtccatgaagcttgtctattagcaacttcgggtgcaccatagaaacaagtaaagtggatagttgggtcgttgtcaatcgtcatgtagcaatcaaagtaagtaggacccatgtttaacagggagatgttcacctcatctttccagagaagtaagagcccaccactaagaccgatacgaggtgattcaagaccatttgggaagcttagagattgtcgcacacgattaatagagttactaggcagttttgtttccataagaaacaaaatatggggagattgctgtaggagaagcaatcgaaggtgtctgaatgcactcgggttccccaaaccccgtacattccagctgattattttcatggcgagttgcgggcttgccttgcaacctccgcagttgagtcatgggagagaatagaatcctcaaagtcggaaactagagtctcaatatcatcatctcttgacaaagtagaagatgaaattccttgtgcattgcgacatctcttcaaaaatttcctcatggataaagaatcattctgtcgtttgaaggtggtaggtggggactggttctcttttccaattgtaaccttggcctgagggtgagttgtttggtgctgaggaggcatgggaagtgtgggagatgcaaggctagtgttggtaggtgaggggtgagttggtggtgggtaggtagcataaatattagtgtggagatcaggcatgtagacatgggaaaggtcagcaacaatgcttttgtgggaagcatttgtagcaatagcagaaggtgaagagggtgttgggtgagtgacatgatgtggagcttgctggtgtatattgcaggaagtctcagaatgaatgtaaagtgattttggattgctatcaaagttcattttttgcttgcctttattgacaccagagttggccaaatgaaggggagaattagcattgatggaagaacctacaacagtgggaattaaggaagtggcgaatggctgagttggtaaatgggatattggagaaagaggcaattggcaagtgacagtgttggtggaaatagcagattgaaagggaggcattttctggtttgtgagtgaggtcacgggtaaagtaggcagttgggttggttgaggggttgtggaagaggcaagttgattattaggcaaggtgttggcatggttatttggtagggtagtaatattgggatgggttgagtttgagtgggaactaggataatggggagtagtaatacctgatgagggcgtggaagcaatgtgagaagtggtatgactgggcattgattgtagcatggtagtcgggtgagtaaagttctgatgcagagtgagtggatgttgagaagtttctccgtcaaagagtgtcggaggaggggctgagcgtctagtgtgcagtgccggtagtgtagatgttagagtagttcgagccaaacgtgtgaggagtggccaagcatttcctttagcaaaatcagtccggtatcgatcatagttgtgcgtaggtagtttagcacccttcatccatggtccatatgcaaaatcgtcatcattctcgttatccatacgctccatgaaggcaatacaacgttcataaggatgtcctagacaaccacattcaaaacagaatttcggtagcctttcatagcgaaagtcaacccaaaactcatcctttattttgggcagccgaatcatatgacctcgcaagagaggtttggtagtacaaagcttgacactgactcgtaggaaggggccccaaccttcatttgttgaatcatcaaagacttcaataaactccccaataatgttaccaagtgcttcagccaacattttcgttttgctaagaaagggaagccgataaatttgtacccaaaaaggagtgaaaactaagtcctcctttgagacattttgcagagcatctggcgtgcgaagaataatgagatgattctgaaagtgccaaggctctttggtaaggactcgtcgtttgtcaccttcacaaccgaacttaatgtggaagagcccatcatctcccttgtactcagtgattaaaacccggaagcgtccttgccaatgaccagacatttggtcaatgaagatttgcttataaacattctggtgtgtaagaaccttggcaatcaaagatggctggtgtgcttcaacattcggtggagtgtaatctggaatacaaaaaatggatctttcctcatcagtaagggaaagagtggaactgatatcatgcgagagtgaatccatggaggcaggcggagaggcagagaacgatggagaagatagccggcgagaagcagggtgaagttggagggaacggttatggaaggaaaatttgaaaggcaagaggaagatgacagttaaataaaaaataggtagttaaaatgacagcaacggctacagacccaaacattgggcacattcaaaaacttataaaaatttaaggtttcataatactttagcattgttattattaacagtggtacttattactattttgaactaaccttctctcattagttaatgatattttatataaattatattaaatttgatatttaattatattaataacaatattacacttaaaaaaatactaaataataccgatgtattttagtatttctctattgaacgggtactataaacaaatttagtactatttacaaagtttgatactaattatatgtaatatagtaaaatttgatttttttatgcatcaagatagactctaattccaaaattacttactacttaactcatgataaaattatgatatttcagcgtattcccaaaataccagtatcatttgaaaagtttatttttcacattaacctaatgttgttccacactagccaccaccaccattgtggtcttccctctccgacaaattactactgggcttactctctctgaggaaccgcctactattgtctcattcaataacatcaaatcataatccatttacgaactcttaaattgtaattctagttgtgaacccacaaattgtaatctcaatcgtgaactcccaaatcgtaatcccaatcgtgaactcccaaatcgtaatcccaatcgtgaaccccctaaggatctttgatcccacgcttcagacccaccaaacctcggcagtggtggatccatgctcaaattcatataacgactctattttgttgaatataaatatggattttattgtgtttttttgagttttacgcatcaagcactatcaaatttttacaagcaaaaaatgcaaaaaaaaaaaa

SEQ ID NO: 220749 - DNA, 2257 bp, Cannabis indica
atattatttagcatttctctttcattgttatttgttagtaccgttatcataaataaacagatgagtatttctcaattgataagcgtacatatcgatcaatatatattgtaacccttacataaatcgtcaacaaattataatacattaattatctttcttttttattaccacaatttattatttaacaaaggaatatattttccaaaaagaatatatcatttcgaatatgatccacaacattattattcatcacaaactatatatagctagtactaattcttaatattaaaaaaaaaactgtagtcctaataatatgaacagtacttatccttaaagttagtttgcatgtgaaatgggactaaaactgtctctttaaattttatattattcatcatcaattaaaaactatagtactaatagtaatatgaacagtacttatccttaaaattagtttgtgagatttcaaaacgttctatatcggttagctgggccccgcttgatcaatatatggatggacaaacatattggtaaaaccctagttagctactttaggaaaaaagatatatatacaggctatatatatattttatataacacacaaatagcctatatatatatgcatatgtacatgtaacaatcctcagaaatattattatatagaaacaaaacctatatatgtataataaagatatgtatattactaataataggtaataattatatacttcgattatttatcttacttctaggctagctttttcatcaaaacacatgcaacaactgaagaagagtataataagaagaatccaagggaagcatataaggagaatcaagtaagttaagagagttcattttaataatcccatgtagaattttgaggtggattcctaaacttttagatacaaggactaaaggacatattggccaaagcaaaacattagcatgttttggaatttcacaatgaagaaaattctctgccaaaccatggggactggatggtgtctttgattatttttaattattttttttttactttttctactatatataagacaacacaaaaaacgaaggtgtatagcatggaagtaaggaattaataataataatgttaccatgtgctttagatacccatattatagataatttattcattaagcaattgttttttgttttgtttcatactttgcattttaattaagtatactttatcccatctaataataacaattaggaatattatacatataagacatatcacttttgctcttgctatatggatattttctatttcagtagttaaattgtatcattttttttatataacgtatattatagtaattattgttggatgtacaactaaaattttatattgttagaaatgagaagtatcttaggtatataaagatttaagaaagtgtaaaaaaataaatatagatggtgtttgatggtcttaacagttatcttattcattttttaaaaattttaaataatttacataaaaatatagaatttaagtcggttaaattcatgcaaatattttatacatgcaactcactgtttaaatttgttggggtatcatcaatgttctatattggaagaatagaggtaaaagagttgcctgaaatataagggtttcacttactttattagtgtaaggttttttaggaaggtacttataaaaaaaactgtgagaatttaagttcaaagcagataatattatactaatatgagagttaaggtgaggtatagcaactcaacaaggtgaaagaatggattccaataagtggtatcagagccaaatattcgggagcgctggaatagtgggatgcatttgcgatgcatgagagaagctctcaatgttatgacctcacgattgaagaattgtgccttgtatcgaaagtctatttgatattatggtggtcacacagtgtgtcccgttagattacagcggtacaagatggagatctatatacagtcccttgtgtcgaaggtcttcctgacaatgttgaacgtcaggcggcgagttctgttagtgatagcagccgtacaagatgattttgctggagagaatgccacgagtacgtgatccttggttttagggaggattattggggtaccaaccaaagtcccatattgtaagaatacacaagagtttacttgaatataagagttctacctacttgattagtatatgaggccttttcagaaggtgctcaaaaataaaatcgtcaaggcttaggcctaaagcaaacaatat

SEQ ID NO: 220750 - DNA, 1241 bp, Cannabis indica
aattttttcatattttctaataaacaaataaaaatttaaagaaagatcaatatatataagaaaacctgttttgggatccagtccaccggttggggtggttttcaggtgcctcaagttttgtgttttcttgatatttagttattaccacgctatttatcgataaaaaaacttctagttttaagtttaagttccccgagagtgatttagtgagtcggcttaccagttttatgtaaatgtgacgtatggcccctgattgtcgagaagtttcccacacagttgatcggcacacttaattatggaaatgatgtaagattagtataatgattatacatgcatacatgtttagtgtacatatttttatgattacctattagataacatatcagtaagagcggtattggtgtacatagagttgcactagataccgatagatatatgttgggcaatttaataagtatggcttgatgttatcacatcagtatgactagagtgcatcaatacataatgttgtcaagaacattctgttagggtttattctctaaaaagcctataaatatatttctgattattaaataaagagttaaacatttgatatgtgtatgaatattaaattgttaatattattattgaatgatttatattaaatatcataaaattccttattcatatatgaggtcgtggcttgtagctgtatagagaactaagaccacttagttatgaataaaatagttagcaacatatgaaagttatagaatcttaaatcaatagttgctagtatggttcactaatgtccattcttcggtgcaagcaatctcggcttggattacggatgtagtatgacatcaaagtgaaggtattgtatattatagagattatatatgaaaaagaccgatatgaataaagttatctttattaacatgtcatttatcataaagacctaattcatatcataacgatgatcaatagtagatcgacctaaatcttgagttatcatgaactcttgttcatgttattagtttctttgattcactcgttgaagtttctcagagaatataattcttacaacttttattttaggaatctaattatatggatggctggaaacatgatgtacaattatagaatcctgacttttctaacagatcgaatgttggttccctttaagtgttaatttaggaactggatgttatgcacaaattcaaatgggatcttgaattatatttccactagtgaattaatgg

SEQ ID NO: 220751 - DNA, 2427 bp, Cannabis indica
cagatctagacccaggcttggacccgactcgtattcggtgtttggatctgggacccagaccagtcattagaccaaaactcgaacctaaactaggacccacacccaaacacggacccagacccagacccgtacctcttcaaacgaaatgggaaccagaaatagactgagacccaggaataggatcaggaccagaaaacaaactcagacccaaaatcagaaccaaaaccggactaggacccggactcacaccctaataaaggctcgaactaaggcccagaccttggtcaaaacctgtaccaagacttgggacacgaacccaaacccatacctagactaataatacgtagatccaaacccatcacccaaacctagattggggacccagactcaaactctatcctaaacccagactaggacctgaacctcaacccgcacttgggacctataccaggactcgggactcgaattggaaccaaactaggaccttaaataggattcagatctcatcccaggacttaggaaatagggcttagacccaacccgtagtcggtgtctggatttgggaatcgaacaaggacctgaacccaaccccaaacatggaccagggcccaaaccttaacccgaacccaagagctaaaactagaataggaattggaattggaactagaactgggacactagaatgtgatcagggtcaggactcagacgcagaccaaaacccagacccaaactgggagaagaacctgggcttggacccaaacctataacgggatcgagatccggacccgaacttgaacctgaacccggacatgggaccctaaacttggaacctgggactcgtgacccgagaacttgactagaacctaaaccctgacccagaccttaacacagacaaagactgagacccaaatgcacgacccaagccccaatctcaagactcgaccccagacccaagacccaaatatggggcccgaaccaagatcaaggacctgaactaaaaccagatcaagatctggatctcgacccaggacctggggcttagacctaacccgtactcagcgtctaaatttgggacctagactaaaacctagacccgaacaaggacctagaacctggaccaggatccgaactcaaacccggacctaaacccaaaccaagacttggactctgatctaaacccaggttgggactcaggccccagacctgaactcaaaaccacacctaggacccagacttggattggtgacctacacccggacccagtactcagaattggataggttgggtcaaatcctcgagtccctggtccctggtctagatctacatctagatctcggtcttagatcccagttttgttttagtttgggtcctaagtctgggtttgggtccgaggtctaggtcgggggtcgtgtcccgagtcctagttttgggtccagctttgggtatgagtttgggtccaggttcgggtccaagttgggtatgagtttgggtcgtatctaggtttgggtctaggtctgggtttgggttagggtctgggtctgggtctaggtctgggtccaagttatagttcttgtctgggttcgtgtctaggtttttgtcaggttcgggtctccgtccagatctaaatcccagtctgagttctactctgagttcgggttaaagattttgtccagttccagttccacctccgggtccgtgtcccggtcctgctctatttattgttttggttgtagttttgggtccaaagttcaagtttgtgtccgagctcaggtgtgaatcctagtcaaagttcatgttccagtccaagtccgagttaagttttgggtctaggtcctaggtctcggtctgggtctaggtcttagtctgagtccgagtctaggtcctggtcttagtcccaatcccagtctcgatcttggcccgggtttgggtttgagtctcgttttctttttgggtccaggtttagggtttaaggttaagggattaagaatagggtttagggtataggaattagggtttaggatttagggtttaggggtttagggtttaggggttcagggattacagtttaaggttttgggtttatggtttatggtttagggtttagggttaagggttttgggattatggattagggtttagggtttaagattctgtgtttgggttcgagtttgggtcccgagtcctggagcgggtttggatccaagtctaggttttggtccttgtctgggttcgagaaggggtgttcatccgatccaatccacacttttttggtcaaacaacatccaatctgcactaagtgcggatttcatatttttgatccaatccgatccgcataaatccaatccaatccaatctgcaatagtgtggattggatcagtaattttggatcggttgtttttttaatgataaattatttaatattttata

SEQ ID NO: 220752 - DNA, 2781 bp, Cannabis indica
ttttaaaatttaaattcttaattcatccattgctttgtcatgatggttggtcaggttgaagcaattagtatcacgtttgtttattggttgaatataggagaagagaggaaagatttgtgggctgctctttcgggtctcactccccctgctaagccgtggctcataacaagagattttaatgctttgtttgatatggaggtcagggaagggggcaagaaagttactgtggctgatatagaagatgctaccaaatggttggctcaaaaccatatggaagtgcttctaaagactggttctaaattcacttggaccagtaaccaagaggggagtaagagaatctattctaagattgaccactcatttgtgaatgaagattggtttgattttttcagtttggttaaggctaagtacagttgggaaagtatttatgatcattgtgcttgtgtgatttctttgaaggtgaatgagaagattggttacaaaccgttatgatattataattgttgggctgatcatcaagacttcagtcatgtggttcttagtgattgggttaaaccagttagagctgatgggatgaaagctttatttctaaagctcatgagatcaaagcacaaattgaagaaattcaacaaggagacaattggggatattgggaaaggtgatcaggcagcaaaaactcattatatggaagctagaatggaagctcaagcgcatgggcaagatctgaattatcaaaagaaggagaaagaggcagcatctcattttcatgattaggaacacatgtatcatagcttcttgaaacaacgaatcaaagtgaactggcttttgtaaaagagatgagaataatacttttttttcatgcctttttgaaaaaaagaaggatggagaatagtatagtttttttacactaatgatcatggagaagtcatacagaaatttcctgaagtggtgaaacactttatgaaccatttttagggatacatggggactagttgcatatatataacttctcgtagtttaaggaaggattgcatggagtaggggaaaaggttgaatgttgagcagcaattgaacatgatcaaaccgtttactgtcaaagagattaggagagctttctttagcattgttgattcaaaatcccttggacctgatgtgtatggagctggatttttcaagaaaatgtgggcaaatttgggagccgatttcattaaagccatagaaagcttctgcaacaatgatgtcatgctaagggagcttcatgcaactatgataaaccctatccccaaaattgagagtcctacaaaagcggtggattacaggctgattgcttgttgttccacggtttataaatgcatatgtaaactgttgtgttccagacttgctcaggtgttacctattcttgtcagccagaatcaaggagcctttattcatgggagatcaattgctcataatatcatgattctccaagacatcttaaagaattacaacagaaagaatgtgtctccgagatgtactatcaaagttgacatcagcaaagcgtataatacgataaattgggagtttttggaggagcttcttaattcgtataagttgtcaacaaggttcattaactggataatgacctgtgtgagagccacttcctactttattcttatgaatgaaagagttcaaggcagcttcaaaggaaagaaaggtttgagataaggggatcccctatctcctcttctgtttgttctgataatggagtatctaacaaggagattgcaaatggcagctaacaattcagaatatagataccaccccatgtgtaagagcctcaaaatcataaacttatgctttgctaatgatctgatattattttgcaaggggaatactcagtcaatccaggttcttaagaaatgtttggaggagttcaaagatacctcaggtcgtgctattaatacaagtaaatctcagatgtactttggaggggttggagaagaggctaaacaggctatattgagagaattaactctaactgagagcaccttttccctaaagtatctgggagttcctttgagactgacaaaatggaaagctgaagattgtgatgtgattatcaagaagatcaaacaaagacttctctgttgggcaagcatacatctctcttttgcaagaagagctcagctaatccattcggttttacttaggcttcggaactacttaacgagcatttttgtattgcctcaaagcatcaccaaggaaattaaaaagttatgtagagggttcctttgatgatggaatgggaatagaagtaagctccatgtggtcagttgggagaaagtttgccttcctaaacattatggagggctgggatttaaagaggggacaaagtggaatgaagcaatcatagcccaatatttttgggccatttcatccaagagtgacattctttgggtgaaatgggtcaatgatatttatcttaaaaataactccatttggttctatgatctcaaggctgatacgagttggtattggaagaaaatttgtcatgtaaaagataaattttcaaaagctgatattgctatagcaggtgcggctgggaggttcaagactaatatgctctacaacagcagattatcgcaggtgatatgtgaatacagcaggagcatttggtgttctttcattatgccaaaacatagattcatgctttggcaagctataaatgctcaactgcttactcgagacaaattccaacaatttcacatctcgttggacaatgttgttgttggaattatttta

SEQ ID NO: 220753 - DNA, 1012 bp, Cannabis indica
atcaatgtggatggtcacccaccgtacttagggctgcacgtacatcgctagtaacctttagggatagctaatataattttgatacattggacaacttctacatagatcgcactaaccataggttgttggtaccctcgattccatgtctagcttagtttcactagttcattttaccagattgccgagagtatggtaccaactttgatagggtgacccatccttattcaaattgggattgttgagcagtgtggtactttatattttttggcatagtactttaagaataataaaatcggagaggagtgtcaaccagatggaacttcttggctaggaggtcacaaatgttgtggcatagctctcccaacaaccacttgtggtccccacttagcaaaactaagtaattcttaagtaaattgtgctaacctatcttatgagacaatttttagcctaataacttcagaaatatgtaatgaccatgagacacacttagatctgtctagagaaggtatattttaaatgaatttttcactaagtaatttggataagaattgatagatttatgcctattttactcaagggtagtaggtacatttgaacaaaaaattcgaccactgccacatcatcatgccaaaaagtggtagtggttggtcgtacatattctcaaacacttcctggtgtgttttgacattttttatggggaatcatattttgtaggttttggggtcctcatcttgaggtacgaaaccctaactagccacaattaccattagtttttgtaaaaagatggaagtggttggccagggcttgtgagaagcattggatgatgtttcttgtttattttagtcatatgtatgctataaaatactttgaccacattgcttcttggcaaatttgtgggggagacatctaccatctttttggcacctttaaggcccaaaaggggcagtggtgggccaacgtattcctacaccttttggtgacttttatcacttgtttttgatcccttgatgtt

SEQ ID NO: 220754 - DNA, 1659 bp, Cannabis indica
ttccatacttttatattaatcaataaggcctcatcacatgaatttaaatattattacatatatgcaaatataaactttttacaagatttgtaatttacattaattatttattgcatgagtactacagaaagtgagaaggtggaactaagatctgatggtgggaatgacattaatcatggtgtggataaagctaagatattggacatgatggcatacccataccctctctccaaaataataatggaagataacgaattgggagttcagttctgtggattatgcctaaagcctggggtcacatgtgagaagggatgtctttgtacatggaaattaggttggcttattcctatttgcaagggcctgtgctgctaaatctacagcatatataacatagcatcatcgttggttctttttatattgaataatgcaaacccttcatataaataaatgtataagaagcataaggctcaaggagtcatgaatgcatgcatgttcttagctgctgcttcttgttttttattaattgtaaaacaaatatgatatgcgtttgtcgtatttgtaatggttaataaaacattcactctatttaattatatcctaatgctcttcgaccgctgagatggattacggataagaacacacacgacgattatgtgccattaattcttggcacttgaaatagccaatctcggtgtaaagtactagcatttagattaattggtcattgtatgcatgcacttatagttctacaccgccgtgttagctgttatttatttgttaatattattaaataatctactatagattaagagaaatactaagtgcacttaaggtgccaagcaattattatttctgtaatttattaatatcacatatcacacattttaacataataaataatataaaaaattactaatagcatcttcaatggagtgctaaaaaaaatagtatattgttatattttaaagcattagaaaaaaaaaaatactactctaaaggtattttaaaaagtgtgtccaatttgggacattctaaatgttgtacgaaatttactatataatatataactttgtaatacttcgtaatcttacactatccgtctaaagaggctaataatattgactcttggactaattaaggatcattaatgcctgaaccaaataaaaatttgctggatttattacttattacttgttgtttcctttcctctctcaaaatatttgatttctaaaagattcactaaacagttgggtagtaattattttcagttacactcttttagtacttttaatatcttcatatattaaagttataagagatcttccaccaaaaatttcatatgtcgaaattactatttaaacatgttgctgcacgttttacttgtctaaaatctcaatatttagttatatacgcctctagttgtttgaataataattttaataacttaaattataagaattttttgaaaatttgtgtaaggttctctataaatacaatatttacacggacacttaaaaaattaaagttacaattaatctgtgtatacagggccggccctaggtataggcaggctaggcccgtacctagggcccacacttgccggtggcccaatataaaaaaataaaaaaattattaggcttttatttaagtaaaatttaa

SEQ ID NO: 220755 - DNA, 4359 bp, Cannabis indica
ctaagtcaatgtcacttagttgatcttagatcgattaatctttaatcatgagatggttaagttcttgcttaattgtatactatatggattctttgacttgtttgttacccgcttacccgtaagactagcccatacttacatcttgagaattcgatagtgcaattgagtgagcattaatcatagatataaaatctaaacgatagtttccttagagtctggcttaatgacataaatggaagagctcttatttcggtaattatattagtttactgaaatgtcatttataggtagctatgtgttttaaggataaaatacattgaagggtaaaacagtaaatttatccctattcaatgtaaaccatctatagaagatcattgattgtatagattgaaacaatgaataattcataacgtaactatatttggtatatagagcattctatgtaatcaagagtgtaattccgaatctatagtagagtcaagaagaattgataagcaaggaaatttatatataaatttcgagaactgcttattgggagcttggttacatagatccatggtccccacactatctgggataatattatcttgcagtctcaattaattggtttctgtaaccaattagaattctaaacaagacttttatcttatttatgaatttcactaaaaaaaaaagagcttatttgagaagaaaagtaaagagatagtttatttgtaattagtacattttatgcgactaattaataaatatatttaaataataagtttatttgataattatatataattattaactagataaaattagcatttaaataaatagaaagagaaaaatggtatctttggaaagattagaaaatcttatttaagggaattaagtggcaaaattcaaaccccataagcttatatggatttcggcctacactatgggccattaaaggtcaatgtctttttcctaaagcacattctattctaaacataaacctatagagaccctataaaaggaacataaagagctttgatttgatagagactctcaaacttagaaaatggaatcaaagaaaagcctttttccttcttttagatttttgaatctctctctctctctctcaatctcaattcgtgtcccttaatgattgagaattgctcatacaattcaaggcaatactcagaagactatgtagtgtcgtttatcaattcaagagagaaaccaggttcagttcttgttactactctacgacaaaaatgaacaagagttagagaactgaagagaagaagatttattattttactgcaaccaatgtgaggttttctataccttctatgtgtttatttaatgtttgtcatatttgggatgttagattatgccatgtaatcaacataagtgattagttaatttagattctagtaaaataagtaccaacagaaatatcaaaatgtgtatttgacctgtcacaagtcgtagctctcgtttactacgaaaaaatagtcagatgctcgagatggaatcgaattctgataagcaaaaccctgcgcactaggtcacacatcaatgtgggtgctgggaatttgtgtttgaggagcgaaaatatgcaaacaaggttgcttatcagcatgggcgttgggtccctattttgacccttataaaatcttgtttgctctttaagatcacttgtatcttcgttattttttaacacgaaaaagatgtccggaacactttttgggaaaaatgactggaagtaacccaggctgataaaatgtcaacctgggaactttttgccaccagatggctccgcttgattctaaaaaataattgtatctcaggtatttatgaaaaaggaaaatatgcctagaggacttctcaaaaaagtgaatggaaatggctcaggttgaccaagtgtcaacttgggtggatcacctaggtcaacctaggcattgggtctcaattttggccccccaatcaatctctttctttcccgaaagcacttgattctttattttggatggagatgaataaaatgattggtatgcttcttcaatattacggttggaaatgccccatgttgagaatatgtcaacctgggcgctgggtgccctaggcacctagtgccttgggtgctcaaaattgagagtgttctaattctgattctggttcctaaaatatgttcatgacaggtcttattcatgtcaaagtacaaattttgagccactttcactaagaaggacccataaactaaaaccttagttggaatgtcaacctgggtgttaggtgaaaaccctaagcgctcgggttgacttccaaggtgttgtttcctctcttttcaatttctaggccttgtacttggattcttcttgtcttcttggttcaaaatatttaaatatggtgagttggaaacaacttagtgggatccaaacacccattctagagctcctagagtcaacctgggcgcagggctaaggacccttcccaagtcgactgctatgactcggactacccaaccctgggatgttttctttctcaccacgtgccaaacattgattttcatgtcatcagggctagttttggtgtaaacattttcccccaagttagctttgcacgtctgtgagcctgacttcatgacgcagactaagcccgtttcatgtgaaactactaaggtgggcatcaattttgacaatcttagaaattatttgctaattttcttgagtaatttcctttgatttgggagacttctgaaatatgcttacacaaaaatttcattaccaattttgatcttcagctatatatctttttagcattggctctcttgtcacactatatgtataaatagatataaatgtagtctttgttctctcctaggttgcaaacttggagttctttagtttccctcagttgtgtttacagcaaaggtggtcttgttcatctcctcaattttacagtagagggggcattcttcatctcctcaacttcacaatgaaggaggcctttgtcatctccttggcttcacaatggaggaggcattgtcatctcctcagcttcacagtagaggaggccttcaccatttcataggcttgatagcagaggaggcctttgtcatctcctcgacttgacagtggaggaggccttcatcatctcctcagcttgacagtggaggaggccttcatcatctcctcagcttgacagtggaggaggcattcgtcatctcctcggctttacaatggaggaggtcttcttagaaaccgccaacaaaatattgtagcaatcgctggccattctttgatcaattaaggatgtgattaactactgaaataatatatccaagatggggatgatgtcatccccagcttgggcgcaccttagagtgattgtaggtgcggtctccatttttttcttagtcttaaccatagatgtcttagtgatcccttcggctctattcacaacggaagatgccttcttcattccctcaactattttgacatcagagtaggtcttcctcatcccctcgactgttagcacagtgaaggaggtcttcttcatctccttaactgctaacacaacggaggaggtcttcttcatcttctcatctgctagcacaaagaaagaagaacgaaaaaaaggaaaaaacaaaagataaaaaataattatttttcaatttttttttctaattttattattttaattatttttataatatttaaataaataaaatgatgttgactaatgaaattatgccatgtgtacaacgtggcagacctatttggcatttaacaatcaaatattaatagaaaagtggagagcaaaacgattttgtagtttgaggagttctgcctccaaaatttcaataaggggagttgattgtgccaaactccgtagttcagggagtttgaccataatcactctaataataatacatatgtattttatatgattatgtgtaaagtatatttgaaaaattatataaatacaattgaaactataaaaaatacatataatttagtgattatattggcacgaaaatgtgggcttaagggtcatgacagacttaacttttaaaatattgacacgacacgacataattcatattattacgactttttaaattatggatcgggccgacacaatacacatgtatttacaatatgaatataggtatacgattcaaattattggtagtactttgagacttatgaaggtattattttgggaggaatgctaccgttaacctcctataacaatctcttagtcaatctccgtatctgaaaaacacatgttgggttatttttttttttttcaaattttttctatgtcggtgttcgttatgcttcaacatcatccttgtaattttaaaaatttacgtaatag

SEQ ID NO: 220756 - DNA, 1648 bp, Cannabis indica
aaaaaaggtatagtttttttagggtttaaattattggtttagaaatcaaattttttgattttctaagtatagaaaatcaaatttcccttctaaattgtgatctacattaaaagccaactagcccttaatctcatcatgaatactcaataagaaccactcatctaatacataacacactacataaaattttacttttaatcacaacaaaatatataacaaaaaataaaaaaattgtaactaactataaattatcattcttatatcgtgattaaaaggtcagtgactaattgtattagtcacaaaaattacaatttattgtgactaaatgtatttttagtcacaatatttgttgtgattaaaagtaaattagtgatagcttgtatttaaatactatattttagtcacaagtaacaatttgttgtgattaaaaatcacatttagttataaaaaaatatgtgagcctgaaagattatcactaaagataactgtttttttcagtgacacaagatttttttgttaaattagttcaatataatattcattgcatcaaaaactcaaacaaaaacaaaagtttcatatgtatatgtagtacaataaagatccacaaattcaaaaaaaaaaaaataaaaaaaataggagctccaactactacccttttctttcccaataattttctctaccttcatttttttgtttatggtgatcatcataaacatactcaagaaaagaagttgttcaacactcccaccaggaccatggcaactaccctttgtgggaaacatgcacaatcttttggggtctttaccccaccatacactaagagacttagccaaaaaatatggcccatttatgtacctaaaatttggccaacttccaaccatagtagtctcttcacaagaattttccaaagaggtgatgagaaatcatgatgctagttttgcctcaaggccacaaaatttgtactcagagattatgatgtatggtagtactgacatagcctttgctccctatggtgagtattggagacaacttagaaaattatgcatgcaagagcttttgagcaacactagagttcaatcttttagacacataagagaagaggtgatgaataatttgattgaatggattgcttcaaatgttggaaagcctataaatcttagtgaaaagatcaaatcctcgacgtatggcatcacttcgcgggctgcattcggaaacaaaagtgaaggccatgaagagttcatatcaattgtggagcaaactgtgccattaacagcagggtttgagttttctgagctttttccttctcttaaattttttgctttgattagtccttcaaggcataaattggagagattgaagcaaagatctgagaagattgttgaaaggattatccaagaacataaagatcaaaagaagaagaagaacaatgaaagtgcaacacatgaagattttgttgatgttcttttgaagtttcaggacagaagtgaccttggtttttccttcacaattgacaatgtcaaagcagtcatttgggtaagcttaattcccaattttctattattgcttaattgatttgtttctacaactttaattatatgtatatacagattttttttaaggaaattttagcatttatatataaaaagca

SEQ ID NO: 220757 - DNA, 1013 bp, Cannabis indica
gtaaatcaaatggtgaacatgacacgtgagcctgctcccattaaccaatgaaacatttatggaccacaaaaatggtcattggtcagggtccactacaagattgcctctccatattgaatggtggtaagctcaaaattctgagactcgccaaatactataaataatactattctatttgtagctcctagtttagtttaacattccaaatcagatcaatattaacaaacgagcttattaaaactggtaaaataatggaaaaccatacatcaattaaggataaaaaagggaagtaaaatcatattattagtagtggttagtaagtgatttgttactttaaaagtttgtcttgtgccattgccatatcaaacaagaagaaaaaaatagataaagctactttctggccccaacgtagcaaaaatagacatatgttatcaaaattggaaatatataatgggcaccgacatctttttgggaattttaaattttcggtatattaacttttttttttttggaattttaaattttggtattttaacaatttaccatgaaattatggtattgtaataagagtgggaagttgctttttgaaattatggtattgtattaagttattttcagatgtaaatattgcaataaatttagtaataaataaatgttatatttattataaggaaattgttattaagcatgagtggtacctatctagatgtgttattttgtaattggctagcgatacccctaaaaattattatattaaattatatgagacccgatacttaattgaaccaataacgaataagaaggtgctagacaccactggtaccttttagtatttctcttattataatatttgttattttgctttaatgcacattagcattttatgttgtagattatgataaaaagcaaaatattattaatgtacataattaaatatttaaaaataactaatgaaaatattgtaattaaaaataaggtaaatactattttgcactttgtattttgcaaaagtt

SEQ ID NO: 220758 - DNA, 1754 bp, Cannabis indica
aaattaaacaaaaccaaccaatggtaaagagctagacccaacacccaggttgacagtggtgctgggcccagcgcccagcgcccaggttgatattttatcaacatgggatatttctagtcatttttttccaaaatgtgttgtggacatctttttcatctttagaaataatggacatatagtgatcttgagaagcaaacgatattttttaggggtcaaaatagggacccaacacccaggttggcatgggcactaggccctgcacccaagttgacatgcaacctagttcgaatgttttcgctcgtcaatcataaattttgctttgtgcattcttcttatttttctcaaaaatggggcaggagatctcttttgcaatctcgaattctttagaaggattaaaatgagcacatagaagtcacctaggaagcacccaacgcccaggtttgcgtgtgacctggtgcgttgggttctgcttattagaatctgtttctatctcgactatcagactatttttttcatagtaaataggagctacaaattatgataggtcaaatttacactttgatattttactctttcaacaagttggaatatcgacaaaatcagggagtttcgagtctacccagtttcaccaaaaagagacatctctgagaagttatgaacaacttcaccaaaactaagaaaatggttaagggatgtaaacatataagtttggcatcaaaacatacaagtttgggatgtttttccactaacttagtgtctaggttgatgccaagatgtcaacctgggtgctagattatcaacctggacggtgggtgctaaataaccttcagtaatagcaataactccctcaatattcatcctactgatgcgattcaacttgtgtttcaaagatatttcaaggatttatcaagttatgtctaacatccatatttcaattctgaagatttcaggtccaaaatttgtgcccaaaataagcgcaatttttttttttcgtaattacctcataacaatccaatagacgagattcaaactctaaaaattgaaaattttcatcaagagtcactttttatcattagatcatcatcaataaccaaaatcactccaaagtgattttttcatattttttgtattattttattaatattttaataagactaccttccctataaaaggagagctattctcatttatttttcacattctactaagtccccataaggccagagcatctctctttagaaatcaaagcccttttccttagttaattctcttgtaattctcgtgagaaataaaaactcgaagtagatgtagctctattaccatcgaaacatgggtaatgaactactataaattttgtgtatctctctatattattttcttaaactcattattcatctcgctaatctagaaagttggtgttggccattttacagtgtaaatactattttgtaccattaaaaaatacaaaatctggtttatcatttaacaaaataaagtgtccaatcagcatttttcacatatcgcaaggttcaaaagagtataacaacaaaaattaaatgtaagataattttctgttgagaagtggaattatgatacaaataaaaatattttaaaattttatgatagttataccttatcttatactaaacatatatactttattttaatttctatagtacacccttaaaagtatcatttcggtactgttgcccttaattttgccaaaaatacgtggaccaatgcgaccacgacac

SEQ ID NO: 220759 - DNA, 1192 bp, Cannabis indica
tgtcttgatgatctgcacaaaaaaagtggtgattataattaataaattattgaaatattattattaaaatgaaaataataagtactatatatataccaaatactagtgagaattattatgaggttaaaggagaataagtacaatacatccaaaaaatttgtgactagaaaaagaaatttacttcaaaaatagtaaaagtaaaagtttgagagtaagatatggtgtaatacagttgcctaaatatacatattatcagttatggtacggtacaaagattttgccatgaaaatgttgaaaatatcatcatcatcatcatcatcatcatatgaagaaatatatatatatatatatatatacctctgagaagggtgtgtgtttttctgatcctccaaagtttttctggctcctccattctaagttagtgtttttttctttttgggttttagagaaagaaagaaaaaaatggtggaaaaagtggtgtgaggggcgaggtatatatggagttacagaggcagtgggcttgtcctgatggacctgacaatgacagcttcaaggcccagaaagaagaataaatgtaaaacggacccgatgacgtcacctcacgcccgctgcccgaccctaaatcacactctccgtacgatcaattacttataactgtatctctacgcgtggcgctatcagggccgttcgtcaattggcaactcagatttctttctttcctgcccacatctctatttgtaatatgaagtgttatgaaattttgaactgagttgaaaaataaattaaattttaataatttgtttagagtttagaataatttgtttaaattttttaaaaataactacaacgtacatatgtatattagtgcgtcttatataacattttttttttctaacaaaccttcatagacattttattttataggattaattaaacaataaacactagtacctaataataatattcaaaatatatataccaaaagatcctttttttgataggatgtggagaattattattttgactattcttcgtgacaaagaaatatcatgaagatcgattactttaaagtgaagcaatagtatatatatatatagatagtaggcgaagatatattgatagcttggtaggcacctaaggtttacacgtaaatatatgtaagagttttaaaaatatagacaaaaataattaa

SEQ ID NO: 220760 - DNA, 3324 bp, Cannabis indica
gcctatcttgttacctagctagtgctttttaatgaaaatgacaaggttgtgctaatattatgtttagtaatatcgaatcttgcagactttattttttgcttatttttcaggttgcaagagccaaaaggcgatatgttcagggtaaatgtagcacagtttccccttcaactaccagactacatttactaaatctactcaatttgcaagggtttgggtttaagataatcgtcacaccatgtcgtacattctgtttttctttattattaaatattctattaccctttatcttcttcttttaatatttgttttctttgctgtggaacatttttcttggattgccttttagtgtagcctgtagtatgtgaaatatgaagagaattatgtgtaccccaattgagtttcataactttacttcgataacagaagaaagagatggagaaaaatggagaggttaaggtttcattgatttgaaaagcaaaaatgtgaataatacaaataatagtaagccttatattgactaaaataacattgatcaattgtttaacatcccctctcaaaccatcatcatgcaataagaaagcatctagagttggcctatgagaacacaaaaatgagaaatctaatgtgacatagtaaagaaatcatcaagctacaacgaataagaaacaaaagacaaaatagtagtgtcaagtttcaaatcgtaatggaatgacaatcaaactcaaaagttgtgttaatggaaaattaaggtgtgagcaatttgaatagtgttttgatggttaaaacacataggagtgggacaagagtgaatgacaactatatcaacaagtaatcatctcaaccaaataatagtagacgacatggtatagtaccctatagaagatcgagaaacaataaattgtttcttactcttccaagaaataagagaattttcaaagtggaaggtagtagtaggatctgaaagatagtaccttgaagatattgtaaaatgaaaagaatagtagtcccatgaacagtaggaggagaagcaataaacgtactagcagtatgaataacatatacaatgtcatgacgagtaatagtgagataaaccaaactgtcaaaaatagtgcaatacaaagtaggatcttccaagggagagccatcagaagaagaacattcatctcaaataaagtatcaacaattctagtatcattatggtgagcacatttaataatgtcagtgtgtactttaaatgagaaagcagatagccttttggagaaaagataacttcaatactttcaatcccttgaaaattcatatcttcttataatcatatcatcgacatacaacaaaagtagacgtacacttgacaaccaaagttagatcatgatcacttcagtaaaaatcaagaaataaaataacattagaaaacttctaaaaccgtacttagtgagcctattttagaccatatatgttttattttagcttgcaaacttcactatgattatgaggaacaccaggaggaagaaccatgtaggcctcctcatgtaagtcaccatttaaaaagccattcttaacatcaatctgagatatacttcgctggcaaatagatgcaattgctataagagtacaatcaatagttatttttgccacatgaccaaaagtttcttcaaagtcgatactatactattgcgaaaatcccttagccatttgtcgagcttgtaggtttttatggtcgaaatcagaatagaaagcgaaaaacaattttgaaagttatttttttagtttctcacaatctaaactataagtcctaagagtaaatgtgtacaaacattaaatctacactatgagttaaaacataataccacttgaagatttattagggtattcttgattctttttgtgtaaatcgaacattcaatccatgtgatgatgatgatgatgatgaaagatgtcacactatgattttccaaactagttttaatacgctaagacgagtgtggatacatatgaaaattaggattgataatgtatttatcacagtgtgtactcaactcatgaaacactgtcattgaatgagagagaaaggaagagataagttgtataatttatgggaagttggatcaaaacataaatatccatttctccatcaacgtaaccaagaaacacacaagttagagcgtgacgccaattttgtacgctctacactaggatgaaacacaaaataagtagaaccaaagactgtaatagtcaagaatacaaccatacaatttttcaaaaagagttaaacttaaagtgacagaaaaagagattctattaattaggtgaactgtagtaagaactacctcccctattactattaggatatagccaacaaggtcattttgttagtccttagagtacatggccttgaataccatgagcaatatgtattcaacttgatggggttttcagcctgatggagctaattggcccataagatgcttggcctgatagcttcttaccatatgcctatggtgtataatgcatagtactattcaacccaaccatgtcattaggctaattggaccttgtgtttctttgtttatacattctctagctttccactgtgtcattagtctcaccatgtcaccttgccaatttttgagttaatatatatattatattgaacttgcaccaaacaaaatcaataataatttaattatacatattgtttacccaaattttgatgatggtaacatggcaaaaattatggcacatgacatgaggataccaggattaaattgatggagaatgtgtaaagtcatgactgatggtcatgactgttagaaaagaagtcggagtcacctttcccctagcttaagcaagatgacttaccctagggggaaggtgttgaaacttattttaccaggatctagatttaccaacatgtatgtctgattataaactatgatctaacatcctaaatatgattttcctaaaataatgaaataaacacatataaagttatagaaaatcttacattggtggcagtagaatataatgtatccttctgttcagatctcaaaccctcctttctgtcgtagagtatgattaagatctggacctagatcttcttagttgacatatttctacacaatcttctacactatcttgagtattgtcttgaattgtgtgggcaactcctcaattcactttaagggtcaaaaaaggagagaagaagaggatttcaaaataagagccatctatttcaatttataggatagtttctagggttaggtttggaattgaaaaagataaaataatagctttaattaacccttatggccgaaccctagtggg

SEQ ID NO: 220761 - DNA, 1736 bp, Cannabis indica
tgtatcaaaaattcctgtacagctaaaaacaaatataattataataacaacaaacattggctacctaccacaacatttattttcataatatttcaatatgtctcttcaaataagtgaaaagtttccatttaaagaatgaatctattggtgtcttttacttcatgattttatttttatacatttgcatttgatctatatgtgttagccttactgagtccgaataacttagctaatttattttatttatttttgatcatccagacgttctaaattatttattttcatctgtaatgaaaatcaatacggacgagaggtgtggcttgtgggccatgcgttcctcagctgggcccattagtataatagcacttatggtggtccaaaatttgattccccaaatttgttgtcactccaattttgcctatttttggactgatcttgctatgtaattaaagtgtactaactatacttaattctattaagattcaaatatggcaagaaaaacaacaaatagagattataataacacttttaatacagtgttaatttcataaaccaaaactaactaggtttaggtggtaaaggttagtaattacttgggccttgaaaaggccttgactttttgggcagagaagtccaacttcagtctttgatagacagtgaaaaagcaggagtttgggccctaatttcacatggtgggcccatatgcacttgcattttttacagcgaacagctgtcacatgttgacagggccaggctggcaggcccaatagatgcatgtgcatgatggcgttgcttgcctaatatggcccacttccacgtccgcatcacgtgttatttactcaaattagagcattattaagccacacatacaccctttttagttactattgtccattttagtcaaaatacataaataatttaggcaaacttcttctctaatctttccaagccaaaaaagattttgatcatatttaaacgcatcctaacttatttaaataagaatttatattgatatctctctatgaaaagacagtttcaacgatatgagcaagggtatattgtatatatatatatatatatatatttatatatatatgttaaatctatttcattgtattgtcaacttaatccacataatgatcaagttaatatcaacgaagattacataacattttttggaatgctaatgattacaaatataaaatcagttattttatttttgtcgattttctaaaaaaaaaaaaaactattatggatgtagtttagtggtgagaacttgaggaaattatatagtatacctttactactttatttgttttaatttttatctctattttcatattgttttaatacaaattatatgttagacttaatatagagtgaaggtatattaggcaacccactcaaaaagtgggtatatcttaataaaaagaataatataaggggcattaccttgtttatttggaaggtttagtcttggaatgttattcccctagtaatataactacccttgaggagggtaatgttcataccttaaaaaagggtaggattgaattattactttccatcatattaatttgaataatatttttgaattaataaataaatttaaatactaataatataatcatttattataataaaatattatgatatataaatttagtctgtgagattagtttttttttaacttgagttattttatattattagcaataacatatatatatttatta

SEQ ID NO: 220762 - DNA, 1353 bp, Cannabis indica
ttatgaagaaaccttttgttaattcggagtcatattatgtcgaaaagttaatttttttctgtatcatgtaattcgtatcttgaatgttatgctttataaactgttttggtaaaacttcaatatctctgaatataattctaattttaaaaaatttggtgtcattggaaaggaaattaaatttcctaaaactttcatgaaaatattattctctagctctgtatatttctatgtcaaaagcttgtatttttcctgagtcatgtaatttgttactccatattccttctcaaaagttgtttcactaaaactatgataactccctcagttttaatctattttcaatgatctgcatatcattagaaagttaattgaattgtttatagtatttatgaaggtaactttcactgaatttgtatagttgatggtaaaaaaataatattctttctgttgtactgtaacagtacaaattttaatgtcagtgtcttgacttatgtcttattatagggagtagtgacaggataacaagtcttaagcagtggaatttgaggtaaggaaattagatagttttggatattttgaactgcataatttaaactatttgtgtattggaatattatttgtgatgtattattattaatgtgtatatggtactgagaatttgtggtatggataaaatatgagtttgtgaatctatgtatattatggttggtatgattagtatatgttgtatgttgtatgttgtttgctaatgtctcaggaacaaatgaggggccatggtaggatatgatacggagtaaggtcgttgaatatagagataccctaccctgcatttgtctgattcgtgtgtgacatttttaaggtaaggtatgatacggtgacaatgatattgaatgtagagataccttatttcatagcagtggtagggctaaatgtgcccaggatattgcagggccaataggcccgggttatgtatgtagtgtccataatatgataaatggtataatatgattgggatatggttatttcatagtattatgattattctatgagtatgctataagagttatgatctctacgtatgatgttatggttttggattagcatggatgcatgtaatataattttccatgaatagaattatttacttatcgttatcagttaaagtatgatattgaaatacttaatacattaagaatatgatggtattttatatagttgtattattgtgaattaagacatgtatggtatattgaattttaatgtgtgttaacgtcttttcttactgggcttttggctcaccccttacttttcccctacaggcaataggcaagggacattgtgttggaaattatttta

SEQ ID NO: 220763 - DNA, 4327 bp, Cannabis indica
ataatactctacgacagaaataaaaaagggttaaagatctgagcggaaggagtcattatattccggtgcaaccaatgtaaggttttctaaactcttatgtgtttaatttcattgttttagagatattcatatttcagatgttaatcaacatacttgtttgtaaatctagattctggtaaaatattcccaacatatgttgtggtcgcaatggattatttcataaaatggacagaagccaagccattagcaacgatcacacctaaaaaagttttggactttacaataaacataatatgtcagtttagacttctgcacaagattgtttcggacaatggcaaacagtttgattgccaaatatttacaaatttctgtgcaacacatggaatcataaaaagtatctccacggtggcacaccctcaaacaaatggtcaggtcgaggcagtcaaaaagataatcaaagacaccatgaaaaaatggcttgaaaaagctaaatggaattggccagaggaactaccagaagtattgtggtcataccgaacaatggagaaaacaacaattgggcaaacaccatttgttatggcttatggttatgaagcaatgtttcccatggagttaaaacctttgtcccataggagattaacctataataaagaaaccaatcatgccctccgagcaggttcagttggcgaaattgaagaagaacgaacctcaacaaacctaaagctagtagatcatcagcaaaaggtagctcggtacttaaaaaagcaagtgaggacaagaaaattccttgtgggagatatggtccttagaagagtattccttaacataaaagacaactcgactggcatgctcaaacagctactcttaagtagatggccttctgagcggatcctgcttaagggtttggataacatgactggaactcaggtcaaatgaccatctctaaagtatagtctagattatattttaattagataaagatcagttagatcatgtaatagctttcataattcaataaatgtaaattactacgataacaaaattatttaacccaataaataaataaagatattaattatcattctaattgtgtcaatcattttttatagaaatttatgaatttatcattaaaatgtgtacaaaagctctgctcgaacccaatagctgaacagaaaaaacctgaacttgtgtaatacaagtgaccaacagtcataagtatgctctatgactcttggtcacttggggggtaattatacccgtaaaaggcataggtaaacaacaagctcaaaaaaaaaagacagcggtttgcatgtgaaattactaaaaacaaagggaaaatattcattttaagaagataacaaagcacgataagttcaggattaaaggttgcccgacctcttaaaacaaaatgaagcataaccaagtttaaaggccgcttggttgaccatattttattggaaaagacccacgagccgaactgaaacaaaaaaaaagaaaaagaaggtttcacacggccggagtctctagctctttctacagattagcttggtcatcaggggccagatcgtcagtgctttggtcgatcagagctgtggagttggctgcatcgaggtcttacttgtctttttgggccgcaaaaatctgagatatgcctcctcgatttcattgaggtaattaaagtttccttgtgggttggccttccacaattcattgaaatcctccaaggtggccgtctcaaaattttcgacctccatctgaagcacttcccgctctttctgcttggatttgaatcttcttccaactttgtcttcttctgggttaaggtggcgagaagagttcagaaaccttccctcttgtccttcagagcattgacctctctagacagagcctcgacgtccgcttgaagtagggcggtagatggcatatcctcaatctccttctacaactcctcaactctcttgtttgtggccaaaagttgcttattctccttgcctagcaccaccctcgtgccctcaacctcctttttggctgcatccacctccttctgcaggttgttggtggtggttatggttcttaaggccgtggacttggctcgggagtaagtgtacgccatcttcaagttgagctacatatagaaaggtcaaaacttccatggataagagaatgaggtaaaagaccaaaggacaaatacttactcgggttgcctccttcaagagctcgcccatcagtagctccataaacatctcgtctcctccggccagctaatcatttacctcggggagtaatcggtcctagtaaaattgaagcatatgtttccccttctttgtctcagggtttagcataacgacagaattatttgaagacttgggcggaccggacccatctatgcttccccccttggcactcttggtcttggagctcttcaccggtgggtccacctctgacactacctcctcagaaaggttattgggtgactcgaccaaactcttttccttgggtggtacctcatccaccttggatcgtttggccaaatgtacctagtaggagctatcacttggcctcttttttaaggcttgaaacaccttctgagacatatcttcatatgaataaaacaagaaagttaaaagcgaatacaatataagcaattgcaaatgaaaattaaatgcaaggtaaggtaccctgcatgtaagcaggagcattttcatgaacaatgagagaaggagcattatcatctgaggaatcctcctattcttgctcaactaggacggactttccctttcctgccactagggcagatgaccgagaaactatttcagggtctaacctgatctggatagatcactcaacaggtactttgttttttggagaggcattcctcttcttcttcctcttgctcagggcctcctagtcggacctaatctcttctgatgccacaacctttggtatgaaattggccggaaacagcttgtacttgacaaaattagcctcagcggccaagagagagatgttccattcagcaggataaagttgaagaatcttttgagccctcttcctaggctccagtgtgaacggagggtggaagtaggacggtacatgctgaaagctggtgtggttggtgtccatccccttgacaaaataatactcgttgacaaagcctcctatcttcataacctcggtggccatcgtgcccgtgaaccatgacttctcaatcttagagaagtagaaacacccagacctattctacttggggcttgaatttagatcaaaaacccaagttgtattgtggggggacggctcaccctatccttgtgaggcatagagtataaacagggcggataaatacttgagtccttgcaggtgaactgggtcggacttatgtgatagtagtccacaatcatctttaaataggggtgtaagggaaacatcgcaccctgcttagtgtgagttcttaaccaatcacagtattcttcttctgggttagtagctagcttgtcgggggagggaaggaagcattcgacattcccgaggagaccatgattgagcaaatttgtaatgttcgtcatggtcaccatgggtggtggagaaatccatcgatctcatagcgcccttagcctcctcaaatgaatagccttggtgtattcctcaataacatagtcctcactggcctttagaacattgtctgcctcaaatacaagctttctttcttcattgtagccaccgaacggcaagactcgagctactccctctttctcatctccttcagcatcaagaggagtagcaagatagaccttgccctggtcctctacttcttggacttcaacgtccccagcaatatccccctcttcagtagcaggtcgggcctgttctgccctaggcaaggtggtaaggcgggcaatgtgggccggttagtgaagatttccgtacacttttcttagtctcagccatcatattatgcttggacgaatttttattatacgtttgcctaataatagtcacaacaaaggtggcaacgggtttacccgcaacagtaggtttgggcagccctcgagtatagtgtcgactacatctgggcagactatgtacgtccagttagatggaaggtagcatctctacccttttgtatgttcccaaatgaaactaccgtatccctcacattgaatctggataagatagaaagtgatgttgcacctcaggttctgaggaaggcgttttctcaatgcttatttcctagtattcaaagctagagttagaaagattgtcactagatgaagattggctagcacgaagacgaggataatcctcgtacagaagtttaagcagatcctgg

SEQ ID NO: 220764 - DNA, 2542 bp, Cannabis indica
ttatttttatttaatttccaaattaatcacaaccatttaatagcaatccaatgacttaaaaaaatgtaaccatgatggttacaataaaaatgtaaccattgaaacctcttccatacatatattacttagaatacaatataatttacataaataatatacacaatacatatatatataaacacatatgtaataaaacacaaaatgtatacatatatattacatatcaagttaataaatatttaccttataagcgcaatccaacgcgcgaacaattgcgacaaaaatctagccaccatgcacacacaacaacataatgttaataaaatagaaatatcctaaaaaaaaattacaaaaacgaaaatctagcaatgtacattaataaaataaatagaaattatatttatatcttaatggacgttgagattcaacgttttctccactaaaatcggtactcagagttataccactacctttttttaatagggccagttgcaatgaaataaggagaaaaaccaaacgtttttagtgtatatgtttaggtatttgaaaatagaagactttaaaagaaaaatagggtaatggtgtagaattgagggagatatagggattttattaagtggttggcgagggttttcgtgtgggttgtgggttctgctatggtgttctttctgaagaagaaggcgaagtggggaagacgaagctcagggtttttttgtataaccttataccgtcagttattagagaataatcgaggcataggtgcacacgtgtcagtaaaggagtgcacctattgcgtctattattccctaataaccaacggcatagggttaataattaatcctgaaaaatattccaacccccaaccgacgctaaagggtatatttaatttctatacttacaacttttaccaaaaaactgcctctaaatatcaatttcgaacctggcgggtattatcacaccctttaacttccatttttataaaattggttgaaaaaaaacctctaaaggcccatattatagtactgattataaaatcactaatagttttatggaagaatattaaatattttagttgaaagagttcacttacatctgcaaatcacttagaaatatccattttcaaaagaggctgagtttgaaaagttgatgaagtgatacttgtaatttttttttttttttttttgagataattttcttaagcaaaatattttaacatttctcatttagggaagcaaattttgtgctggtgtccttttacaaataattgtagaatgtagatgatagatattgcttgttacttagctttttaaaaatgctctggacagctttgtgtataacaatttaattagtaactctcaagaaatgtattttttgagatgaattttagactgtcattgaatcataaaaattaggttcaaaattcttggtgctcttctttacttttggtttaagttgtctttagctttattcttgtgtttattaaactgttttgtactttgatttgtttatatgtgttggaagtttgagattaaggttgaattgatttccaacaggttagttaatggtaagttatgctcttttatcagctgatatccattctttttactagtgaatactattaatattttctagaatactgatctcatactaattctagccttcatatatatgtcactcatgtaagtggatataaatattactgttgtgcaaattaatataaaattgaagaaagaacttaatttctttttcagcatatttattctgagattcatattgtatgtattactttcatttgttttagcaaaatttattacttttagttgagatggttttgacctttatttctttttttttttctcttcattgtattagcagtttcttttatgtgtataatttatttatttttatataaaaaaaaatatattgtaaatattatataattgttataatttttacctgtagctctaagaataatgagacttttgaaactttataattactccaatatgaattgatttccttcttgcatttttacaaatgacaaattacacaaagtttagtaatttttcattctttagtttccgtagcattaatttttatcttaaactcttgtcatcttctttttaaattacaacaattaatttaaaatataacattccacaacacattgatctttatatactctggctatctcttttttaattagaattgttaactatttcctttactgtcattaaataatttaattttttaaattgctagaatggtgggttattttgtttgaccaactgttttagacttttaaatttttttaaaaaaaaaaaaacacaagaaaatacatattgaaatgggcagtcatgagtgaatgcagcactatacgtacagacaggaggcataggcgggctaggcccgtacctagggcccacacttttcgggagcccaaaataaaaaaataaaaaaaattattaggtttttatttaagtaaaatttaagtgtattataagtaataaatatctattgcttagttggttgaggtggatgg

SEQ ID NO: 220765 - DNA, 1267 bp, Cannabis indica
actcttaagtgaattaaagattgctaacgttgtaaggtccccagttgatgagttgaattgtgataaaaagagattaaacatatcactcatgtcattcaccaaattttgtggaggcgtctgtgattgggtggatcgagcgtgaatagttaaagatattcccttcaatctgcgaccaattccataaatgtgacctgcctctgacaaaacgtctcttcaaataggctaatgtaattagatgacgaatcaaaatcaaaatctgtctgaggttggggtgctcgagctgctcgagataccttcaaccgttcatgtattaaagcaaaatgttataacaataatgcaacactaatattatgtaaatataagaattaagttacaaaaactcacataatcttgttttgcatattcattaataatttatttattctttttggtatagacttccttccatttctcgatgtaatccagggtctcctataatttttgaaataaacattagagattttacaatttaatataacttaactacatttttgtatttgaacttactaattcaaagcgcttttgagctaaagattttgttccttgggttgaaacatacttcatcttttttcaatttttcttgttttgttcaaattgagctagaaaagctgggctagtaaaaaattcccactacccgttaactaggatcaaatttcgcttatggctatcacgtgcaaaatgataataaatgtaaagacacaagaatttatagaggtttgactttgacccctttgatcaggtaatgacctacttcctttttagttgtattcactcttgagataataccaaagcaaattagaggctgaaaccttataatttctagttatgactctcttcaatattacaataatgagaatgtgtgttgctagtgaaaagtataaggctatgagagaatgcaagaactctgaacacttagaatcttagggttaatgcgtgttagggcttacaaagtttttatttgaaatacataaaagatggaaaatatccctaaaaaatagagctgttatttgttgatgaagaatccctaaaatcatgggcaatttgaagtactattccaaagttgtaggagtattgaggacgatttggaaggcttgtgggaaaaaacacaagtgttggggcatgacccctgaagttttttggccgttaaaaattctccctaaactattgagattgttaaatttaaggacttttatctaattttgtaaaaaaattctaacatagaaaaagt

SEQ ID NO: 220766 - DNA, 2299 bp, Cannabis indica
aaaggaccaggacaaagacttggacccagtcccaaagctgtaaccggaccaggacccggactcgaacacagacccaccctaagattgggtcccaaacttgactccaaacccaaactgagacctgggaccgtaactcagacatgaactttaacccgaaaatggaacacgactcgggacctagaattgggattgagaccctggaacagcactaggaccgtgaccaggaccaagacctggaccaagacccagaactagagcagaacttaaccccaaaactagggctcggacttggtccttgacctagtcccgaacccagactaggagtgagactcgaacctgaacctgaacccgaactcgggactcgatcctggaccgagaccaagccgctgaccaaaatagggattcagacccggacatggacacgaacccagacctagacccgaatactgaccaagactcgaaccaagatcgaaacacaggacttcgacccagatgcagatgcagactctgatccaaacccgaacctggcacccagactaggcccagattgggttccgataaacttgtacccagactcagactaagactcagaccccgaccccaacctggtccaataatcggacccgaaaccaaagacgaacccaaaatcagaacttcaactgtgtttaggacctggacctgagaccaaaatcgaactcgaaccataacccaaactcggactgagtccttgattaggactgggtcccgagacctgggacctgaacctggaccaagacctgaatcgagacctggacctgacctggtcctaagccctcgccgagacctaagacccgcgagccagaccaagatccagaccctgaccaggattcgaacctgaactcggaccaagactgggatcgagacctggacctgaacctagaccgagactaggactaatagcagcactcaagagccgaacccgaacctcgacctagaccatgacgtaggcaccgaacatggatgggggacctagaccaggcacctaggtcgtagaacccaaacccagatcaaaatttgggacacgaacccgaacctggacctgtcctggacccgggaatctgaagtcggacccagacccagacccaaaacctgccccaaacccaaaccaagataggaacctaaacacaaacccatgctaggaccaaaccttaaccaagacccgtaccctgaatcggacccgaactcaaacccataccaagaatcagacctaaacctaggcctgctcccagactcgaaatcgaacctagaccgatatcgaaactcaggacttacactgaaaactaaactgggactcaaatggagatcgaaatctggtactcgaacctaaactttgacccacacccaggaccctaacccacacccacaacccgatctgtaacctagacctagatcaggacccgaacccaaactcgaaccaagactcgaaccccgacccgtactcgaacccacactcaaagttagaatcacaattggaattggaactggactaggactaggaccaggaccaggacccagacccgaacccaaaccaaaataaaaacccaaaccaagacccaaacccaaacccttactaggacccaaacccgaacctagaccgggacccaaacccagaccagattcgggacctagacctagattcgggatagggacttgggcaacgaaagtaggaccggaacccaagacctgaacccagacccgaacatgaacccagaaccaagctcgtgactcgacacccgaaacggaaccaaaccaggtcggagatcaagatccagatctggacccggggcttggaccgaacccatattcggtgtctggatcagggacccaaccccagacccgaacccaaaccaggatcttaacccacacctggacccgaacccagtcccaaaccaaaacctggacccaatctcgtaccctgtgacccaaaattggaaccaaaaccagaattaaactgggacctgggaacgagaccgggggaaggacttggccctagatctagaatcgtaaccggccttacacctaaacccagaaatgtaacctgactaggacccggacccgaacccagaccaggacttgggacccaaacatggacccgaactcagacccaaacatggaacaagactcagacccgaacccagacatgacagggatctagatcaatgactaaggctaagacccgaacccagactaggacccaaacccaaaccctgacccacacccagacccgagaccccaaattggaaactgaacaagaactacc

SEQ ID NO: 220767 - DNA, 1890 bp, Cannabis indica
accatttaataatgatctaatggttaaaaataaatataactataatggtaacatatttgatataattattggaatctcttttatatatttgattatttcaaattaattaaagtatgagaatagactaattaatttaatttagttattttttgttgaacgtctcaaataaattggattctagaaatttaatacaaatttaattgtgattactatgactattctagaaaatacggtgtaaacttataatgaagtagtattgcatcaaatttattgcttaatttgggacatcatataaaaagtcaaaattaaatatgaaacagaatacaattcctttgtagataagaaaaggaagaaaagaaaatgagaggaaatagaggtatgcaattcaattcaattcaattcgattcccctttttcattatttaacatctgtttgcaaatcacttgtcacgagttagtgatatatgacccgtaactggggaatataatacaaattgtttcaaccacacaacgaatcaaaacatgagtcgtctatctttttttgagaataaacaatgttattataaattaaagaccagagttaccttctacaactaaaagaaatggaattaaactaaattaattatattaattgtaagtatgcctattaaattcgaggtggcctgtgtcgatcaactttattcataaagaaaattatagcaaatgattttaaattataatactatataatacctatatatttaattttttttaattaaataatgtattttttttataatttttgaaatgaaatttcatattttaatctttaaaaaaaaatttagctattattacatttgtgtgtcatttgaatgttattatatatatatatatatactatttttttttaatttttaaattactcattagtttctttagatattctgttaggggctaatctttgaaaatccgccaacaccttaagggtggcggaattggaggtaaacagatgcttaaaatagtcacaagccacctgccccatacgaaaattccccgtaacccaagccagatttctgtcaaacagcccattgatagtattttttgtcttcttgttattagcctttcggtgaaaaaatttggtgtttcgatctccctcttttagccataatgaccggctccgttgcttccaaaacttctcctctttatctagaagcacatttttttttcgctccaactctttcaaatgttgcaagtcatgcgcctccgtgctacgagaaaggctcgagattttgtctccctgttcccttaattgcaggtgtatctctttcttcttaactctattccatctttgaagagcagccccacatttggccagatgacatttcaactccttggcattgacaatgttttctgactttcccccaagtcttgaaaacaattactaaacactcttcttcccctgcccaagcattctcaaagtgaaaccgagagtgccatttaaccttatcctctgtcccttgaggtatacttttacatgtgagcagaaggggggaatggttagaatttgtgcgatcaaggtgcttcactttcgctgctagaaaaatgtcaaaccactccgtgttgccacaaactctgtcgagcctttcaaaaatcaagttgctttgtctcccatttcgccaagtgtaagcatttccttcaaattcaacttcccagacctgataagaatccaaagcctgtctgaaattattaataagatacctcggcttggggggacctcgcgatttctccttttggttcactattcattgaagtcacccccaaccatccaaggccccgaataaatctaaccgaccctattaagaagcttccaagactattttcgctggctcagatccggatctccatagaaccc

SEQ ID NO: 220768 - DNA, 8010 bp, Cannabis indica
tttaattaaataatcaaactgagaatattaaaatacggaatttcagaacaaagttcggaaagcatcccaggtcatgttattcaaatcatgaccctatgatacaatgtcccactagatgcgggcatctctacgcaacatgtaaacgacacatctaacccaatcattactcttaacccgtatgaaataaaaaatcgatattatcatactcatccatttctccgccatgagtggatctacaccaccctcgtacactggcagactctacttcctgaaccacttgtacaacgactccataaaaatttccagcatcctgtggcactaccagaagtgccgaaggatcatgattgagacttggagcaggctgagctcgctgctccctcaattctcgaatctaatcaacttgctgtcgaatggcctcctacatcgcgacatacatctcttcccagtttggtgggtgtggaggattcacaccttcactgccaaccccaagcctagaaagctcacagttacccctaccaggccgcctcaggtgcataatctaatacacctacgaccttaactttccaccgtacagtacctctcaaatcatgagtaatgctaataagcatttccatgtatacacatacacatcagcccttacaatgcttttctaataactagcataattcaaataagcaggtaattaacaaataatctaacaatcagcacttactgaaccatgagtcgaacgagtcttcacaaccgatgtacatatcaaactagtcttcaggatctttaaactttggtcgctctgataccatgttgtaacgctctgactcacagggacgccacgtgtgtgcttttacaaatttatttataattaatttattagtttagaaaaagtgtggtttaattgaaaacgttctaatcacactaaaatataacttttatacaaaatactaccataatacgaggatcccctatttataaattcatttacatctagtttcaaaactgctattacaaaagtagggttacatttccaaatatagtcaaagggttaatcctgatccctggaagcaaagacaccacgattgatatgtacatcgctgggagaccattgactcatggctcattcacttttcccttccctttacctgcaccacaaagcacccgtgagtcacaatgactcaacaagaaagcaagtaatcacaaacagtgaataacatgagatagaaatacaatacatggcacacaattccataatacacaaataaatgcttatacagcacataattaaatgttacatggcaactatctgcctaataagaaaaactgctcttgatgcctcataaagcatccttaccactcgtcatccatgagctacatatgtcactatcgatgcccgatacaacaattgataagtaagaaacctatctacggtttcaagcaagtaattactcattcacaataaacggtaatggtcgtatcattatccatttttaataacggtattgatcgtatctttatctcattcataatcgagccacacacaatagtaactgctaccttgatcataaatgagtcacaaacaataataattgttcctcacttaacatgcttagtagcgcaataaactttcttacctcagtctagtaatcaggcatgcgggccgacctaaatggaactacgctcgatgatcccgagtcctatgtcacgacaacgaagcttgataaataacttagtcaaaaaatttggaaacaaaccctaatttctgtaactggacataactaactcccattgtttcaaaacatctcaaacaccactaaaataccctaatctaaactcttaaaaacaccttaagtaaaaccgattttgaggctaaaacctagagtttcccttgctggcaaaactggctgaccggtttcaccacacctgtgaaatcggttaattagtttccttgctgcaaaaaagaaaaactcgggttttcacatcaaaacccagtcaaatctccatgaaacctgttcaaactccccagaacagttcaataacataaaatagtgtatacaattaaaacattctgaaaaattcatcacaatatccaattcaccatgttagaaccaaaaaaaaattaggtttttaaactaaaatttctaattccaaacaaaacagccataaaattcaaccaattagagcctaaataatccttaaattaaacctagaacaagctctaaacttaaaccaactacacatccccaaaatcaccaaatttctcacctaaaactcaatctaaaccttgtaaaatcaccataaactagaaaagaaacttacctcaaggttttggacaacacttagtattgatttctagcaaaatttggactgaaatttgagatgaacagcttgacctccttggtttccttctaggggcgaaaagaggagagagagagagagattgatacgtttctttcttagtttaagtcttatccttttaatttccaaaaaaaaaaagaattcctttattatatatcacttaacttaacataatattcaaccataattcaaagtccataaaagtcaacattctaacttagtaaaaggctaaattgcccctgtactaaaacacttacataaaaataaggcctaggaataatttggtaatttttaattaatccgccaaaccgacaacttagaattctaaactagtccggtctaattccaattcaattcatcttttattgtcgtgatatttctgaccactccgtcgggtttccacagctgccgaatctaaaaatattttattttgaaaatggtatctacaatactcccataatccgataaaatctccgtaattaataaatcacgctttatttattcatgtactcaaatttcactaattaactcgtaaataacttaagtaagattataatgctactctaatatccatataattatatatttaataaaatatgtccatttaaatcttagtatatttttctgggatattacactactcaatgtaaatcatttatagatgattattaattatttagattgaaataataacttatagtatttattcttagttaatacaactttctaagtaatcaagattgtaattttaaatctatagtggaaccaggaagaattaataagatagaatttactcgataaattttagaactacttattgaaagcttaattatgtaggcccgtggtccccacactaactgagataacattgctttgtagtttcaattaattaattaggattctttcttctccttttctttactctaacagtgaagcttattttcattcttcccatgttcttcttctcctttcttctctttactcccttcagataaaaaaaaaagaatcagctaaaagatgaaacctttaagaaagaaaaaggaaagaaacaactttttttggctttcaaggtaatcttttttctcttctttgtaatgtatgagaaactctctgtttttttcaacaaaataagttcaaaagggcatgagacaaagaaaacacaaaaaagttaatgtgattcaaaaagaaaaagaacaagaaaaaattagaagcaccacaaatagaagggtaaaatggtttaattagaagggtcacaatgcaagcacaaatgtcccatagtttttttgacaaaaactcatgtatataaacgtactagctcaaaacttattcctcgttttggttttttttagactttccctttgtggtttttcgttgtttgctgttttttgttgctgtcgggcctgctgccttttgttctagtttcctcttgttgtctttggactattttctctttcttttttgcaccacctttttcacctaaaaaaaagctcaattagctcaaaaatatttatatatatataaacgtactgaaagttctataatgttaatatatataaaagaaaactataagaagatatataactatagtaataaaatatatgtagtataaatgttatatctatttaatttaaatactatcttataaataatatcatgtataataaactaaataataaaaataaaaaagtacaaattattagtattatatatgaatatgttgatatgtttactgaaattgagtaataaatttccttaaacaccttactaacaagagaatctcaattcatcattactaaaaagtttcccctcaaagatagttacgtgtatttttttttggatttatgcactattaaaatattcaaataaaaataaataaaaattgtaatgatcaaaataaccacactacacaaatgctaaactaataactcaaaaactagattaattgaaagaaaatataaataaagacgactaatttatatatatattttttaatttcttaatgacatttttttcccttctaggaacatatgtactctctgtccccgttgaacatttttctcataatttttgcctattatatttttctacatttattatattaaattatgggtaagaagagaaagatgaaaatgatgagtgccattgagataatggcacagaattgtttgacttcaatgaatcattttaatttgcatcgcaaatgaatagcaagaactaaaatagaaaattcaaaagagtacgatgcaaataattttattgaagttgaagatgtcaacaaaaaaactaacttgaatctaattcgcatgcaactaaagcacaaatctatccgtcgaaacagaggtattagtatatatgcaaaagaacttcaccgaagaatcttatataaaaaggtgaaggaattgccatgtacccataatatttttttaaaaaaaaaatgatgtgttcttcttttgatcaaaaaattggtaaaaagagatttgtaaatgagcattcgaaatttgaagtaccaatttaaaagtaaggataagaaaattaccacagatatattgaatgcaattatcacagatatttgtatggatttaaactttacacggtgtagtttacatgttttgcatccactcgtggattgctttacggtcctcttaaactttttatgaaggatggcatgatgattggctgtttagctagccagtcggaaggtataaatattctgaacatggttgatgatattagtgaatttataagcgagggagcatcatttatactactcgtcgagaagaaaagtattttttaccagttgtgtgataaaaaaactttttttggtgaattcagttttgctactaaattcaagtgtatcgttgtaatagcttctggatatggtgatctacacacaaaatgatttctaaataaattgttagagaggatcgacatccctatcttaggtctttttgattatgatatttatggatttaagatatatttggactataatataggttcaaattaatcttcttacgacagttataatttaagtatttctaatctcatctagttgggtctaaggtcaatagatttggaagatatagacgataatgtcaaaattgttttgaagcaagcccaatgagacaaaattttgtaatacatcaaggataattattttattaaggatgatgaaatatgaaataaagagttggacaccatggtggaggaacggataaggtgccctttggaatctgttatgatgaaatctctaaggtatatctagagttctttttagcctaataagctactgaaagaaaaatggagagttgaatggatagacaaggacaagttgtcacaggtaatatctatcatataaatctctctctatctataacttaaattattatttttctctttttcagtgctactttgatagattttttacacgcacataaaaaaagtgagacacaattatacataatatataaaccatacttaatcaactaagtaaaaataaagtgtatatttgttgacactactctgagtacattaatcttatcgatgaccatcactagcctaatatgatatttcccgttcttattcctctctatagccatttctacaaatttgtaaaatatcttgtaaaaataaaacacacttttaggattcatcaattttcggagttgagaaaatttcatgctctgaatgcattaacagtaaaagttgtatcacaataatttgagctgattgttttattttcgaacaactttgagctgattcttgatgtaggagttctatttgttttggacttttattgtaaacgagcatttattcttgatgtaggcttgtatatttgagttgcttcttgtataaggttgtagcttcaagcaaacatagtcactaattaatattgaaaattctaacttttaattaatgttatttttactctagaagaaatcaaagcagagatatcgggaagatctgtcagttccatccactcagcctcccacacacttgaagaggcaaaagaagcagaagaagctttcttcatcacttgattgttacactctgcatgctaaaaaaccattactggagaggcttgaacagattgtggagccatgggatgcgaatcagcctcccatacactcgaagaggcaaaagaaagagaataagctttcttcatcacttgattgttacactccgcctgctaaaacaccattactggagaggcttgaaaagattgtggagccatgggatgcgaatcctcactacataaacatatgtaaatttaagacaaatttgttcggacaccatgggactaagacttggatcgataagaaggatgtcaaagatttttaaaacctggattgggtcggagttgatgctatctttatttggtgcaggtatattagttattaattaatttaataattatgttatttaaaatttattatcaataatctattgtttatcagtcatttgcaggttcgaatggatgaaatatatgcatttattaatcctgcttcaatagctacacaaagtgcacagccccatgctcgtgttaagaatttgtgtgagcagttgatggagatacaacccacccagttgttgatttgcgcgtggtaagatatgtaagtaggtttataatttaatatataactacaaatcgattagtgaatttgaccaatcatttttcattatgtgtagtaatcactagatgttggtgctcatccagtccgcaactcataaggttgtatatctagactcaaagaatggacatactcgtgaacttgttagggattgtgtggaaaagtaagtgttataaattttaacttagtattatgttactaattcattcactaataaccagcttcattttggtgcagggctctgaagcgatacaatctcttgataaatagagagagcacgggtgaaccaacaatcatcgagcacaaggcaacctggtgactatcaatgcggttactccgtgatgaagtttatccaaagcttgatgaacaagcgagatcccataaatttcttaagtactcgggtaaacttgcatagatttcatttgataagtttttattacaaataaattaacctaagtaattgatgtttttctttttgttttacagtatcataatgacgatccttacagtaacgatgagataaacttattacgggacgaatggggacaacttgtgatgagtcaaatattgtaagtaaattataggtttatgtaatttgttatttatgattttttgttaatttgttcatttttagagtttgaatttttctttaattgtaattggttagatttttcttatcctgttcaatcagtacattgtaatttttgtgtggcacttggacaggaagtcattgttttacttgtttaatttcaggaagtctcccacctttgatgatacataagtagaagttgttagatctccacctcctacaaccaagttcgatggagtaaacttatgctagaaggggggccaaaaagtcatgtggggaactaatatgtattattttacttgtttaatttcaagaagcctcctaccattgatgatacagttgttgaagttgttagatctctacctcctacaacaaggtttaatcgattaaacttatgctagaagaagggccaaaaagtcatgtggggaactaatatgtatt

SEQ ID NO: 220769 - DNA, 2349 bp, Cannabis indica
gacattcgggctcagatcttggtgatactatgctacagaaaggatacaagggttagagatctgagcaaatagagccattaatattccgctgcacccaatgtaagattttctgaaactttatatgtgtttaatttcattgttttagaaattcatatttaggatgttaaacaacatacatggtagtaatctagatcctggtaaaataattccaacacttaccatgccgacctaaaaaatcaagaccagacgaggtttgttgtaagaaataaaatcctctttgatcaaatttttgagagaaaacctcgatgtattcgcatggacatatgatgacatggttggaatcgatccatttatagttttccacgccctaaatatagtctctcacaaatttcgtccagtacaccaaaaaagaaggttgctggataaggaaagagcatgtgcactcaaagaggaagttgaaaatctctgagccaacaaattcattatggaggcattctatcttttatggttgtccaatccagttccagtgccaaaacttaatggcaagtggtgagtctgtataggttcattgatcttaacaaagtgtatccaaaggactgtttttcactgccaaggatcgaccagctggtggatgcaactacaaggcatgaaactttgagcttcatggatgtatacttcgggtacagccagattaaaatgtatttgctcgaccaataacatacaagcttcaaactgatgttgacttatattgctacaaggttatggcgttcgaattaaaaaatactggcgcaacttaccaatgtttattaaattgaatgttcaaggatcaaatagggcataacatggaggtatatgtggatgacacgcttatcaaatccaaaagagttttgggcatatagaggacttggacgaatgcttcaagactctccgaaagtataacatgaagcttaatcctctcaaatattcacttggggtaagttcagacaagttcctaggctacgtagttaatgcccgagtaattgaggctaaccccaaaaaaattcattctcttttagatatgaagtctgttggaatatattttaccaggacctagatttactaacaagtatgtttttaacatcctaaatatgaacttctaaaacgatgaaaattaaacacataaaaggtatgagaaaccttacattggttgcagcagaattaaatgactccttcctcttagatctcttaacccttgtatcctttctatagcagagtataatcaagatttgagcccgatactccttcacttgtttgaattcttcagtcttacacactatgattgaggactaacttgctatgggtgggtatgcacttaattactaaggctcaaattttgatggtgaagaacaatatgaatttcgaaatagtagagagaaaagaagaagaagaagaagtctcaaaacactagttgtcttacagaatgaaaactaggtttagaagcattagttggataatgagacatttcttttctttttatactaattcacttaagattaggattgaattatttggaataaaaaatgataaaataatagcaaaaggaccctatggccagccacatgtgggctcgccactagttagatttttgccacttttctcaatcatttatctattttttacaaacaccacttttgcaatttcaatcttataaatgaaaaaactatttatgtaataattaaaattaattataaaataaaattgtcatttatattatttattaattagactccacaaagtctcttaattaacaaataaatcctaaaattctatttcttcacaatcaagccatatcttagtgaaaaattcataaactagacatagtttaattttagaattataattgaataattaaaatcaattaactaagtcttacaagcagtttatctcaactagtatgagaaacatgtacctatataaccgagcttttaataagcagatctaaaatttaccaagtaaattctctaacttattaattccaccttgtaccactatagatttgaaattacactctcaattatatagaatgctctatatgttccacggtatagttatgctatgagattattcatttgttgttatcctaataatcaatgattctctatagatgatctacattgagtagggacaaatttactgttacacccttcaacgtattttatccttaaaacacttagctacctataaatgatattccagtaaactaatataatcactggaatgagtactcaaccatttatctctgttaaaccaacctcaaaggaaatcatcgttccacttctatgtcctgatagaagctatagatgccgtatc

SEQ ID NO: 220770 - DNA, 2241 bp, Cannabis indica
tataatagttttgtattaccaaaaaatctgtatatactgatgtttattcgtggtagatgccaattgtttgattctaattgtcacagtataaatggtaatattcgaatgataaactatttgattattgttattattttttttgctgagtccttgtgacacacaggtactatgtagtgcaggttaagccaaagaaaagctagatcaaccatgaaataacaatcttctccaacaatgtacatattgaccctaccgacgtgagtgccgagttgtcagtagttactttggactgtattggctgtgtattttggtttttgtattttgacttgttgtcatatagtcttttataacagcgatccctgaaacatatttttatgccgttatgatgcttgttttaagtgttttattatagtcaagtttttaatatcgtcacggtttataataattaatcaatctattagtattaaactagtttataaaattacacacatgacgttcctatgggatagaacgttataaacggagtcgaggcaacaagcagtaaatcgtgagagcagttttttttattattttttgatagataattaatttaagtttatttttataaaaaaatgtaatatataattatatagttttgagtttatttatgattttgattatgtctttgttctcatcttcaatttaatgatttatttatagtttattataatatattaattttaatttatttttttttacagaatttataattttaatttttttataaaagagttgatcgggttaacctgttgaccctgtcaacccgtgacccgtgactcgtgagcccgcgaatccaaccatttcacgagccaggttcagatacaattttttaaatctgaaacccgcgaatccaaaacccgacaaacccgccctatgttcaaccctaatttttctttaaaaaaaaattatttatggggttaagtgcgataaaatatatagttcatgtgatttttcgccaatattccaaatagatttttggtaacttaaagttgttaaataaatttttgtattgtatatatatatatgtaattcatagtcacattaagtttttttttttttttttttttaacaaagagaaacatttacaacaatttgaataattcaaaaagaatttttgcaacaaaaaaaataaaggaaatttataatttcgtatacgggagcatttggtatgaggtattcaaaataatgtgattatagagaatattatgaaggagaatatgattaaagggaaatgtgtaaactgtgtttggctgtgtagggtaatatgtaatcatattcctattaattaaattacactgtttggttgagtacatgaatcttatgtattattgtgaaaaattaaaataaaaatatttttttattatatctatttaatgttaattacatataaaaataaaataattatttattaaagaaatatatttattaattaagtaaatattaaattttattgtattttttattaattaaaatgaatatttctatatattttatcactatgttagttatttttgttcgctatgtcatttatatataccatccgcataaattttatatataataaatatatatacgttactgctaataatataaaataactcagtaaaaaaaactgatctcacggactaaatatatatatcgtaatattttatttataataaatgataatattattggtatttaaatttatttattaattcaaaaatattattcaaattaatataatggaagttaataattcaatcctatctttttttaaggtatgaacattaccctcctcaagggtagttatattactaaggaaataataatccaaggctaaaccctccaaacaaacaaggtaatgcttcacattaccattcccttactagcattaacctattctaaacagcccatggttacactatataatacaaaataatttatttacatttaattatacattctatattagatatataaacataattttaattttatatacaatttatataaggtaattaatttttcctgtcttatataaataaacaataagcatacttatttttccttagtaaaataaaataaagatacatattttgtttataaaattatatattaaatatattagattaataatttataaacattatcaatataaaatataaacataatatttatacatggttatagtttcgtttttttaaaacaaaataaacataaata

SEQ ID NO: 220771 - DNA, 2099 bp, Cannabis indica
gtaacgtccaatttacaattattatgctattgaattttttaaaaattaaatatttttttaaattgtaaatcaaataattttataattatatgtaataaatttttaattaaacttttgattaagaattatatatttaaatatataaaaaaatttaaacagaagaatttattacatatagccatatataagattatgtgatttacagtttgaagaaaaattatttaatatttaattatttttttatatataagggtatagctgactatttaaaacagttgcttatactatagctggtgacaatttttaacgatcgcatatagtatagcgactgtttcaaacagttggttatactgcttttaatattggtgacagttttgcacaatcgaaaaaaaatttcccaatatttttctaccgcctcctattctactctgttttgcaacggtcgaataagtgttggttttagagatcgatggtaatactttgcccgagagtcgggaaaaccaataaattttgtagtattttttcctaataatatccatgcatttattccttgttgagttcatttccaacttgagaagaggaatctagctatagcgaagtatatgttcagaattttatgtgcctataagttaaatttgttgtcttgatgaattgggtaatttcttataatatttgtatactcatattctttactttttctatctgataccttttctttcttctctagctatgtaggttgttgcacacaccgaaaggagcatgagattttaaagtaataaaagggtttgaatattttaatatcagaccctgaagttgctacttgttattgaaatttgaaatctatccataataacaataacaataacaattccttcaaaaaaaaaaaataataataacaataacaataacatatctataattttatttttgacaatcaaaattgaaggaaatagagaaaaaagtatgtaattttatgtttgtgatgtcaatcttatacccaatttaaagtaaagtgcacaaaattttacgtaattttgtttgttttaattattgcaatttttattttttacgaaacatttggcaaaatttaatcaagtatactactccaaatccagtccttattttgatgtttgtaaaataacaacaaaattttattatttatctatatatatatatatgggtaattttgtgacatattttaggttttaattaaattctaaaaatgcatgcttcaatcttctttttctcttttgtgtgttgcaacaatattataaattataagtttatgaagatcaccactacactatgtagttaattatgactttcaaaccaattttaaatcagctggctagctagctgtcatacaaagtactggatagcttaaagtaaagcattttaattttattatgtcccgtttttactcttgtcaatggcattgtacaggattcatcgtgtgaactttagatgaaatgaaagtgaatatatgcaattgtttaaaaacacaagacacacatgtgaaatatttgaaattaaatattccttaattatagtgtatatctttcgattcttttccttaatccaaataatggttaaaaaaaacaaaaagatgaagataagaaacacgtgtaaatgaactttctcgtaaattttagaatatatattaacgatgcttccatgaggtatgagaatgacgcaggtatgatgatatcagcatgtttaggtcaaaatttggaaatttttttggaagggactttagaacttatttaaattaatcaatataaatttaaaattttgataactattataacatgtagggaatactttaccctcttggcataattgtaaattaataatttttaataaactaacatgcttttttaacattaatttaaatttaaccagctaaaagtattaaatcgatcaaaataatatcaaggtattttgatctactatgtaaaatacaagatgtgaattagggacagattgatcatatatttgtgctgataaatacagatataccaaattaaaattttatgatattataaaaggaaatttacattggtatactaacttttgttatttctttacaaaaatactgt

SEQ ID NO: 220772 - DNA, 1790 bp, Cannabis indica
aaagaaaaaaaaaagacaaaatttgaagtgatggataaaggacaagagaaataggtcacataatacaaagttcaatctatacatgcaactcacaatgaaatccattaagagaaaactgaaatttataaattaataccccaaaatgtcatagtggtagttgcaaattgtaatcggaaaaccaaaaaataagagtctaataaataaaactggaataaataaataatgtcttaaaacataaataatttattctagaatttgaaatagcgagctttgtcttctagcttggaatgattctcactttttattcccaacttttagcttcgacccgctgggagatgtatcacaagtctcaagtagaagcagctgtaaataagaacacacatagtcagtagatctagaattgataattcaaatggataaccattctctaaaattcatgaacaaaagaaagagtgaggaatactttgattctttgccaaaaacttagaacactgaagttttcagtgtcccttttcattgtaatgaaaacactttcctttgccttttgctttatgtttggaagccttcttccccttcccaactatttaggcagctttaggagctttaggattaggattgttccctttcttccttttcttattgttgttgttggcaacaaaagcagtgtttgcttcaacctgagccgcaccattggtagtagtagcaggagctgtacctcctttctgtggtcctcctatcaaactttcaaatgtctaaaggttattgatcaactcaattaagtcaaacatcaaattgttcatatgatagtttgatgtgaagggcaaaaaagctggagatagactattaaaaatcacactaacttgtgtttcaagatcaataaaagatccatggagttcaacctcttggaaataacccgctatcaggagtaggtgatcatggacatgctgatttggtttcatccgtgtgtttgtaaagtttttggtcgcatcaaaatgagcttgatgcgacgcctttccaaacagttcattcaactgattcataatctcaactgctgtgaaattgttagcaaaccttattttcaaggtgtctatcatgctagacagtataaagaatatagctttattataggccttctcccaacactcatatctttctctaactatattagtagcattttcacctgacatctcaggttgttcttctattagaacaaacagtgaatttttacctatgagagcaatatttatgttctctctccacttgaggaagttagctccagtgagattattttcagaaagatgtgacacaattgagcttgataaagacatagtgggcactacaagtatcaataaacagaaatcagtcacatggttcaatataaatccatacacattttggaaaaatttgtaaacattaaacaaataaagaagctataaaaagagtataaatataattcaaattattatctaagatttttaaccaaatgacatacaatgtcacatattggacgggatgcaaggatgtcacttgttaaatagagtagtcagctcatctaaaatatatttaatttagcaacattttattcaatcaaaataagaatttaacgttgtcccgtattgggcgggatgcaatgttattcttattttatgagcttttgtcattgttttatatttgcaaatccaattttaagtagtcactttttgggtgagcttactatagaatataaatttataaaatatttatttttcaagattttacgatgttcaattgtctaatggatgatcatctat

SEQ ID NO: 220773 - DNA, 2489 bp, Cannabis indica
cgcctaaggtagttagggtgttacaaaagcttttgaagaaattttagaaaaaattggcaaggttcaaaacatatttatagcaaaaaacaagagccaacatgcattaagaaaggatgccacgaggttgaacacgaagagcccttaagtaatcaagaccaagacacgtgttaaccaattaaacataccccgaatctcgaaatgctctaagagtatatatgtctttccaattttcgaggtgtcttttccgtttttaataagggtaagtgaaaaaaacaaaaatgtgcaaaaaataataacagtaataatgatagtaaaaacgaaagggcatttataagggaagatcaaaggttccattaatgaagagagcactaagcagtaaaatttaaagcaaaatacgtaacaccacacgagatttaaaactaaagtagaatacatacacaatgcaagaaagaccaaataaaaagagaatcgtgcttaagaaaactaaggatagagctattacaaaaaaaaacttagaattagaaatactctcgattaggatgatgccaacacaaaatacaagcctgggatcacaatagaccccctcactaccctcttcatacaccgatggcagcccataggaaaaccaggaggataaaaggaaccaccatccctcaggcactcttccatccacctttcatttgctaggcgttcacgttccaaatcttcatcccattcatgacggttcctagctcgtagtcgacaatgatcgcgacgacgcttggcaagcaatcagagggcatgaaactcaggagggacacgagtattagaagggacattttgccttttgttctcaaagaaattttgaagccattcctcatcaaatgatgaagatgcgtcattacgcctagcacgataagcccgcatcatccttccaacaatggcctcaccattaggctggttgcaatatgaaaaagtctcagggcaagtaggggatcaatccccaacatcagaatggatttcatccccactcaaagatttaagaaagggagagcttggatggtttgacatcttcgcaaaagaaaaagagaagggagaagaagttttaagaaacgaggatagaaagactgaagtttttaacaagaatagtgaaggaaaatgcacgtttaaataaacctaagaaaaggaaggtggaaatgtgaagccatcggtcaccaaggcattaaatgtcattaaataaacactaccaagtgtcaaactaccttgagaaatgatcatgcacataaaaataaaaataataataacacaagcaaaataaattaaggcatcagcctaaataataatccttacaaaccataaaataaaaacatgattgtcttaaatagtgtatcccttgctaaaaaaaagagctttctcctcaagagggtagttttcatccatcgtcggcatcttcatcatatctggcccgtccgagtcagaagaagtatgcacgagattctcatctctcttgaactcgacataccttttgaagaacccctccaaatcccatgaagcaaacttaccctccttaaactcagagtagagtttaaaagcatattgataacttccactaaggaatgccttctcaacctgcttggtcagaaccttgatctcttgaaacaaagaactcttctcatccaccatagccttctttgcctggttcgtcatctttgctgcctcggataatttgtcgtttaaggaggaaatctcagacttcactgcctcattagtagaaaggagagtattacgctcttgagtcaaggcatctttctccaatgtcatctcaaatagattagtcttgagcgaagcaaccttatcacttagagtttgtttctcagactccatgactaagcgagtaagatcccaactcttcttttcttagtcaaaattgtcgatcttactcttcaacaacttattatcaacttttagggcattaactttggagatagcggccttctttgtagcattagctgtctcgtaactcttcttgtaacgggaataacccttagccagactctccttctccttattcgtctgtggagaaaatttcatagcatgggcacacctcaaagccgtctgataaaatatatttaatagttctgatcaaactggtaaaatactttaaagagacatgcaaaataataaatagatttggataaagaccttgattttcgaaataaaattgtccatcagagttgaatctcgccccttagaaatgtaaaagtcatcatcaggctttctaatggcctctaacaaggacttgacatagttttcagcagactcctcgaaagggtcatctttctaaatatagaaagcaggaatttcatcccactcggcttgaactctgggggtggatagctaaggatggggaacctcaactgctagggaaggttgtgttggaatttatttaaccaggatcttagatctactcacaagtatgttatttaacatcctaatatgaactttctaaa

SEQ ID NO: 220774 - DNA, 1846 bp, Cannabis indica
ttggctattaaacttctctacgtaggctgcattgtcagcgaatatgttactgcgcttctccttctccacatcatctatataagtacgtccatgaacactcatccattgctcatgtttatcttgagaggaggcttcgtcttgccccaatcgtcgacactctactaaaggacacactttactataacctaagattataactagtaccacacataatattgttgtactcatcattcctaattcacgtacaaataacgccatgctagtatgtactatttgattattatgcaaaatgattctttgattttttgtttttattgatatctgaattaataacctttaattagtgaaacattgtgcatatatatatatgtataggaacagtggtgttcttgatcttcaattttaagggtgagccacaattgtagatggaagtgacaatgaagcaacttttgaggaattgggataaaacttgtggcgattaagttggagttcaattttagttgtagaataaccacacaatatttaacttattttaagcaacactttgtaaacggtttcttctcattgttagtaccaactttatctctcattattagtttttaaattatttgggtgttttcagtggaaattagtagccagttaaatttttattactatatttatcggttctctttattttgacagtggtggaacatacccctaattataggaggagccaaattaggaaaaaattatttttcttgcacaactattttttaaattaacacaaagctaaaaatttaatactgtaatagttgtttttcttatgcattgaactaaattaaaatactagaaattgtgatattcctgcaatatttttttttgcatacttttctatgttgcaatactattcttcaatgttgagacattaaaattactattacaaaattgactttcaccatcactgttttttatactactttccaacggttcgtaaatcagttggctatgtgggtatcataaaaatacggaacataaaatgacggtttataaatgtggaaaaaattcactttaaatgatagtttgcaactattaaaaaaaatactttaaatgacgatttatagctattgggaaagacttcaatcagatagtaaccgtcgaaaaaagtctctttaaatgaaaattattggaaaaagtcactttaaatgaaatttataactgttgggaaaggctacagtcgagctataactaacagaaaccggtacttgaaatgatggttataaatcggcgaacaatatgaggtaagagagaaattgtaaatactaaggccattcttccccctgctttttcagaattcaaattttcaatatacaatgataaaaaacataataacagtaataatattcttataataaagaaatatatatatatatataaaaaaagtcatacattggtcatgttagactacatatacataaaaaaacctccatacattggtcaagtgagaatatatatctcaaaaagacagtcacgtcaacctatgaataactatatattctatttaaatcaactactagtcatctcactctgttttatcagtcatttgcctagagccatcatctgcatgacatattttgcccattcatcacatattttattaatttccttgttagtgtaagagaattatatgttctttttaaactgcaacaaatgagacaaatttttaattttaaaggtgataataaaagtatttaaaaattttgatatttttaaaaataataagtgtacatacaaaaataacaataaaaaacaacaagttgtagtatacctacaaaaacaaaaacaaaaaaccaatataaatgaaaaa

SEQ ID NO: 220775 - DNA, 2507 bp, Cannabis indica
gttgggacgaaatcgttctatacttgggttgggctatgatcccttcaccactgatttcaaagtcgtaaaagtctcatcacttgatgagaatggtgttgttggccctaataattttaaaatgggtaatcaaattggggtttatagtttgagaagtaattcatggaaaataataacaatgcctaacatattttcagaaattgaatcttactctacttctgatataactatcaatactcatgtgggctgctccattgttgttaatgagtgtattcattggatgatttgctttggcaataccactgattatgaccaatcatctttagggatagtttcttttgatataaaaatggagaaatttaagcttataaaggtacctcaaattgtaaaagtatcccatgctaggaagctagctaaattttctgggtgtctttcttttgttactatgaatgaagtccaagtagttgaaatttgggttatgaagaaatatggtgacttggattcttggttcaaatatttgtctatcaatctactcaatcttcttccaagtagagttggtgagtattttccagtaggttttttgagcaatgggattcttgttatttcttgcactgatagtgataattggtattggtatgataccaagagtaagaggcttgaaagtatgggtgaaataattggtgtgtcggcctttacaacatatgctgagagtacatttaagttaaagggttgagagtttgtacggtcagaaaatatggatttatggttcatggatcatgcatattccctttgtgtggtaatgtattagcagttggaatgtttattaaatgtaaagatagtgttgatttgtgatgttggctaataattcttcaatgagctgctacaaatctattgatattcactggtttattgatggcacttgctggttggtaatacttttttggactgttatttatgatcttttgggtgccccatgacatgagcctaactctttgattgagctccttcagtagctagcagattgggctactttgactgagactccctgttaggtgatcccttaaaaaagtctactctttgttttttagaatggttaatgagtttgtgtttattagtgcatatatgtgttgtgttgtaatattagatgcattagagttaggatgtttataaaatgtaaagacagtgtttacttgaccactttacttacatatagttctacttggtttgcttctaaattcttccattagctacaaatttaggttacgtaggtacctgaatagcgacttgtatggtatattcacttctaaatgaagaatgtatgtgacaagtgatagtggaagaaaataagagtcaaatattgtataatatatgctttcagaaaaaaccaatattgtatgatatattcacttctaaataacattaatacatctatattcacttcttatggtagttctctgattaagttcctttaatttttcagtttgttgttgttttcttgatgtcttagctttttgtcgatcactcttagagtatctccaattgtatattattttactaaattagtatgaaatcttcacaccttatactaatggtacactaaattatgtactaaattagtgtatactaaattctatactattaatagtgttaaattttgagtctataccaatttagtgttattttttttctttacattctaactcttattttaatttattttaaaaattaatcttatattttatttttcaaattaagatttatcacaaaagtgataattaatttgaaacactaacatagtggaaaaatataaaattacgataacaaaaatactaatattaaataaaataaaaataacataacactaagttatgaaacgaaaaagaacaatataaataaaaataagcattaggtaaaataataattttataaacgtgggattttatttaaattatttttttaaaaaatgtataatgttttattgatttaatagatattttattttactaaattattttaaaattttaaatttttactagaagtcattatataatcatatcataaattaattattttgaattattaatgtaaataatataaatataaaacttttaagtaaaatatatttatttagtgaaatatttgatgtaaattatgggagttattgcacaaaaagtaaaaatgttacattaaattagtgtgtattgattctatatcaaattagtgtaaccattagagatttagacggtctatttactttgttctgtttttcttttcttttccttttttagtgaaaatctcgtataaaaaaatctcttatcttcatcacattaataataattactcttatttcataaacttaattaatttttattataattaataaattaatagctttacattataaaaataaataagaaatttaacgactaattagtttttttgaaatcacattccttccttcaaatactaaatttaaacaatagatatttttgactttcctcaaaaaaaaa

SEQ ID NO: 220776 - DNA, 2968 bp, Cannabis indica
ctggccatactttgagagagtgtatggtgaaggtcggccaacctgtgttgaattggagaccctcgttggccattcccaagtacgggtgttggctttggccggccaggtctacacctggatgctatccttggctgactagacctgcattaggcagggcctggccgaccatttctccttttatggctggccagacctacaaagagcaaggtatggccgcctgtgactcctccatggctggaaagacctgtagagggcagggtctggtcgcccgcaatgcttccatggttggccagacctacagagggtagggtctggccacccacaactcctcggttgactaatgtttgttgtgtgttgacaggaggtagaccacaccagttgttggagtttggtgaatttaggtgccagaagtgatcaatttcacttctcgaattgctattttgggtgtttctacctgctctcgatccttgttggttgaagattgacctctgggtgcctcgctccccttgaggagggagtgttgtcccctggccgaccaagggtactcttgctggtggctggccgaccatagggtgaataatgggggtgttgctgagctagagatccctggccagcccccccatcccactggttgtcgagatctagctgttctcgccgtcaaacctttggggaaaggtctatcctccctctggaaagggaagatctatccttgttcccgaggaactaggttggtcagcatgtcgatagaccctccctgatctatcaatgagtcttccttgaagtggatctctgatgagatcttggcctcttccattgcttctctagttgaactaccttatcaaatcactggcctctcggttgcagcgatccaattttgcttggtgagatcaaaagatgtactcctggtcatccatccatctcaggaatttgcatctctgttgagcaaatacatcgcaatcagtagcgcgtggttctttaattaggctggcttggcctacatcttctctgagtctagctaattcaagatcttctcccaagtccacgtggggcttgcaggcttgccgactcctagtcctgtctctcaagcgtaatatcggagatgagatccaattattgttcttgggggctgttgcccatgagtccttgctttattaggaggccccaatggttggtcttcccttggaggcaaggacctgctatttggatccaccgggatgcttgtattagtttggccagctgtagtggccaagcttgtggtgcctgttgtagtgacaggatttaccacatctacggtgttcatagagatttcagttgtggttggaacctgagcattcagatctacagtctgtgggtcttgagggagacctgaagatgcagacggtgcaactggggttcttctcgtgttaaccatggcatttgattagatacgatatccacactctcaatgaaagcaccaaactgttgacctcaaaaattaatcactgacaacggggttgtatggatttgatgcttgtcacttgttacacaaatagaatgaaaaagtaaagaatacatagatttatcgtagaggcttggctcccttagatagtgggtaatgacctactcattttttagttgtactattactgagggttaatactataagatcactataggtgggatctgatatagcaaccttttaaatataatgtaggaactgggattgggaaatctcaagtgttgagagtgttggtatgggcgtgtgagagagggagagagagagtgaagaggaagagagttattagacttaggcttagagcttcaggctgaccagccatggtgctgtgcagaggttggccagccatagggccggaccaggggtggccaaccaacttctatgaggaagctggtctgtcatttgatgctcatttgagtgtcgaggttcccgtttactaaggtattggtttggccttctcgttggtgagccgtactgccacgtggtcttaattttgtgcatgtaagcattgccacgttaggagaacaaaattaggataatagattttgtgatcgaaaatagattctcattttgatggaccaaaaatcatagttttctctatgaaaaataagaagaggtaaagaatagtggttggagtcgaaattcatggtctcaaattatgccaaacaatccaaacggagctctgataccagtaataatttgagaattaatgtgtattagtttttgaataggtggatatgaaggaataagtttttagtggtttttgtgataaagtagtgaaatagtaatgttgatgagtagttgttgatttagtatatgagaatagtttggcttagataaaagaattgtatgtaaaaagtagtaagcttttattgatagtttgtagcttttttttttttggtttggatgttggttacaatttagaacccttgatggctatttatatagtttctagcgttcaagcttttgtgctagaatatattgtttgctctcgatccttctagttgaaggaatttctccatacaattctacatatttcttaagcatatataataagaaaattctagactaaagtttttttagaaatgcatgtgtattttattgtattttttataagtctagaaaactctgaagtattctacaattatctaaaaaattagagtaagtttttctacaaatgtgtagaatattctagattaaattgagtactgtaaaaatatataacaatttgtaagatgatatataaatgggcattttacaattttgtatacattattttaattaattacaaaatatgtgcaaaaaaacttattatcattttctcatacacttttatatataattaaaaactttttttcaatttttattataatatatatatggtaataattattgattagtatatatatggtaatattggttatgtttatttttatgtttacaattacatactaataatataaaacattttat

SEQ ID NO: 220777 - DNA, 1798 bp, Cannabis indica
agaacttccaaaattattttaggatctgcaagtacgtaccaaggaacctacaagacaagatgaaaatagatatcatcacatgccaccaaagagtaatgtgatcaatcaaatgactctctctttctctctttatagactctcagaagggattcgtaatttgatctgtttgatgcataactctttgcattacatttacacacccacaaatggtgcatgcatataccatagtcaacaatgaacataataagtaagggtttaacgtacggtatatagagctaggaactgatttaacagttgcagtattttcgacaaccttttttaatttcatctacgaattcatcaattgtttaatcatgtctatgtagagttttttgacacattttcacctatcactaaaataacagttttaattttactagctgtcatacacaacttaattgtacactaaatgtgaatgttaagaatatgttcctcaatggtgaactagaagaggaaatttacaggatcaacagaaagggttcgtgatccatggcgaggaacataaggtctaacttctaagttggataaatcttgtacggtctaaaacagacatctaaacagtggcatgagaaatttgacactttagtcatttcaatggttttgaagtgaatgaaagttgtatatacatggatgacttgctcattttttggtgctaacattcatgtcgtgaacaccgtgaaatcaatgttgtgttctaactttgatatggaagatctcagagaagcgagtgtaatccttagaataaagattactaggtctaatatgagaatttctctagatcaatctcactacattgagaagattctaaagaaatataattactttaattataaacctgtcgtaccccatatgagtacccaagtgtaaaataatttaagaacattagagatggagtaagacagtcagattatgctagcataatcagtaacctttgatatgcaactgactgtactagacagtcattgtctatgtcgtgggattgttgtttgccagtaaatctagtataaagcattggaatgctattaagaagttcatgaaataccaaaagagaaccatgaaccttggattacatcattataagtttctagctaggtgtacttgaaggatacattgatgttgactggaaaactttatcagataactccaaagcaactagtggctatatttttagtatagctggtggagctattttttggaaattaaagaaataaactatttagcacagtccaccatggagtttgaaatgatagcactagctaaaactagtgaaggaataggtaggttgagaagtctgctcgctgagattcctttatgggaaagacttataccaactgtgttgatccactgtgatagtaccacgactattgcaaaagtttagaacagttattataacggtaagagatgacagattcttcgcaaacatagtactgttagagagttccattctattggagcagtaagagtggagcatgtcactacaacaaaaggaaccttttatccactttttaaatttgataaaataaaagtgagataaaaacttttgatcccacttttacatttggaaccttaaacacatgttaagaacaagggccttgtttgggaatcagacaaaaaagtgttggaaaagagatttttaagtatttgccaaatgcaaccttagcattttaagtaggactttttctcccagttcccaattttatgtaaaaaccgggataaaaagtcccaccctattttttttttatagctacacatatataag

SEQ ID NO: 220778 - DNA, 6569 bp, Cannabis indica
aagaaaaaagtgtaaattatgaggagtagaaaataaaaatactaataagcattgaaagtaggataatagggcatgtgaagaagactagataccacaaaatcttttgctttaaatttaaaggctgccacaaaatcaagcatgccctgaaattttgttagcattccctaggactaggtaggactactaagaccacaccaaggtctccaatgcattctgtcggtatgtataccaacaaaaaaaagtatagtatcatcctattcactcactattgacctttttctttgttataaagaagaaaaaaatcaacaactaaaaaagggtatcatatcattcatacttagtttgcttcttctacacttctataatcatttttcattgttctctcaacatcaatggtatgggttcttaaggtaataacttttagctcagatgaaaataagatgtgactacaccttataaattttgcactattttattgtgtgattgaaaaataaatcatctacttttacaacctacattcaaatcccaaaatacatgtggaatttattatatttttttttctatagcaattttcattataggttacaacattgtgagtgtcgaaaacaagtttaaatttgaaatatcaggaatcgatattgtaaattattcagaattttaaaaaggtttaaaggggtaacataactataacgaccacgacaataaaagaaatatttcggcatatctttctggaacgcagaagttgagaaaaaagttgtaataaaatgttgaaattttgcacaaattaccagacagtatcagtcccctaaatattgcactaaagtgcatatcataacataccaaacaataagtaaaggtattaccaaaacatgcatgtaaacaattaactcatgtctatgttgcattttcttccatctcatctctcaagtacaacttttcatatacatataataactccaatacataaggattatatttaggaattaagggcccggcgcggccgggagagcgcgcacggtatcaatgttctttttacaaaacagagtaaataggatctactaggcatagagattcatacttactcaaatgtcataacatgtaaaaaataataacagctacttaagacacctaatacatcacttagttgcataaacggagtcggtcgtttacgcatttgcaaaaccaactccaacaaaaaattgcactagaaaactcctatacctgactgccctggaataaaaactcaaccccaataattttagtggaggggtaaggcaaaggttgccgcaaaaaagaaagttaaagaacatttatctacctctgcttagccttttgttctcataattgtgatgctacctcttcctccttcggtacgaatcttagtctttccaacaacaggcttaccggaaaaggctgaagtggggtaaggaatggttggatcttcgtacgttttctttgactttaaaggtggtggagttcggattctctggtttatatccttcagagttacatctccatgggcacctgagggtttaataaaggcaaacgggtatgccactgaagtagccagcttagttggagttcggatgaaagactttctacctaaggtacatgaaaacaaaccatctaaatattagttccttctatttgcaacaatcaagaacataaatccaatgacaatgacattatgaatttctttcatgaccaatacttcctaggcggtgtgcaaacagattttcgttacagaaaaataagacaacaagagaaatatcaagaacaaggacatacctttgataactatcttttgtggagtagaaacaggctgttgaggcaagttattttcatactctggtgcagtctcacaaaactctgcaacatcaaaaccaagtacacatgagagccattgacgacataaatgcagaccggaaaagaatagtaaaggaatttaggtacaagttgaaagagaagacaaattgtcatgtacctgagacattaatttgaaaatcagatgtgccagaagtattcctgaatttcacataacacagccatcattatagttagaagtagttttatcaaaccatgcatacaagatttaggccaaggaaaggaaaaacatccaaacaagatccaaagaaagaagcatacaaagtatcggagctcaaatgcatcgaactatcattaaggcagtctgtaatccattcatccgacgaatgatccagtgtctcatatccagaggcagacgcagatgtctcttctgaaataagttacactagatgttgaaaatctaatataaacaatttgtacatattatatcggaatagcattcagaaagaaaagaaaaaaaacctgtgaatccagacatccaatcggaaacagagggtagagcctcctcgagggaatcaatttcctaaagagcagaaaaagatgagacaaacttataggaggaaccaaaaacatgcagtttgtgtcctaaaaaatctctttaaacaaatagaaggcataatttccacgaaaatcttgaaacttgacttgtttaacattttagaaacactagggcatcatacaccacaaataagcacgtaagaaaactgtaaatcacaagtggtaacaccgacttcagtctgagatgaaaactatttcaatacaaatgaagagagcattatattttattcaatttatatgttcaagatcaaaaatggctcggtgtagtaactcgtgttttataaagttcattatactttcacatattgctttcaaacattgtaaaatgctttcaaaatagcaatccatagcagagggataaagtcaacaaacatttgagttaaggaagaccgatgaaatctcatcacagagaagggaattatccatgtcttcgttggtaaattgtagcatccggcgcctcttcatttgtgaaaatgactccttttcaacttccttgttcaaattatctgacatgcacttaccaacattaaaagagcatatataggggcatttttagttgcaattaaatgtcaatacacattgtggaagaaaaccaagaagaataaatatttaccgttgtggtcaccgtggtattccaaatccatacaggccttaactggggttgcttcctcatcaaacatataagagatatcttctccattttgagccactccattccaaaggccttcagacatgactgttcatcagtcacaccataaaataattaaacacaaaatccgatatcttccaaagtatgttgaaatttagtaagttttcaagccacattgtgtaacataccgtaattcggatccttttggaaatgaatatccttttcccaactccattgctcacttctgcccaatttacatcataatatgagaaaacaaacagtttaataaagaaaacaagtagaaaaacaaaataaatgaaagccatagccaattaaaaaggacaagacaaagagcataacacaaaactcagaacctaaactacaaatatagctcattgaatcgtgagttgcagctactgctactgcatttctttctgttatatatgtcttcacatggtgaatcttacaaaatgaaaagggcttaaattcaacatcaaacacaataagcaaaaacaatgaaaaccatcaccaaaatagataactattcagtggtgaagaaccagccatctcattctcaggtaattaaagcacacaaataaataagaaattagatatataacaaaaaagatagaaaaattagcagtggaaaattggatccagtactgacatttccaaaatgaagaagaaaaataaaaaaattaaaagggcaatgctacaaaaaattgcttattaaaagggtaatcataatccatacataacccattcattcacactcattctctataaatctgcagaataagtccaaacactccaaaccatcttcacacatttaactaaaaaaaactcaaaatacaaaccaaaaccaaagatacacaaaccacaaagaatcaagtacagacaataaaccacaacaaccaataacaataataaataataaaaaaaaaaaaaccaatttctgagcaaaacccagatacgaaaaccgatcatagatatgaaaaaccaaaaaagaagaaaagggattttacttgtcgttatcgcagtccattgggtgaatccaagaaagagaagtgagtcaagtcaatcttcttacagttgaaggtctcctctttccttaagaagataaaaaaatagccgttagagaggaaggagaaggcgtatttggtgagtgagtatttataatctcattcttcttttcttcttcttcttcttctttcttgcttctctggtagtactgggcttgttgagatgtgtgctagtctcaacaatagaccattaaaaagggctacacacacctctcctccatttcgttactccactctttcttttttttttattattaataattaataattatagttaattaattttaatttattttttagtgtaaaattatttttgtttttattttagacacgaaatttcgtatatcccaaagcataggaaaaaaaataaaaacattgaagtcgatggccatggctttgacagagtgagggacccatcactctctgctccctctttcctattatctttttttttctaaataattattttctatcaaatttaatagtaataattttacactatggtttagactagggcacttaaattttgtcttagagagcaaaaaaaaaaaaaaaattatagggatttcttacaattttataacttaaaatatttagttataaaaatataaatttaaagttttaaaattacgaaaatataacgagaaattttagaaaaataattacaaaacaaccatgagaaaatcaacttcaagacaattatatataaatactatagaataatcaaaaaagaatatcgaacaatctactaaagtctgtatttttataaatttaaaagttcaatcttgacggatatagaatttttttatctgcgcggcttaattgttataaaattatttatatttacattacataaaaactatgatcattttatggtggctttttactatttttttgtataattatttaattaaatggaagatatttaaatcattttcactaatttttttactggggctataggctccccaactataattagtgtgtttgtttctgcgtgacaataaatttttttctatgttaacgtatttttgtagttttttaacttttggtgtattatataaaaaaaattaattatttagtcatatttatataaaatataagatttattagttgtatgtgaaaataaatatataattaggaaagccagaagggagtagatttataagtatttatatttttatatgtcacctagatttaaataaagtccaagaattttttgcttgccatatttttatattaaaaaatgtattaggtgacataggtgttaatttctttaatatttcttaaacaaataattacattttttaatgtgtcctaactggtcgatgcaaatcaagtccattttttaatgataggaataatatttaatgtataaattattttttaaaaaaaaataaatagtttgtgtagctcataattaatacccctactctcctatacattaacctcttttttttctctttaaagatttctaatgtacaaacctttttctaacaaaaaaaaaaaaactaataaaagattcattaaataagaaatgtatttgatctgacaaaaataataataataaatgtatttgagaaaacaaagttgttatgtcttaaaataatttatttttctttcccataattttttaccttattttctcttaaatctatataataaaatatatcaattacttatataataaggtgaaacaaaatgcatgaattttgattagatttttcattctttttttggcagtgaaatttgactatatagcacaaaatattgttcgaagaaaactgtcattcttttttgaacatttgaaacctatcattcaacatcaagaaagagctaataatatgtgacttttttggtatataaatttaaacataagatcttattttatttaatttttgacaatatagatagatagatagattgactatgaaattgtgaatatattttcaattaataaaataaataatagtaaaatgaagagaagtgaaattaattataaagaaaattcacgtggcaattaggtgcatgatttgacggtgcagttagaaaggacggaagacgctccatgtggtccccacatccggttactctctttatccactttcttatgtaatatattaacttgcgctgctgacgtgtcttcggttagtggtggaaaatacagaagactacaccccattatcattgtgggctcgataaccagattttagtttgggctcgcctgccctggcctggcccaattcttttgtccgtgttgtttggaaattcctccacgtcatacaagtgtaccaataataaaaaaacaaaacgcaagcttttcttctttttttttttttgtagtaaatatatttaaatgcgggaaattaattataaatattggaaaaattttatgg

SEQ ID NO: 220779 - DNA, 2781 bp, Cannabis indica
ttcaataaaatagaaaataataatcaataataatttggtcaaaaaaataatcaataataattaatatttttcgtatttattttacatcttgtgtattggagtataattgtaaatagtatgtcaaatataatataaatttattttttgtactaaatttagtacaaattttatattttctattggagatggtctgagattacaaaatgtgtagatgataattataaaaaagattcaagttataaatctaaaattaatgaacacaaaagcttgtaacctttatcaccagtgaatcagtgatgacgtagattattgttgctagtgatgaattggaacattagtgtaaatgtgccacgataattttggaactatattaggcaacaatgcaaatatataaggaactatcaaatctttgtaatctataggaagaatcataccattattgcttaagtgaaaatcgtgatagtgtaaggttgagagagagaaatattttcttgtaatctctgagagtttgtaaaaattcgtataaccttataaatactaatatcaataaagatatggttgctgctattctaattgagatgtagagtattgtatatggctgaaactcgttaaacatggttttgtatttttttgttttactgcattatttattacttgaattctgagatctattaatttattatttcttgatcgtgttgcgtgttatttgattcaatataccaaatagtaagtcattgattgtttctattttgcacaacaaactgatatcagaaaaaggtttataatcatgactgcagcaaaatacgatgttaaaatttttattggtacgaatgactttggattatggaggatgaagatgaaggctttgttatttcaccaagagttgtataaggctctgctaggagagaagacttcctaattcgatgtctagaaaggacaagaaagaaactcttgcaaagctcatagtgcgatcattttgaatcttggagataagattctgaaaaaggttacaaaagaagatacagtcgcaggtgtgtggttgaaactttaaagtttgtatataactaaatcgttggtgaatagattatatctgaaacatgccctgtattcattcaagatgatgaaagacaaatttattagagaacagattgatgagtttaacaagttgatttcttgatcttgaaaacactggtgtcaccattgaagacaaagatcaagccttgttgttgttcagttctttaccaaagtcttttgcttagtttaaagatacaatgatgtatgaaagacagtctattacactcgatgatgtgcaattatccttgaattcgaaagagctgaatcagaggagtgaatcaaagaattctggaagtggtgatggattgtttacgagaggcagaagtacgaaaagagaaagtcacaaaggtttaaaagtgaaatcaagatctaaatcatagtttgatatagggttgaacatcggacgggtttaccgggtttcgggttcgagggtttcgggttcacgggttcaaaaaagtgaaactgaacccggactcgaatagggcacgggttggcgggtcacgggttggcgggttttggttcttctgatatgataaccaaggtagtgcaaagtggtaagtttgagcactacttgaagcttattggagtcagctgagcccagagggggctaacgggaacaacaatatctataataacaatttgtcaagcaacttcaaattgttggttatggttatggttataagttttttgccatccagaagggaagccgtgaaaccgaagagtagagatgggaagcttggcgtgaatctagaaagtcttgtgcggaagactttgtataatccagaaagtgtttctagataagcttgtacctcctatgaactgtttctctggatagcttgtcattagtctagagatatagtttcggataacttactgtcagtcttggttgttcatccgggaagtagctcttgtacgtacccgaatagcttgtccgtattaaagcttctgaattgtctgtactgaaagcgtgttatcaaagctgatgtagattattattactggtgatgagctaaaacatttaatatagtgtaaatgtgccatgatagtttcggagctatattaggcaacaatgcaaatttataaggagctatcaaatctttgtaatctataggaagaatcagaccactattgcttgagtgaaaatcatgatggtgtaagattgagagagagagagagagtctaaactaaagagagaaatattttcttgtaagctctgagagtttgtgaagaatttttgtaaccttgtaaacactaatatcaataaaaatatgactatggttgttccgaccgagatatagagcattgcacaaagctcgaactcattaaacttggtgttattgttttctattttacttctttattcattacttgaattctgagatctcttgatttattatttcttgattgtgttgcgtatttgttagttcgatattaaatcgtaaatcatttattgtttccgtttcacacaacataacaactaaaggctttttgttgcactcatttgagtttaaaaagagtgagagaaaactctataaataatgaccatattgctcgattattttacagttaatacaatgttgaaaaacatataaataattttgtgagggtatgtttatttttagacactaaattaagtatatgaagcttaataaatttttgtgaacatttatagaattttcctagtattcatgtgatgagggaggaaat

SEQ ID NO: 220780 - DNA, 2348 bp, Cannabis indica
tgtatgacaataagcttcatattcattaaggctaacgactattcattcttgttttggaaaattagaacggttgggattcgaagctcccacccaagtgcaggctcaggccattcccgttattctttccggccgtcatgtgtatccttgtgtttcatcactgctaatgctctctctcttaatatatttatatacatatatatgtttgtatctataaagtatttgctttgtttctttttctactgtatttttggtattctttaatggagcatattccagacttgttaatgcttctacgggcactggaaaaacaattgcatacttggctcctgttatccatcacttgcagaattacaatcctcgtattcagaggtctgatggaacttttggtaagagtgtgttgtttggtgtagtgggtcaatttttcgttttattttgtcagataaatacaatgaagcttgcttatctagttggtgaatttagaaccaaaactgtaattattgaatgtgggtgttattcttttgattcgtggagagtccttaattattttgttttagccataaggaagtcgtatatatatccaaattattactaaaaggaacaaagggatcatgaaagtatctttattatttgtttatgcaaatgcagcccttcttttaataagatttttaattaatatttctttatagcgttggttcttgtaccaacgcgtgagctatgcctgcaggtgcacgaaattctgcagaagttactgcatcgatttcactggattgtacctggttatgtaatgggtggtgaaaacaggtcaaaagagaaatccaggctgcggaaaggtacaggatacatgcataacactgtaactttcattagccaatttttttttcatcctttacttgaggatttatgggagggaatttttccatctttagctagcatgatacataaaattattactttattaattggttgttatgttttctctactgggttctctttttgttgagcctcttaataaaaaaggttttactttaccattcctttcaagcagatgctcacttccgtgtggtctttttcaggcatatccattcttgttgcaactcctggacgactgttagatcatctaaagaatacatcatcattcatgcgctcaaagttgcgttggattatatttgatgaagcagacaggtacggtataccagtgcaaattgctttatatctgctcccagaaagtaggtttattaattatgattttttgttactttactgtggaaaattcccatttaacaggattttggaacttggatttggaaaagaaatagcagaaatactagacatattggactcaaggaaggacaaaacagtctcatgtgtacctgaatttgagaggcagaatttgcttttatcagctaccttaaatgacaaagtcaataatctggctaaaatgagcttagaaaatcctgttatgatcggtttggatgataaaagggtgcggtctacttcattaccagaacatttaatatttgatacggatgcctcagaacatccacttaaaataacaggtcctgctgcagattataacctcccatctcaactaaatcaaaaatatgtcaaaggttcgtgctagtattatgttttattcacattaaatgatttcatgatgtgagtttcactattgattttcttcgcagcaccatgtaattcacggcttgctgtacttctttccattctcaagcatctttttgacagagcaacatcccaaaaggtgaattaaaaagtttgaacttgctcattttctttcactagatgcaataattattttcttattatggtttggcctagtagtcttatattccacatcaatttcactcgcatatttattttgcagattgtggtattcttttcaacatgtgatgctgtagattttcactacacactgttgagtgagttccaattctcacgggcagaagcagaagtcaaacagaagtttctcacgtgtaataccttgcggctacacgggaatatgaagcaggaggatcgaacagccacatttcaggcattcaagacagacaaatcggctctctttttgtgcacagatgttgctgctagagggctagattttccacaagtaaaatgtatcatacagtatgattctcctggtgatgctacagaatatgtacataggtaatctttctttatttctaaaatatgaacttttgtctcctgtttttttttttcttttagcaataaatgtcaagaattttttgtattagatttctgttggtttattagtttcatatgacctgtcattgtttaaagtatgtgcttagatgtccttgagcccacatgctcat

SEQ ID NO: 220781 - DNA, 1330 bp, Cannabis indica
aactatagcattgaaaaaaaataacctatacgcccaagctcacttcgtccaaactgccatgtggcagccgcagagtccctactatattctgacattgtagttctgtgcacgacagtatacggctttactctctccactcgtgtgtgaatctcactctcctattctgttcacatgtgtatctcattttctttttttttatacttaaaatttatttctctattgtattattataataaaatactttgtagattaatattatattatgcgaactgaattgaatcgtttaaatatcttgatgaaatacataagataatttttctctttccgattttgaattataccaaactatattcttaaatatatttggagagaatagtcaaacttaagaccttagaaaatgtataatactattactcgaccatgttacaacaccaaactacaatctttattatatcacatgaaataaataaataagtaaattgagtaattttaaggaaaatttgcggcaaaagtctttaaaatgttcactttgttacaaattagttctcaagctcgagaaataacggtaatagtcctcaaggtcaaactttttatttatctgttagtcctaattttaactgctcagttaatttattcaaaagtgccacgtgttgaagccttccaaataataattttaattaaaaataaaataaaaacttaaaaaatattttaaaattataaatttattttatttatttattatttttttttctatagtcatcttcttcctttcttctttttaatccccggaaatcaccctaaccctttctcttctctttccccttcgtcttcttccttctacgcacctccacaaccaccatggccaaaatcgattgaatctcataccaaaaaaactcataactttccagccgtcacccgcttattttggggtttctttctaccaaaaataaacctgcaacaccagcttgtaccagaccaaaatatcataatccccaggtctcaaaacccagttttccctccagcccgatctcgtgagcccaccctctctctctcatctttatctcttctcgtcgaacagccacgcccaaacctgacgtcggccaattctcggtccttcaagcttgaaatgaacccaaaaaaatcgaaacctaaacccgaccttccaccctcgagccccttgcctgtccatctttctccttttctccttctcgatgtgcacgacagtggtggtgcttcggtaaccgcaggccgaaatggagaccacaaatcgtggggtttgggtacgcggggttttagattggggcgacttcaattttttttttcttttctt

SEQ ID NO: 220782 - DNA, 3987 bp, Cannabis indica
ttaacggttatcatattacatcattagtacagattactgactcaaatttcaacattttctttaattagattatctcaaattatatattcacgcatcacactctcacatatataataaatatataaatattttttgataaattaattaaaaaaatctatatactctctaaaatcaacatgaagagcttgttcatccaagtcctcaccgggcgatggctcatggtgtttgcctccttcctcttgatggtcaccgctggagcaagctacatgttcggcctctactcaaacgacatcaagtccgtccttggctacgaccaaacgacactcaacctcattagcttctctaaagacttaggagccaacataggaatcctctccggcttaatcaacgaggtcacacctccatgggttgtcctctccataggcgccatcctaaacttcttcggaaacttcatgatatggctagccgtgtctcgaaagatctcagaccccaaactatggcacatgtgcctctacatcgccattggagccaattcgcacacgtttactaacactggagctcttgtcacatgcgtcaagaactttcctgagagtcgcggcgtcgttttgggcctattgaaagggtataccggtataagcgcggcggtaattgctcaattgtacagagccttatacggtgacgacacgtcgtttttcactctgttcgtggcttggcttcctactgctttgtcgttcgcctttatcaaaaccattcgaatcatcgagaccacgaatcggccactaaacgacgtcaaagttttctacaaattcctctacatatcgatgagtctcgctgggtttctgttcatcataattattttagaaaaatcgttcagttttaacaaaacagagtacggcttaagcgccgcgggtgtgctgttcctcctctttctcccaattatttcgtttttagagaagaagacaagctccttaagaccaaactagtgtccagacctcagaacaatgcaattgtcgtttcaccatctgtacaaccaaaagaaagcgtttcttggtggaaagacgcctttaagcaaccggagatcggagaggaccacaccataccacaagcacttttaagcattgaaatgattactctgctattagccactgtttgtggtcttggtggatccatgacgatgatggacaacttaggccaaattggaacttctttcggataccctttaaagagaatcacaaacttcgtgtctctcacaagtatttggaactaccttggccaaataacagttgggattctctctgaaatctttatcacaaagtataaatttcctcgtaccctgttcttaactatgttattgttattatcttccgttggttatcttttaatcgccttcaacgtccctaacggtctctacgtggcatctgttcttattggattttgctttggagctttttggccactgatttacaccatcatatcggagctatttggattaaagtactattcaactctgtacaattttggtggtatgacaagcccaattgggctttatttactgaacgtaaaggtcacagggtattattacgacaaggaagccaggaaacaaatggcttctttggggcttgtgaggaagcctggggaggccttgaattgtttaggaggagagtgttttaaactgtcgtttatcattattactgtcgttacggtttttggtgctgtcgtttctctttttttagtggcgaggacgaggaagttttatcagggtgatatctataaaaagtttcgtgtggaaacagtgaacacggacaataataaagcttcattatctgtggaaaatgttgtagtagctggaaaggcagatatgtaagaaggattcaatggtgttatatatgtgtatatttttttttatgaaaagcgtgcttatattcaatgatgttatatcaataaagagtgtggtactatggtttgatttccctcttgtatgttttcaagtgttgattattattactgactagagtcttcaaattttcaagatatatagtttaggtcttcgtatgtacgtactacgtacatacatatacatatacaggtagatatacatgcacaagagtatatatattaccattctcatatatgttgatattacaatacaaacatgtgagtggataaaaggaagtggaatggaacggaacctttaaggaatttttttcttttttacctttaaggcacttggtatcaaatactttgactagttagtcacactcatatagtcaaatagtggaactagttgttagaatgtggggaataaggtgaatggggtttcattttaaaatcaattggcaatgggaggagtagcccaccctcacgtttggacctagaaagtgtgtgtataacgaacgacctttaagaaaccacagggccggaccacaaggccaaatatcgggaaatttgtgggtgtacacatcgataaatttgtagattttgaaaaaagtcaaagaccccaacactggaaattggcacacattagccgaaaggtgtcaaatagaggttaaaggggaggcggaagtatttgaaccggtggcaatttgagctcacaacggatcacaagtggctttgataccatgttagaatgtggaaataaggtgaatggggttccatctcaaaaacaattaatgatgggaagagtagcacattcatcttatatatcacaatttatttccacacattaacaacatgagactaactctaataccagtcatcctacctccatctaactctccttattcattgccttcttcattccattaattcatccacttatccatcatatcattattttattatttctccttatctcattattccatgcattatacacattttttttggttgaccccccaccgggggtgctctctgtccctttgtccttacatgtttgtaatcattttgaagtgtaattattttaaagaataaggcagaattagtaatagaaaaataaaaagaaaaatagggcagagatttaaaaaatagtgcatcattttattattattattattattttttcaaaagaaaaaacgtggatatatcaaataaagttaaatttcattatcattacaaaatattttagcaatgaatagaagatacaagtaaattagtgagtaaatgtgcacttagttatattataggtaacaaaataatactaaaaaaaacagctaattaaataaagagaaattctttaacaaaacgttttgaaacgcccaacaagactcctaatgactaccctttaattgctctccacaataataaatttgcaatttttatctattgtcacttctaaagccaagcaacaaacgactgcctctccacaaagagtatcagaaaactctaaattagtcgtgtgcacccaagccacctcaccatagcggtttttggctacagccacaatacacgtgcttttcatccctacttgaatatcacaattcagcttaagctaatctcggggaaggacgccactcatccaacaagattggggtaggagtaggaagaagaaaagctttagcatctacataagtgtaatgaatatagtcaattgaatgtttcacattatccaatttattattgtgtaccttgtcatttcgaacccacaagatagtgtcaacaacaatcgatgcataaagaaaaacttcatctgcattaatgcattgagatttttagctgcagaggaatttcacctagtcccacacgcgaatgacagtgccatggacaagatataattataaaccccatagggacgaccgccacaaatgaattgctgaattgaaagagaagaagaggtgttccatggattcctccccagacccacaaatagggcaccttgcatcatcaatatagaatctcttattaagcacaactcggatagggagggtgttggaaatgatgcatgttaggctatttttagcctattatttatgtcatttttagagttaattt

SEQ ID NO: 220783 - DNA, 1610 bp, Cannabis indica
ttttccttttttcgcttgctttccagtgtatgggactcccaatatttgatataataacttgaacttccagaagtccttcccttgcctacgttttagcattgcttactagcacattgaagcaaacaatgagaaatccatgcattaaaacccagcaagtttaattttacgagtttcgactggacagataagttatgatcacgaaagcaaacttggaccgttttcagctgcagtccgagcattgccctgattatgatgcctggtcatctggatgtcacgtgacaaattagtcctttttttcgcgtatggagcatctcttgctgcaaagaaaatggttgagcatcaaaatattatttattaagaggatgggtctctccataaccctcacatacatgtaaagagtagaaactactgttcccagcctttgtttctagcataagatggtgcggtgctgtgctgtgctgtgatctgtgtttctatgggaattttaagttccaagtcttaacaaaatataaatcacatatatatacctgcaatttgttgtgctcggaggatattctgccgccttttccaacaacatactgaacatattacaatcagcaagaacagtgccaaagtacccaatgcaataccaattttggcaccagtagtgagatgtggcccacatgatgggagtccaggtagaccacaaaggccatgattatcagtaaaactgcaccagatagaataattaatcatgtaaacatagctcggtatgtagactgaatgtgtttatcaggtactgctaattcttggacttttgggtcttctttttgaggccccaattatataaagattaacacaatgaaaaacatacacttattaactcaactaagtgtaaaacatacttgaagctagctctgtgcaaaagtctaccccccaaagcagcagggactttcccggagagagcattgctgttcagactcctgcatcatgaattcattgataatctaagcttgagtaaacagtgtaagatttcaattttcacaaattaatgagatgattattatagcttacagtctttgcaatagtgtcaactgcccaagactttcaggaactgaaccattgaagaaattgtatgagaggtccctgttataggagttcaaatgtgttcaattattacaatgttaaagagaagaagattgaagataagtatccaccatgacaagaaatctaggtctaatgttcacctgggaacaaaataaagttcagaaacttttttttctttatacatgttgggatgtcccaattctatatttctttgtacgatctcctaacaattatgccatcatcaagtggcttcctttacttggttttttaccttatttctttctccttgacagaactgaaggaagtcctagctatttagttttaacataaggaaatattacatataatttgactttctttcaatacatatatatagtttgacttaagggcatttagaagatgcattttgtttatgcactgattagtaaaatcaatatacaataaattatcatgctgaaagtattgtaagcagttatcaagaaagaaataataacttacaatacttctaagcttgtaattgttcc

SEQ ID NO: 220784 - DNA, 4192 bp, Cannabis indica
aaggactataatatccactaaaacccctacatcctgtgatcttgaatatatcataggagttaattggttctaaatcccagctcgcatctaaatgacttgccctatccagcatggtcacgtactgctcgactctcccacagtaagagtcagtacagctaatttggatgtgaaactttggataccaactatcaaacctatgtgtaatgcgatctatgaggaggggattccaggtgtaaaagttataatgactatcttgaaacgacactaaagtgttacgctcggctctaagcactgtgggtgaccaacaacattgattgcctcgggatgctcctttttcggcttcccaagggacgacattctgaaggtaatgtgtccgagccacataattctgatcctcctcgtcggttaggacaggaacctgctgccaagaagaatacttgggatatttataatcataagtaaactccttgtcagtgaggagacccatggacctcaggttgacctcgctcaaaaggaactcagttgaccgaagaccaaagggaagacccagcaggagcttgtgtcgctcagccatctcgggagtaggaactggtcttttcgagatagctatcaaatacaaaagcaaaattaaaataagcaaaaccagagtaaaagacgtggaataatttaaccaagtcttaagcaagaaatcacttacgtattatgtggaagatggttgtgctgattagggaaagaccagtcgtccaaatgaattcttctttaaaaggggttttatttggcaaacctacaatgatcttacgatcgcctaggtgagtcctaagatagtaaaaaaaaccatgctgcattcttcctcgtaacaacggccttgacagagtaaagatactctatttccaagggagtggggcactccagttcaaaattttgtacagttacttcaaacttgcaaggattctgtatgaaataggattcaactagaatggggcaattcctatggtttaggaagtccttgtaatagcccttcagggggataatggctccagcccttatgtgttcgaggctccatgcgcctatccctgtcgagccacttgtactagcctcgccaccggtcccctcagatgcttcgcgagtaagtcgttctggtgggtaacaactgaactcgccaacaaccacctatctaacccagcattcttacttatatttaataccacaagtccttaggatattacctacgtaatctccgatggctcacaccttcgagtctactagttcagcctcaaaggtgacgttaggatcctgaggagtctttgattttcgaggcctggaggtcatgatttcaaagtctaggtcacctggttcaaaagcaattgtgactcttggtaaaaataaaggcctagcaagaggaattgacgataaattggagggttcaggccaagcagcatctcgcaagaaatgacatatccttctgtaatttcttgcaagaagcgtctatggcgactgacaatgtcatcttggtaagtttttactaagtgttccctaatttttgcatcatttatctctaatttggatttgggttgtgaaatttagggtttatatgggatggaaagttcactgggacactctggttctaaatattctgggcgataaacttctgaaccagattgggacattgctgcaaagagaaagcaatcccaatgtctagaagaaatttattaaaccagaagttggtaaatttgagaaaccctaaaaccttcgttctgcctaaatcttaaaattaacccagatataattcaaccctaaaatcgctaaaaccagataaggagataaaggtgctaattaagaaactagtgatcaaacccaaaaatgtgaaattaaaagcgtataagaaaataaagaaagagaaatcacttactgtttgaagttgtttttggagcgatgaatggtcctgcaatcgacgaaacaacgaacgacgtgatgatccctttgaatgcttgaggtcaaaaagaaaatcgaatgaaactcacaaagagaatgtcaaagacaaagatggcatgcaaattttcgaaacaatctaggtatggttttttgcagagaagctcgaaaatttttcagagtttttgaaatggcaaaggtaatgaaaagctagttcttttttttcgttttatactcttgggttgatctccgtcagattaaggaggcaattgatccaacgggtaaaatttcaaaataatgaagaggaaaagatggtattaaatgatgatgtgcctcgaaaccacaaaactgccaaaatcagaggacatgcgtttttcaaaatagattatgacaaaaataccctctgtaatcatttaaaagcacttttcattgaaaagaactttttaaggggtaattgttatacccgaaatttggctagcactttagaagatgacacgtgttaactttggagaacacgaatcaacaaatataatggcaattatattaaaggatattaaatggaataactcattaaatgcagagttagtagagcatatctataactcgctgactgtatagtcttaagctagacaaggatgtacgaactattgattcacgcattgaggagaaatcattcacgtcagaaggcacaatcataaggatgacatcagtaatataaagggaggcaccaacctcgctatgtataagaacctggaagaacctaagtgacggatagcgaggcatccatctcgctataggaaggcatactcatggtaccttcactaatcagctccagacatctttcaatgatatccactgctttgtcgagtcagttctctcagatagaagctggcatccaaatgatgttgactactgaagttcaccttgtcaccaagaactgcgattgtcaaatagaacgttgtgtcttcaatcgaagaaacgacagtatttacattatcaacctcggaaagacatgggaaaagctccagctcaatctcaaggttattgttgctatcccagcgagatgccctagcgagatgcactttgtagcgtatctgaatccacgtcagcattgatcaagtaaaagcggataaatcatagtcgcataattttcaaataataataaccgcatttatttacgtggtgcgtaattaaagcccacaattttgaggaaatattattgtgggattcgtatctgattgtaattaattgccaccctatgttactataaataggggcagaatgtactgaaaagggatggaaaatcctttagagaaaagaaccctagtttgtatcagaataatttgaataagattgactcgtggactatgctgaattttaactgtcaaaccacgtaaaaagtttcgtgttttattttcttcttttattttctataatttctgtgcaagttaattacgaaataggctttatcattgttaacaaaaatatgcgttaacacctcgacagaccgtcaggcaaaaaagtatattcagaggtgggatgcacgtactaacatggtctgatataaggaacaagatctgatcatgtgtcagaagaggcataactgtcgttagagcgatctgggtctctcttcatggtagacatctgacttcctctgggcgattagtgtatgtgttcgactcttcaagtgtcctccaagtgtctctgtgacatatgttgagcttggcctcctctgggttttagagaggtgattaggccttcaggtctcggatggtggtatgttgcgggacaaattttttattagctctcgagcttagttttttcctaaacttgtataacttctccgtgattctaactaattaagggagcttaattagtgattattcaacgaggtacttctcattttatgccacatgtcctttattcgaaaacatgaataacacacgactacaaatataagaattcgcgacggtcctaaaaacgattttttttcggggaacgttgcaaaaaaaaattaagtaactatttaaaaccgttcaggaaaaatttagtattcccaacgtttaaaatcgcagtaaacaaaataggcgacgttttttaataaaatgcgattttttaatggaccctcataggcgacggttttaaaccgttgcctataaggatccattaaaaaatcgtcaccttcacctacttctcgccatatttctcacgtgcccacctacttttttttttttattttccacatgcccacctatttattctc

SEQ ID NO: 220785 - DNA, 4900 bp, Cannabis indica
aattgttaacgtagatttttgttgatcaataatattgagcctttttcgttataaatttaacacaaatcttataaaaattaataaaatataataataacaccaggtattttacgtggttttgcagttaaatctgcatactctacgagtacatcttattccagatatttttgagtgtttgatacaatgtataattagtaatcatttttccaaagatttttttctctcttttctgtcgaattggcccctatttaaaggaataaatgttgatagttatttacatttaaatttgaattacataactgtttactgaaacatgggaattgatcacgtttcatttaatcacatatgaaaaataattgataactgtataactgcttatcattcttatatttacaaatggtttatgttgatttgaacagcgatatctcgctttgcctatagatgattaatgctgacttggttgatcatatgccttccagcaatggcatgagcactagtgtattgagcaaacttaagaacttctctttgaccataaggcttcgcagactggataatcatatcctgcatatttccaagttgatacacttagttgttataatgtagaaaatacgctaagtgtttaataaccgattcacctcgtcaatattctctagtgtatagcgaggtggatgcctcgctatatattgtccgtgattgattcaggtaacttcacttattcttttgaatcttgtccatgaatttacatattctgaggtagaatgttctctcgtcaatacatgaattaatagtttgtgtatccttgtctcacctaaaactatacagtcagcaagttatgaatatactctattaattctatatttaatgagttattccctttttgcattaaatgatataatcgttattatatatggcggttcacattccacttaattgacacgtgtcactctctgaagtgtagctgaattttggatataacaatttccccttaaaaaatatttttttaataaaaagagctttttaaatgattataatggtatatttgtcttaacccaatttgaaaaattacatgtttttaaattttggcggttcatgattttgaggcacatcattagcatttatgacccatcttttccaattcttttttgttcctatccgttggatctttattttttaatctaacggtgatcaatctcaaggtacaaaattgaatagaaaccattattccactatttctgctttccaaaaacttcaatttgttcatgcgaaaaccatttctgatttctctaagctttgcatgccctctttgtcattgacatattttctgcgcatttcttcggatatactcttcaacctcaggaatttatagaatttatcacgccacccatctcaacttcagctgcaaagctttttgtcgtgcgaaaaacccacttcgaatagtaagtaatttatctctttttctctggtcttttcttttcctgagttacgacccttattttgtaattaattgcatctttgtttgttccgtttggttttagcaatttcaatttaattttctaggtaattttttagggtttaatcagagtaaaacttaggtttatcgtatttacaagtttctggttttaataaatttcttctatgaattgagattgcttatttttttgtgtgtaaaaatgtcctaatctagttttgaagtttattctccagaattcttagaaatagataaagaattagccctcccatttaaacccagaattcttaaacctcaatccaactgaaataaacgatgcgaaaatttggcaccatttaatgaaaaccaatcaagaggaagttgctagtcgctataggcattttctacaagagataactgagggtaaacgtcgttacttgcgagatgcaacctggcctgaacctttgtcattatcttttattcctttggctacacccttatttttacacagagtcactattgctttttcatcaggtgacctcaattttgaaattatgtctttcaagcctcgtaaattaaagactccctaggaccatagtgtcacatttgaggctgagcttatcgagtctagaataagagccattggtgattatgttggtggcgttctaaggatttgtggcatcaaccaaaggcgaggatgccatgttagatttgttgcccctggtgaattcagttgctatccactagaacgcaattaccttcgaggaatgtggtgaggccaatactagtagctcggttgggataggcgcttggagcctcgagtacatcaggactagagcaattctccccctgagagagtaatttaaagaattcattaatcatattggaatcactcctttccaattggttccaatctcctatagaatccttgcaagtctaaaggttctgtatcacattttaggatgggagtgtcccactcccctggaaattgtttatttttattcagttaaggcagttcttgtgaggatacattgtgcatggggcttttattatctcgggactcatacaaatgatcataggatcatcgtagtattaccaaacatgaccacttttaaggaggatttcttcttgacaactagtctttccccaatcaacacaaccacatttcgcataatacgtaagtaagctttgtctcaaaaacttggttttgagttatttcatatttttatcctcaaacttgctgatttatttcatttatcatgttgatagcggtcttgaaaaggcgaattcctactcctgagatggtcgagcgatgtaaaattctactgggtcttccatttggactgcgatcgactgagttttttcttaacgaagccaacttgaaaactattggctttcttgcctcagatgaatacacttgtgattacaagtttccaaagtattcttcgtgagagaggttcccagttccagccgacgaagagagccaggattatgtggctcacatacactatctcgagagagtagcccctcgagaagctgaggaaggtgcctcccgaggtaatcaatgcggatggtcacccaataagcttagggaagaacgtacctcgttagtttcctttcaagatagtagatataatttttatacttggaaccctttgttaatatattgcataccccataggtttgatagctggtacccaaggttttgtgtccaatttagtttaactagttcattctatggaattgctgagcaatatcagaccaacttggatagggcgaggcactcagattcagattgggatgtaaacccaattaatccttacgaaatattcatgatcacaggatctaggaaactcagtgaatactatagtcctccttcttcatcacctggtgataatagtaacattctttaagagggaactaattccccatttttctttttatgtatttttgataaagtattgatgtatttcgttgtctcgtagatatggatctagaaaatcttttcaacacttcaagcaagaagggaaaaaagaggatcgcttcctcggaaacttcattagagaacatagaacccctcaagagatccaggttcaaatccacactctagccattgtacaaatcgagcaactagctcaaggttcaactcatcaagcttctcatcctcgggtaaggggcagaaaatggttctaattgaaccttcttgccccttgccccttgaggcggggaacactggctcggagtactgcttgcagttgaccacttcctgctagcaccattttaaatccttctagtttggtgactgtaattcgattaataatggtagccctgaggagatgcttgagagaagcctcaacgttaacctctcggttagttcccttctccttcttctttttttttttttgacaattctttcaaattttcataaaatttcatatgcatatttttccttgcaggcctcccttttatctcatgttgcccagcgtcgggttcttcagaaggttaagcagtcagaaactgaccttcacaaatccattgaacaacgcaaggttgtttccaaataatggaatgatgctcaaaaggagatcacccgactgacaaaggaagctgaagaggaaaagaggaaaaataaggcagaacttgaggtagcctagaaagaggccaaggacaaaggtgaggcttgccaaaaacttcaagaagaactcgatgcagccaaagcaaagcttgagggagacgagactgatgccaaggaaaggtgcaacgtcattgcacaacggtccatttatagagcatggatggcaaaccttagcatggacttgagcttcctcggtaaaagtgctgaagaagttttggcctactgcgtgcgggcaaagaaggaggaagaggttgtagattttgaagaggaagatccgtccaagtctcctacaatgtagacttggtttttattttgtatatatttttttctttagaaaaatggccttttggccgagacaatggtttgccccttgtggctttatttattgtaaagacaaatttgtattgttggacaaccaactttgctttttaatatctatcttctctttattatctcgaatcttctgtttgaattcaatacacttgtttatttgcgttctatttcacaacataaacaattatattttgatccaacttaagatattagaagaatgcatttccattgatctcactttctaagtagttattaatctactatgtttgggtgcgagcaattatgttcttcctatgctttttagcttgcgagcggttatagtctgccatattatatgcgagtggtttattttttatctaatattatgtaagcagtttatatctgccacatataacttaaaagcaaacttaaacatactaataattcattttggaaactactttgtacattttttttattgcttatatgaatagttaagccttcta

SEQ ID NO: 220786 - DNA, 4705 bp, Cannabis indica
gtatttggccaattgttttgaaatgtgtctctatcaaattattaatgtcatcatcaattgttttttttaaaaaataatatcaatataactaaatagtagtttttttttttaaaaaaaaaaaataataactaccaatatatattatatttatatgttcactaatctattttaatttcatgcaccttcattatttaaccaattagaatacaataaaaatactctcatgtgtaagagcaaaagtgatgctctcacctaagaagtatgctatttttttaattgtttagtgtaaaatttcttaaaaataaaataaaaaatataaaaaacaaataacaaaataatataaaaatattaaaaaatatatatttttataaataaaatcttaaaaattgtaaatttatttaaaataatgctatttttgtaatatttttttttgggtgtatttatgaaataattgcaaagtctttgagagtgggagtgcgtaattggggatttacccttatcctattattccttcttaactgaacagttttgtttactgaggctgagctactgcggagaatggaggcaactgctcttaaagcccgtggaatagcaatagcagcagcagcagctcccttatactctctttgccatttccgcactacagtatcaccgtccctgcttcgctctcttacttccaaccctccacgctttcacctctcttgttcttctcctcctctgtgctctctcggtacaaatctctgctctctctctctatatatacacacatatatgtttgtttgtgtgtacttaacaataaaatacaatgcttgttttgttggaacaggtagaggaagaactgagactactctgcctcatggagtagaggataatctcacctctgaggtctcccactataacattcttcaagtggttcttgtttctcctcaggtttaatcccagaataactcttttctttttttagcatttgttttcccagccgtagtaatcttcgcactagggtaaaaaaagtaagtttccaggttgccttaattttatattaaaccttaaaatgtctgaattatgtgaaactaaagcttaagaatctgtgacagttttattatttcccttaaaatgtgtgaattcatctttaggtactgtactcacattgaacctacaacatagatgtagtatttaccttaagtattttttttttttttttttttaattttatatttattatagtactcgtattctgtaatcaagtctctcgccctttttaacaaataataatgaaaaattcatgagagttgagtaatcatattgtcgtgttagtgaaacgctgtacaaagctgtcttttgatgagtgaaaatggagcaagcaataatatcttacaaagaaactcaattttaacactgtttttggaataccctaacttgattacttcttgttaaatataagaagactgaaattacagttcattgttcatacgtacaattacatattccaaaggctaattaggatttttgcccctgaactttgacaggtaccaaatcatgccactgaacttttaaggtcgttaaaaatgccctcttgagattgttggatttaaggacttttatgtaatttcattcaattttactatttgagtgattgtttatgtactaaactatgttccccagactttgatatctaccaaatcatgcccctcgaattttgacatgtactaaattatggcctctgaactttcatccatgttagatttttttactaaaattggaaaaaaaaaagtccttaaatccaataatctcaatagttcaggggacatttttaacgacattaaaagttcagggcatgatttggtacatgtctaagttcaggggttaaaaattctaattagcctattccaaatattaatctttgtgataataactagcagctaccaatgtagcatcaatttaccatctacttcaagtttttcgaattggatcaattcgatgcttaaacattaccaaaatgtagcacataatcttgttatagcaaacttagataaataacaagtgtcacaggaatgctagtttattgttggaagttatgtgttaaaactctgagaatgttcttaaatgttgctccagtggactgcattacatatggctgtctgaactatgcagccacaaccataaaggtatgactgggcctagctagtggtcctgttatagggcattcttgtaagtaaatttaaatatgttctagtgtatttgaatacaatcttgtggttattttcttgcaaagttattgcactacacctttaatgtcacagtttgtctatcttccatttagtatatttttctttttatagtaacaatgaaactagttagttcatagaacttttatacgacctaatagattaataacatcattaaagtctgtttatacactaaggatccatacatgttctattgggaaaaacgtttcatttgtcaaaattcttctatacttatgttcatatttctttactcacaactaatacttgtatttctttcttcttttttttttccctttctagcttcaccaaatttagcaaaatattgtgtaatcaaacatagaaaatcaaaagctatgttttctttttcttttaggatgccaataacctcaatttctcaaggatggttctgagatttgtattgtccttgacagattcctggaaacacaggctgcatcgccagaacatgtgcagcatcagctgttggcctacacctagttggggttgatatttctgcttgagtttagccttttaaactttgttatattgctttgaaaacctgaaaataagtaaagcatattttcttttaatgactatttgctaacatttttggctgtttgacatgtttctttttcagccattaggatttcagatagatgatgcaaaattgaagcgtgctggtttggattattggccgtatcctttatatgtttgtttataggttttacatgtttgttcatgaaagtaattattttgcaggtttacatttttacgtcttatataagtctctattatgagatttcaagttcacagtagtttataaggatttttaaaagatgcaacagatatttgtcaaatttaccaaaatatacaaataaaatgtgaaacatatctataagctttctttctttgttttctttcagttatacattttttcttcgatttgttcttttatctgggtaaagtggtcctaaactaaaccagttttccgaacattatagttcccataagatataagcagtctattgtattcttactgccttattaatgtcttttattcttatatcaaatgacaactatgtgttttctgctattaacttttaatgctagatttgttgttgtaaaagttcacaattcatgggaagattttaagctctatttcagtcaacaggtttgtctcattttggacagcaaatataagatatcgtctgttctccttgaactcctgattatttgacaaggtcttttctttcatacaggctggggaaaagcggttgcttgcatttaccaagagaggaacaaaccttcactctgtaagtttttaatttgccatcctatttacagtatttaggatcgtcagcttattccattgttcaacatagtaccaacatttcatttcttcatttaatcacgtttgtttgatttgtaccggctgcaagtactttgactgattcttaacttttatctcatctcaacttcaaagagaaacttaagtttcagactttcagtactccaaagctatgcataacttcaagaattgaatgttcttttcagatatccatcgcttattggacacatgggttatgtatctaaccttcttctaaatactcatgagcatatgttttgctcataagttagtagttatttatcaaggaaaacagtagcgattaattggtaggagaagatttcctacaggaaaataaattcgtatagtaaaataggcttattaagatcagcatggaatacacaatacaaaacggaaggaccttaagaacagtttctttagctttttgctatatgctgttagacagtgatagtgattaattggtagtgattaattgttttcaggaaatttcttacagaagaggtgattatctcatatttggttcagaaacccgcggactaccaaatgaggccttgcaagactgcaaaagtgaagaatttggtggagggactgttaaaattccaatggttgaaacttatgttagatgtctcaatctctctgttagtgttggcatagctctttatgaggcttccagacagctaaactatgagcagcttcaatttcctgttgaagattgtagcaacagtgaacaaacatttgttactgaggatatttttgcttaacgaaactgcctgggattaaaaaaaaaagtattagaagtatagtttggtgtcaatgggaactccataaagaagtcagatttttatcagttagggttgttgttatatattcaattcagatagctacaagatacatgttggaattcatcaattggttcaaggaacctgctattcaattgtcaccgctgctttgactttatgaattggaacacaatatttttttttttttggtgaattggaatataaaattaagggtaaatatcattttcgactatgtattttgtaaaagttattaattagtttttttattttgttaaatgagaatttagaacttgtat

SEQ ID NO: 220787 - DNA, 2065 bp, Cannabis indica
acaataccaaacatgctcttattatcattaatgtaatatcaatgcttcctgataaattctatgaccccggccaagaaggcctcagtctgggcagccgtggcggggtcactatccactgcgatcttgttgagatagaagatgtgactcatcccacagctcatcacaatctcaatctccttattcgctttcttcatagcctcgtagaactccatctccgtttctaaaagcttatccttatccgcaaggcacagcagcatcggtggcagcttcagctcctccaaaggtggcgctgcaggccccatcggacacgtcatcgggtgctccttcgtcgatcccaccggtaaagccaatgctatgaacttgtccaacatctctaacgtaaggaaaggagtttcaggctgctccatctccgaccggctccgctcgggccgaacgaatcctggctggatcgggatcgctcctgcaacccgaagcggcctcagatcctcctttcctgcccggacagccgtctcttgaactaaattcccaccagagctgtctccaattagaaaaaccctgttgaaatcggctccctcgagccacggctccgtgcaagattttgcctgggagctgagccagaggagtgcggagaaagcgtcgtcggccgcggctggaagacggtgctccggagctcttcggaggtagactgagacgatgattgctcgggcttggcgtgcgaatcgagtgtagaatgcatagtacaagaaccaatcggcttggctgatgcaaaagccgccgccatggaagtgaagtaagagaggtagtttagcagtttcttcttcgggtgtcttctctggaagatagattctgagtcgaagacccgagtttggatcggctatgacgtctctagtggcaactccgtcgatgtattgatcatgaggtgggacggagtcggccatgaatttgacctctggtggacctgtccatgtacggtcgacagagccatcgtcgtagagtctgagccagccagagacatcttctacgatcttcttgtctggaaccatctctattatattgtatagtatggtgtgactgactagtgatgatgaagcaatgcaaaaattattggagttggaaagggtggtttatatagaagatggaaaggagtaacttttttcttttactattttagagtatttaaaatatttttaaaaatacctcatcaaaatttaattttatctatttaattttctctacatataaaacataaatagtgtttaagttaaaatgaagaagaatttagctcacttgatgatggagctttgtcttatcattttttagctaaaattttaaagttaagctattttagctacagtcatgtgaatgctcctatgcattattgtatctttgtgaatttttcagtctatttaaaatgacctttaaactatttacagtgttataaatttagtttttctgtccatttttgtcacacatgacaagttgaatgataatatagttgtttagactattgacaaatcaacactatatgcatactttaaaataaaaatattaaaaaaactattaaactaaattcaattaataattaacaaaaaagtttaagtaaaactcaaattttatattatttttcgaattaattaattacacaattgacaatgatgtgtggcgataatctaagcaaccatatcattatgatgtttgccatgcaataaaatttgacataaaaattattttataatactgtgaatcgttcgagattatttttaatgggctaaaaaatttaaaatgcataataattaatgtataagtctagaggaaaaaaattcttttttaccgtggagtacctttgttttgagcattttgttatagtttatttcactctcattttcatatcaatacaacaatttttcttattaagggcgaacctattaccggcggggaaggtccacccctaataataagattattaccggcggatttagggggtccgccggtattagttttttttaaaaaaattaaaatataatttaaaagaacaataccagcggaaagctcattattaaggggg

SEQ ID NO: 220788 - DNA, 3331 bp, Cannabis indica
attacgttgaccactaaaaatttgccacgtgtacaagtgtgtacacgtggacagtccactgtggcacttaactgtgatttttggacggaggtgtacagagcaaaacggaatgggagtttaggtagtttagctgccaaaatttttgtttttgtggttaagtgtaacaaaccgtaaagttcaggtggtttagccaccaatatccctgtgattgagaattatataatatgattgaaagttacattttgtaacttctattatattatcattaattaagtgtgtaaagtgtatttacataacttaatcttttgaaatttaaaactatattgtaaatatagttgttgagaatttaattttattatttataatgtgtataagtgatatagaataaattagaaattatttggaatgctttggagagttatttacaaatattgaaaaatttagtaactagtaactagttattagtttttttagctttatgatttgaacgtttttgacaatgtgaatactttttaacagctctcataaccctcaaattactcatttaatttcatttacacccaattaagagatggtaacaatcattgggtgtagggtgtttaaatttcaaagtatgtaactttaaacactataaatagagaacttagttcattctttgagatctcctattctcttctatctttcaaataccaagctagagagctttgaggcttgataattcccagaaatgtttccgtaaaaccctaagtgtttcatagagggagaaataatctttttagacaaaagtgtaggaaccttgttcaagcttttggtgattcctatctctactttgggtatttattcttttattctttgttctattctctagttttatagtgttctcttcttctcctcttaacactcttatatatatatactatcatataaatatatacatactatatacattcgttaaatataatatatatatatatctttactatgtattatttatattatatatatatatattctatatcatatatgtacactattatatatgttgaaataaatctccacgtgcactgtccatatcagcaaaaacaaagattacaagtataaaacctacaagtggccttcggcctctaacaacttattctgacagatccagaagttagttgcaaagtttattaaaactgttgcaactaattcccacaactaattcccagctctctcaatccatcctaaggctatataaacatgcatactcaacttcaaacacttatcagaacagaaaaatttgagagaaagagacttacagtggttaattcttggagccctaggtttagggctcggagatccaacccaagaaggagacatacatagagaaaggaagaagaaagagttagtaaaatatttagagagagagaaaataaacactgtaataaaaatggattatcaattgtacctgtgatttggaatcttgctttgtaactctttgatcttgaaaatctaatagtggaaacgagctttttctaaggcgagctcaaagaggatgtacccagcaacatttaagaacctctataaaatcttggtgcaatctctatattttttttgctagctcctacttttttttgtatctctgtttgtgtatggatctaaggttttattttgatctgggaagggttgattaggatatttgggttgtgagcagtcttcgagtttcttctcaagaaattcgaagttctgctagggtttcgatttgtggattgtgtgtttgtgttaatgacttggttccagagggttctgaggttattggatttgttcaatacgactaggcgttttggttgaagcttgtcgtttaactcattattcaacagagtcaactatgtttttgactcagggtgaaaggtcgattttgaccttgtgtaatagttgattttatttatgttgtgtgtaggttagaaaggtaaaattcctacaataaatacaattttttataatttacatttatttatatctttgagttttgagttgtaacttttttcttttatttttattttgtgctttggtattgtaactctctatttaatctattgtccttgtagtatttttcttaaagttatatttttttttatcctttattcattttattttattcttccattataatctctcatatatttctaacaatatctatttttttaatttctcttataagttattccatgaatagaaagagtctaaatggtgggcctaataagaattttagaattttcaatccttccatcctttaataagactatctcttattcataattgtaatcaattaattttttttgtatttttgttaaaccatcaactaatataatagcttatagttttataagagctctaaattattttaagatttcgatttagattctattctgactgacttattaccatgttttataacaaatttcaatgattaataaaattacgatttccattcaggaaaaagattataattttttggtttgataagtttatagttaaaagtaacatattattggtaatttttgtaatagagtctccgaaaggtttttggtagacatcatatctatttcggtatttaagaaaaaaatttagtttaagttttgtcatgattgtgtatgttatagctatttaaaatcatttataaactttgaatttttttttgaataatttacaatgttaaaaataaagttcaaacaattacttacgatgcgtataagagaaaatagtcataagtacggaagaagaaattgtgattagtatatataaccaaattcatatactcacgtaattaagttatgaactcaattttttcttttacaataagtgtacttttttttaagtaatgaaatcttcattaataggcaactgcctgcaaacatagtcatacactaatacaaattggaagtctaggccaccaaaccatacattctcaagagatgatgccattttagcaagatcatgagctagctattgtataagtgtataccttgttagttaaaataaatctcttaattttaaagatatataaagttaatttattgtgtgctttgaaaataattaagttctcccttttaaaaaaaatttaaactgtagactttctgtgttaaatttatataattattatttgcataaaatatttttatgtggtattagtagtacttaataccaccttgtaatgaagccttaaaatttacaaatacttactttcaatatcaactttaaccattattaaggatttgttgtctaaattaactttgagagatatattttttttttatgttagtcgtaattttaatattatagttcatgaatt

SEQ ID NO: 220789 - DNA, 2117 bp, Cannabis indica
atactatatcataatagaaatattttagagtaaatataatttcacacatgtgttatataatttaaaataaaattattaattttacataaataaatttacaaaatacatatatatattttattaagatataattattcttatatagaggtatactttgttaatacgggacttagaaaatgtataactaattacaatttagaggttattcttatttataagtggcccaaatcggtacttgatttttttataataaattagagattattcttgaatagagtattcttaaatagaggttctactgtatttatatacaaagttaggagactataaaaaactactaaatacaactgctcctaatttttacaaccactatacatctaatattctaacagtcttcgtcaaaaatgggaaaacaagtgctttggggaagaaacaacccaacctgagtgccagaacaagggactagagcccatgttgacacctagtgctgactcagcgcccaagttaacatttttgtcaacctgaaccaattccaatgagtttttttgaaaagtctttcaggcatattctttattttcattaagattcgactatttttgaagaccaagcagaatttgtaggtggccataaactggacccagtgcccaagttgacatattgtcaacttggactgtttccaatcagttttttgaaaaagtgttatgagcattttttttgtccttagaaataacaaagatacaagtaaacttgaggagaaaaccacaattgcaaaggcttcaaaactgagacggacacctaggttgacatggtgcattagttttgatcactcaaacgctaattttgctctgagcattctctctgaaatagtcaaaaatagggtaagaaacttcgtcctcaatttccataagcttggaagtatcaaaatgacatcccggaagcttcgaaataagcacctagcgcccaggtttacatatggcctggtgggtgcgctgggttctggttattcgattttgattccatcttgaccattcatctagtttttgatagtaattgagagctatgaagttagaagattcaaattcataacttcatattttcacttttccgacaaggtgatttgctcggaaaccgagtaatttcaagtctcttaattccgcaaaatagcaacatcttcgagaactaatgacgaactttactagaacacagaaatagactaagtgatgtcaaaatatcactttggcatcaaaaaatacatcctcaacatgttttcttactcacctagtccccaggttgacatgatgttaacctgggtgttggatgtcaacttaggcgttgagatgttaagatgagcgctgggatgttaacctaggcgctgggatgtcaacttgggcactgggcctagaacaactttcaataaaatggccataactcactcaatattgatctgattgacgcgattcaacttacatttcgaagctatttcaatgctctatcaagccatgactcacatttaaatcacaattctgaagttattgactccaaattttatcccaaggaagttataaatttaagctataacttacctagagcgggtcccacaaatgcgactcaagctccgaaaattgacgaacaacctctagagtcaatttcaccattagatcatcatctactgtcaaaaatatcctaaatgtacttttccatgttgtttggactattttattgtccttttaatatgacctcattctttataaaaggagagctacacaagctcattttttatgtttagaaagtagccataaagttagagtatttttctctagtttctctatctagaaattatagtatctagacttatccatttttctataatccatctcacgagatataaaactcaaagtagacgtagctccattactgttgcgataccgggagtgaactactataaattgttatgtctctttatatttttacttaacatataattcattcttgccaatctagcgagtaggtgtgacctagatattgttgggttttatgccctaaataaaacccatttcaatataatcagatttatcagttaataaagatcagaaataacattttaatgttgcatggtt

SEQ ID NO: 220790 - DNA, 2226 bp, Cannabis indica
atattttcaaattgtgatacatagtatagttacaaatgtgttgtgccttttaatttcctcttttatgcagtagcttttgaactcatctgaataaaattcaagaacattatctattcttaacactttgatgcatcaccctatttgtttttctatcatggttctccaaatgacaaagatttgaaaggctagattcttatttgttgattagcagaaacacccaaacttttcttcagtaatcatctatatatgcttaagaaatagttttctcgtcccagtgtttgaatcttggagggaccccataaatcagaatggatatatcccagtctctctgtagttgtatgcaactttttcactttgtaactttttcccaacacacaggattcacaaaattctaatgtgtccttgagaccacctttgaatactccttgtttatcaagttctgttagacctctttcactaacatgtcctaacctaaggtgccacattttaatgctaaattctagtgatgaatcttgtttattactggtgcagcacaaccagtaacagtgttaccatcaagatagtatatgccatttctaagtttttccttgatgataacaagtgaacctctagcgactttaagagttccaccatatatcttgatagtataactatttttatcaaatgcactaattgaaagcaagtttcttttgagttcaggtacataccttacttgctgcaagattctgatttcaccatcatgcattctcatttgaacagatccaatacccttcaattgtgcatgatttttcgttccctagtaagacacttccaccttgctcttttaatattgtactgaagaatttcttatttggtgtcatgtgaaaggatcaaccagaatccaagatccattattcaccagagttcgtgcttgaggcaacaagaatatctgctgattcatatccatcagcagccaagtcagcttctccccttgacttgtttttcatgttttgatctcttttcaacttggctttgagggcaagacagtcatctctaaaatacctttctttcttgcagtagtagcattgtttccctgttgagtttcttgaaccagaacttgctttgtatccacaattttcatgatgattcttgctgcccttgcaatctcttttcatgcttctacctcttgtgaacagaccttcaccacttgattcgatcttatcatctctctttctttgaatctcctttgaacttaatgatgccttgacttctgtcatggtgagtgaatccttcccatacaaaatagtgccaacaaaatgttcgtaggcttttggtagagaacttaacagaatgatagcttgatcttcatcatcgattttgacaccaatgttgcataggtctaggataatcttgttgtagtcattaagatgtcttctcaacttcttggactcatccattctcaatgtgtaaagtttcttcttgaggtataatttttcggccagagactttttcaagtaaatctcagagagcttgttccataaccccaatgctttctcctaacttgaagcttctcttagtacttcatctcccaaactcaacaagatagcattgtttgctttggtttcaatttcattcttctttttcttgtcatcaatggctgctagagcttctgtatcaaaggcatctgaaacaccttgatggactaacaatgcttttattttaattctccataggtcaaaatcattggcactattgaacttgtcaatctcaaacttcgagctggacattcttgatcttcttggtaagttctttgaagaacatatttgattcttgagttgctgagagttggaacctcaactctgataccaatttgtggagtcttaaaccccaaacaagaatcaacacaacagcaaaaacagaacaaatgatcaagaacttaaactgagcataaaccagcaaagataacaactaatgaaagcataaaaacaacacaaagaacttacgtggttgggctacacaataaagatgatcatgagcttaatctacgggagaaagcatcatttaatggtcgtggagatgatctttattaagtttgaacagagattataaaattgaagataaacccttcactcaatggagtcttgatccttacattgtgtctcacttgtggttctctcaatcaaacacatgagaggccatttacaaccctcaaacacactttgattttctctcaaaactctcatttct

SEQ ID NO: 220791 - DNA, 1639 bp, Cannabis indica
cccaaattgacacctagactcggcctgggacccaaactcggcctgggacccaagcccgaacccagacatggaaccaggctaggacctaggacccgaagttttattgggtaccgcaaatgggacccagccccaaaatcgacactcaggaccagaactagaaccggatcaggaccccagaccgggatctagatttgcacccggacctagacccgaacctggacctagacttgggctaggacccagacccagacccagacgaagactcaaacttgtaccccgtgacccaaaattagaactaaaataagaagataaccaagacccaagaatgggacagagaccaggatccagacccaaaaatagaatcgaactaggacctggactcgaacccgaacccagacccagactaggacccagacacggatccaaccctgtactaacactcaagaccgaaacatgaacccgaaccaaaactcaggccggacccagactcaagacttgaacctggattggggacctagactaggatccgaaacttgaccagggactcaaaattgggaacaagacccaagactcgactgtaatttttttccttgacttggaccttggacacggattgggatctgagattgggatacagatctagacccaggacccgggacatagatcgggatctgagattgggatacggatctagacctaggacctggggcttggacctaacctatagtcggtgtttggatctgggacttagaccagaacccggaactagggacctggactagaacctagacccagactagaacctaaaccaagactcaaactctaaaacatagactccagaaccggatcgagacccagaccgagaccaggaccgagaccgcactaagacctagactaggtcgagaccaggacctgaacatggattgggacccggacttagaccgagcctcgaacatggacctgggtcctagaactaggactgagatgtgatcctagaccaagacttggacccgaacaaggatccggattcggacccaaatctagacaatgatcgggacctagactcgaacccagactcagaaccctaaaccttaaatcataatcccaaaaccattaaccctaaacaccaaatcataaaccctaaacccctaaacccgtaaaccctaaaccctaaaccctaaacctaaaccctaaaccctaattcttagaccttaaagcataaaccctaaaccctaaaccctacttcctaatacgttaacctaaaaccctaaactgtaaacatggacctgacactaaaactgaatatagacctaggctgggaacgagacttggacctagacctagacacgggcctagacccaaaataggacccaaactcggaccctaactcacacccagacccgcaccctgactcggaccccgacctcgacccgggacttagacccaaacctggacccagacctgaactcgaacctagacctgaactcgaacccagaccaagaattccactcgaacctggacccagaccccaacccaaattggggacccaaaactggaactagaaccaaaaatgaattgggactagaaccaggacccgaacctgaaactagaactggatccaaacccaaacccgaactca

SEQ ID NO: 220792 - DNA, 4492 bp, Cannabis indica
agctagcctcaagtggttaaaggagaaaatgcttaataagatactagtagactctacagtcattttctacaagaaaaaacaatcttgattaatgttttcaagaggaaaaatgaaaaataagatataaggctttaaattttaaaacccctatataaattattgtacttagagcatctttaatggtgtatcattttactaaattggtgtgaaattttcacatactaaattatacacaaattaaaatttattacaagagtaatagttgattaagatttaaagcacgctaacatattaaaaatacaaaataacaaaaacaaaaataccaatactaaataaaataaaaacaatataacactaaaaagaaatattaaataaaataatattttaataaacatttggtgtaatttatttatttattttttaaaaaaaacaaatgtgtaatatttaattgatttcataaatattttattttactaaattattttaagatcttaaattcttactagtaatcatgttacaattacatcataaattaattattttttattattaatgtaaataatataaaatatgagatctttaagcaaaatatatttatttagtgagatatttagtatgatatttggtgtgtattattagatttgtcgtaccaaaaagtaaaaaattctacactaaatcgatgtagattctataccaaattagcgtgaattattggagttgttgtaccaaaaagtaaaaaattctacactaaaattggtgtagattctatacccaattaatgtaaccattagagatggtcttagtgttttagttaattatgttaaaattcttaaaaatttcaaggttaatcctctataagcacattaaatattaaaataaataaaaaattgaaaagtggaggttggaaattaacctctttacctcctacttaaaaatgacactatactactatgtttaaacattgttttgtcatatttttttttattatttaacattttatccatatataaataattattttcttttcgaaatttagaaccctttgggagctaaatgcgcacaccttgctcaccacttaggccaatcgtcagggccggtcctgaaacaaagtgggccagaaggaatttttttttggggcctttatgttaaaaaaaatgtagtattttttaaaatcagtaaaaaagaatgtataattttaaatgaagaaaataaattttggacccctggctcgctaggccctaggcacaggcctagcccgcctatgcgagggccgggcctgccaatcgtgaatgtatttaagcacttttacttgaatcaaatattagacaatacaactccaaatttagaaaatatggtgtgagcaacaagggcgaaatcccggtgatggttcatcttaaatgtaaagatgaaaaactacataaggataataggtgaggataatgaaaacaaaggaaaaaatatagcttagcttaaatgaatcactaagccaaatattaacaaccatacatgaggggaatacataaatctaacatttgttaattaagaaacaaacacaaatgacttgagcagagaacatatcatattttataaaccaaacatatataacattgatgaattaacgttatgacttacttgcggcaaatcatctttttctgtttgtatttcctggccaataccattagagatggctcgatgattccaccactaagcctcataaccaaatgcaatgtggactttgtggaaatgaccaaaggaaattcacacaattttgttaaattttcattacaaacagtacaatattcataattgtagctaacgtatttcaatctcaaaccctctaaaaaattctcaaattttctcaaatttatatagataaactctgattcgataatctcactttgtattgactgttgggtagtaaccaaaatctcgtattgactaaaaatgaaaaacactatgagcatataaggataaacatatctctattagtatgatgtcttattaaaaagtatttaaaaataatttcataaacacttacactaaaagtgaagaagataaaaatgagcttgagagtaaacttataattatataaatttaattattttacttagctacattttacaaatattattattgattacttattttttttttatatataattattagatattaaattatgccatagtaaaaatgattgaggacattggagatagtaaagcttttggattttagttatggtataacttgcattcacttttttttcctcatttacacccttatgtgcaaataatattaatagagttgtaaattgtaataagcaaactttagggactaaagtgtaacattttctataaaattgggtaactaatataaattgtggagctttatatatgatagtccaactccttacagagccaaaaaccctagacgagtcggctaaagatgcagatcttcgtgaaaaccctaactgggaagaccatcacccttgaggtcgagtctagcgacaccatcgacaatgtcaaggctaagattcaggacaaggaaggtcagttttcactctattcattctttttcttattgttgcttgcaaatgattaatgttgtcattgcttctctgcttttaggtattcctccggaccagcagaggttgattttcgccggaaagcagcttgaagatggtcgcactcttgctgattacaacatccagaaaggttaccatttttttgtttgtttgtttatgtttcttttgagattatcgaataagaatttatctatatagatttaagtgaagttattgtttgtttggttaaaaaattgagaatttttcagagggttcgagtttgaaatacgttagctacagttatgaatattgtattgtctgcaatggtttttgtttatgaaatttaacaaaattgtgtgaatttgattgggtcatttccagagtccacattgcatttggttctgaggctccgtggtggaatcattgagccatctcttatggcattggccaggaaatacaaccaggaaaagatgatttgccgcaagtaagtcataatcttaatatatcaatgttatatatgtttggtttatagaatatgttatgttctctgctcaagtcatttgtgtttgtttcttaattaacaaatgttggatttagggattccactcttgtatggttgttaacaatatatattgttcctttgttttcattatcctcacctgttatgcttatgtagtttttcatatttgcatttaagctatggtgttcttgtaatgtcttgtgtcgatactagttcagttttttgtgtctttatgtgtcaatatcgatatgctttatttgaaacttctttgattgatgctcatagcgtttgttacttgcttaggtgctatgcccgtctccaccctcgtgctgttaattgcagaaagaagaagtgtggacacagcaaccaggtaaacaaacttttgtttgattatttcttttccgagtttcaattaataattattaaaaacttgtttatttacttgtttgtttcgtaacttgaattgcagttgaggccaaagaagaagatcaagtagattttcattcctaccgtaaggtgctgcttctgcagttttctattagaacattaattttgtttatgctgttttggacaacattgctctactgggaaaacttatttcctgtatttctttgtgctttggaattttggttattaagatgttgagttcgacctattatttggttttacttataactattctcttatacatttatacggttatgccttcaagcatttttcttaaaaatatctagaaaaaagtttttagattttgtgttacatcaatgagtaatctttaaaaataaactaaaatgtccaaggtaacaattctaagatcaaatgggatttccattaatgagttggaaaacattcaatcgaatgcaattatgtatttagattcaaacaagtaacagccctttttctcttgttatttagtcaaaacttagaaccctaaatcaacataaacaaagacgcttatgcaaacaaaaaaatgcaagatcccaatctcgattccaacacacctccttaccggcacctaagagatgacggaacctccttaccatctaagagatgacgggaacagaatgcctacatggacgctctgcacattcgacactgttctattgccctcggggccgatggaaagcaatgatacatgaaagtttttttattattgttgattatggtgagatagcttgattcaacactggcaatctaattttaaatgtttttagcttataaacatgacaatggagatattggttgacaaattttgggatgtagcttatttagaaccaaatttggcactaaacataacataccaagtttgatagaaattagaaaagagcattacctttgttgtgctaactataagattagtacaataatttagctaaagatattaaagcttaaactcattgcctttacaa

SEQ ID NO: 220793 - DNA, 1645 bp, Cannabis indica
aaaagttacgaattgaattttctattttgcaaaagttactaattgaaccttctattttgttaaataacaaaatggactttgtattttctaaaattgtacaaataggactctaaattgatttttttgtcaaaataaaacttaataaaatttgaataattaatgttatgataaaattggttatattttctgtatctgttcgtgttggaaattgtcttaaagttggttatattaaacaataaaattattgaaaattgagttcaaaatcttatttttacccttttagaaaatgtagggtttattttgttgtttaataaaacagatggtccaattgataaattttgcaaaacacaagatccaaaatgatattttttttaatttacttgctatttacttgataattaatcatgttacatatgaaaattaaatttattttttcttaaaaaaattaataagaaaaaagtttctttttaactctactttgattaattatttttttattagtattttagattaaaattttatctcatattgtgctaatttaatggtaacttacttatgtaagaaatagcatagttaatgtcacaactacaagtcaaatctcaaaaattataaatttacaaagctaggaacaaactcaattttggaggttgtgggggctcccttaagaaaattgaatattttctattgctaatttagttagtcatgacacttgattcctgttagttgttatttcggttagcagttgttaattagttttaacaactaattaacaactcaagtgtcatacttagatgaaatgcatatagaaggctattgaattagtccttacaataggagcttgtacagattcattttatgtaataaaaaactaaattaatttattttatatttgttttacttaaatagtgatgtgaattagaattaaagacttgcattgaattccaatgaattggtatcagagcttgtattcgattgaaggattggaaattatcgattgggggattagaggaagatgaaagatctttatctgtttgaagaattgatccaagggggaaaatggggaatgcaaagtttaatttgaaaaaattcataggcaagaatgactttggcttatggaagatgaagatgagggctctacgttcgaactactcgagaaagctcatagtgccataattctatctcttggagacaaggtcctgttagaggtatcgaaggagaagagtgtagcaagtttttggaagaaacttgatcaactctacatgaagaaatcattggccaatcgactgttcttgaagcgtaaactatatgcctttaagttatcttttgaaagatccattgaagatcattttaatgactttaacaagattatccttgatcttgaaaacatagatgttaaagtagaagatgaagatcaagggatcatacttctaaattcacttccaataaatgcatatgagcactttgtggacactatgatgcatggaagaaactatttgacattggatgaggttcacagtgctctaatgtcaaaagagttaaagaagaaatcataatatatggatgaattggtagggaaggtttgtttgtctgaggaaaaatggataagagagataacatggttcgagaaggtggcatgaatggaaaa

SEQ ID NO: 220794 - DNA, 2720 bp, Cannabis indica
ttattttatttttattttttttatcttttttgatataggacttgggttagattgatatccaagtaacccaacatagtatttctcatatatttattatgttcctctcctacaaaatgttgagcttgttttggtgatatcctatatgccaagagagaaatgtgagtaattttgtgtaactcactttcttatgtatttagattcaaaatgggcatccaacaatctttttggaagaaaagattagtttggaaacccttttgtgaaaaactcaaacaggccaagatgcaatatctattttagtattaatttctaaaatgtgatttttctaataaatattagttctaaaatgcattaaaaaatttatatatgcctacgttgcactcacacacattgcgatcaaaaccaataatagtccttaaaagtctctcaaaatcataatgaagtgctattaaaatttaagcggacacgtgtttaatttaaataattttttttagaaaaaaaggaataaaaattaatttaaataataagaaaatttaatattatttattgagagttaataagaacataaatttttaaattataaattgcacatatggagatgacacatcaatgttttgttttggtgggagtgctatgtagggtaatatatttattttttgcaattttttcactgagttagtatttataaatggaataaaggttctaagtattgaattagaatcacatacatcctctcaaaaaataaataaattcatagaaatgaacccaatgttgatgagtcaaattaataagcttaagaatttctttttcctagggcctcattcgagtaaaaataatttggaactgaaaaaagaaaattgagaaaaagatttatatattggaagtttgaaatttagaaatgtaaatctaggtaagcattaattcaagaatgattattaatactactatacaatgatggtataccgagaatgaaagttctagctagctaggctaggcaaactaatgagcactcactaggatgaaaaatgaagcaaactggtgattagattactaaaccaagttttttccaacattacgagcactaggaagaagatgaaccaatgctattttatttaaaataaaaaaaaaaaacttagattaaaaaaaaaaaagtaaaaatcttatcatttcttttagtaattacttgatgaaattgattgtgtattgtgtgtgaaaccatactataacataccctccttcccaaattccaaccaactagaatatattattagggtgtctaccataaaatcctcttaggggtctacttcagattttttcaaaactgtaagggattgtttaaaatgagttaatgctaacaaaagaattataatataaaatattactttgtttgttttgaggattttttttttttaaccataaaatattatttctttgataaatagttattcttgaagagggtattgacgcaaaaaactgatcaacacttggtcgctagattgacgaaaagaaatagaagttaaataaagtaaataagagagacacacaagatttaaagtagttcacttcttatgtcgcgacggtaatggagtatgtctactttgagtttttattgctcatgaggatacaagaaaattgactatggcaaaagctttatatttctaaagagagatactctcaccttatgagctccttttttaatatgaaaaatgagttagtgaaactctcattttatagggaaggagatcttattaaaatgataataaaatattacaaaaaatatgaaaaaatatttttaggttgatcttggctattgatgatgatctaatggtaaaaatgactctcgatgttgatcgtcaattttcgaagctcaaatctcgtctgttgaatcgtttttggttaatctgtggaaaaaattgcacttgtcttgggaataaattttagacttgaaatcttcagaattgtgatatgggtatgagacatgatttgaaagatctttaagactttgaatcgcgtcaatcaaatcaatattaagggagttatgaccattttattagaggttgtttagcactcaacgcctaacactactagaaaactaaattttcccaactgttttaaatagttgggtaaagtatttcccttggtctctgagaccgatgcctattcgactgttaagaaaatttggtagaataggcgacaatagaaatgttgggaaatttttttctcgacagtacaaaattgtcgcaattactgagcagtattagtgattgtttaaaacagtcacctacacccttaaaaaaattacagatcttaaaccatatctcatcgcttgaactagatttacacaactaaaaccagatctcggcacatttcaattcaatacagtaaatatatatattcattgcaaatatattaacttttaacccatttattgacggtgaagacaaatcccaataatcgttttctaaaatactcaaccatatcgttcctttatcatggatttttaagagattagcgagatttctacaataaaaatactaatgtaaaatgaaaagatatatcaaattctaaagaatacaagaaaattgactaaggcaaaagctttatatttctaaagagagatactctcaccttatgggctctttttttaatatgaaaaatgagctagtgaagctctccttttctatgggaaaggagatcctgttaaaataataaaaaaaaaaaat

SEQ ID NO: 220795 - DNA, 2846 bp, Cannabis indica
gtaacactgtaatgtactccttatacgatatacactacaccaatgcactctgtaccattcccgtacaagtgttggtagtgtaataattataacaagcatgcatatacattaacacatacatacactcgcatatttatatcatacacagttcttacatcctttccgaattcaagtgagttggctgacctttacggaaagtctcgtgctggatggatgccctaatcacatattaaaccggataaatcacatatcaaaaccctaatccaggaaacctaaacctacaactcaaggaaacgttatttctaaaagggactacaatatcctaggaaacagggaaacacccaactatggcactgaaatggtcaagaattgagaaaatgagttattcgggggaatctgtcaaaactggttaatcggttttacaagacatggcaaaccgattaaccggtttgcaccaggtttccccaacaactccaaaactcgctcaaaacttatctaaatgccaccaaaccttcctagaacacctaaaatgagtatacacaatataactcaacccataaaacccaaaaaaacacccagaatcaaaatgtgccattgatgactcaaacttgatcatccaaaaccagcattaagaaccaaacacaactcaacaaaagcagcattaagaacttaaaatcaactcaaaataagctcaaaattcgaaccaaacacaactcaaaccctaacagcccctataactcaaaatcacatatccaaaccaacatcaaagcttgaaaaaccaagagcaaatgatctaggggttacctaaactttgaatcctacttgaatccttactgaaaacacaaaattcagcagctaatccccttggttccttgctggttcgtagagagagaagggaaagtgagggtattttcttgatttttttgacttttcttattttctttgtttttctctaaaaggttaattaattaaatctaattattgttaaaaataacccaaatggacaggtgccacaacaccaagcagccacctaagtcaccatttgaaattacttaaataccgccatttgcataaacttaggcattttaaagtctaagggtaaaatggtcaaaaaccataaccccgctcaaactcggtattctatttctccaatatacatcccactaagaaataaggttctagacttacccatgtgattaaacaaaactcacccaactcggacagaacccaatttcaaacttagcatgctcaaactcaaagaataattaacaaaacttaaatagaaggatactagggcttaccttaagattacaccaccaaaatccctttgatttcttactgaaaaactcagagaaagagagaagaagcagttgggttcctctggttctttctagggccgaacaagagagagagataaagatgaggttaagttcttttcttaattttctaaattagctaataaatgaattaatcctttaattcttgtttttttctaacccaaactattcagattatgtggaattattccacaaaattccacttcttatttgtgtttctgcgaagcatgacacgtggcatttaatgagaaaaaccaagttaatccttacttgattaaggtccattgataccattctgtcacgaaaagacttcctggaaacgaggagtatccaaaaaggaaggatacgtgtttacctatttatgcttccctctatttcccaagcgtggaaggtgaaatacctctgccagtcctagttgggcttaacatggaagctcgctcagtttatatcgaggcaggcagttgcaggacctaaagtggatatcaaccctcataaggtatcgcgaaggttgacctttcacacatgccaggtcaccatagtgacaattctgcttttttttttggcaaggattggatcttgtctcccacattcgagcatggtagtgcgcataccaccaccacctttttaccagacagacattacgaacttctgcctataaaggaacgagcttggagcgacacgtgtcccctaattttaaaggttgaacctttgtgtgaaacgtgtccgagtggtacaaaaatggtccccattatccagctattgcatgcacgggcatgatgcaaccaacaagatcatctaattagctctaacattgcatgtaatttaccccgataacaagatttgagtagaaaccttaggtgggtcatgggcctgtccataacctccagttagcctatataaatacccctcacttctcatataaaggggggatcaaattttacatagctaaaactctatcaaaattgttgtaggttttcttctccaagagaaacttagggtacaggactagggtttgctacaatattgtaaacacatcaataccaagaggataataaactgacttgtggctaagatttatgtaactaacccttagggacgccacatgtgtgcatttataatttagtttatgataataaactaacagtttcaataaaatgtgatttaataaaattttactaactaatctaaattataaaatcatggcataatcttttttatgattgtgaaccccctatttgaaatatttcaagacatgccattacagtattatcatcaaaatacatttaaaagtttcgaacatttgaaatacaattcttcacgactcagcaccacttgccaaataagttgatatgtacacttgctgagaagattcctgactcaaggttgtccaaatatttttatatgttacctacaccacatagaacccgtgagtcacaaagactcagcaagaaaagtaatagcaataatcatataatttattattcagatattatcatttatactcagaca

SEQ ID NO: 220796 - DNA, 3188 bp, Cannabis indica
tatttttttattaagggatttcccgtcccatacctgataggaaataagcggagatagaaattaaaatttctaatagggacggggacggggagagcactcctcgccaattctccgccccgtgtacattcataatttttctattggacaatgttctgctgaaaacaatgttggaaaaattattatatcccctaaaaggattattatggtatactcattaattatttgttttagtatttaggataaatttttaattttttttttttttataattgtacatgttaaaatttgttataaagtttttataacattttaaataattgatagtgttgaaaaataaaatttaaatagttaagataattagatgagtaataaattattaaaattttatttttgtaaatagaaatagttgtttgattatagtaattcttatcacaaaaataaatctattatgtaatttttccaaacaaatattcatccttaaaatataaagagaatattaatatagtctagtttctaaatttgaactttattatttgaatacaatcaaaattaataattataagttttatgaatattattattagggttatactatattattgtgttgggcactgatcaaatgctaaggattcaaatatgttcaatacttgggatgcctgaagcagatgatcatagtatgtatcttggctttcctaacacaattggtaggaaaaagactacaatacttgaattcttaaaaataaggtggttaatcagattaatagttggaatggtcgctttctatcccgtgctggcaaggagatacttcttaagacggtcattcaatctcttcctacctatgctatgagtgtcttccttattcctctcaaaatctatactgagattgaaaaattaatggctaacttctggtagaagaccacacggcaaaggcaatgggatcatttagatgtcttgggataggatggagttcataaagattctgggggtattggctttcgtcgattacatgattttaaccttacaatgcttgccaagcaaggctggcggcttcttgtctcgccaaattctcttataagccaaatttacaaaggaaagtacttccctcggtccgattttcttattgctaattttggtaataatccaaattttgtctggcgaagcatatggcaagtaagagacattgttaaacttggtgccaaacgtatcataggatcagggaccactaccagcatactgtctcaaccttggttacctgaccactccaatgtgtttgtcacaaccactcatcttgggcttcacaacaagatggttaactctctctttgagcacaacaatttatcatgggatcgttagattgttcatgacatgtttaatgcgcgtgatgcatctctgattcttggactgtcgttatgtatttctgctggtgatgattactggtcttggataagggagagcactggtaatttcttggtgaaaagtgcatacaacttgctgcagaaatcaacaaatcaacatgctggtgcgaataactctggcttttggcacaaactttaacagctcaagatccccccaaaggtcaagaacttcatgtggagagcagtttcgaatgccctccccacctgcttacagcttgtcactaggcatgtaaatatctctccaacttgtcccattttcaagagccaaccaaaatccatcactcatgctcttattagttgctcttttgcccaagcatgttggcatcatgctcaaccttctgtcaatgctactgctaacactactgttggtatgtggttaagcaatgtgtttactgcttctgatatggaaacaaactatcgcacactcatgctgtgttggacaatctagaaagcacgaaacaatcttatttggaataaaaaaagatcttctccacagcaggttgcttcatcagcattagttactcttgatcaatggcgcaaagctcgggataaacaaaatttattatcattggctcttggaaccgatggctctaaagctgagcaatggactgaacctggacctaatacaatcaagattaacattgatgccactttgtttgagagagaaggctcctatggcttcaaaattgttgctcgagactccttagtcaccttgttggatacttttgcagtatgtaacatgggctcttttgctgctgaagttgtcgaagctataagggttaaggaggctcttagttggatcaaaactaagggttgagataaagtggagattgaaactaacagcatgctcactgtttaggccattcgtacctctcattgtatgtactctgtttttaggttggttgttaataattgtaaacttctactttctaatctcccacatgtttctttgcattttgttcaacgatcagctaatcgagttgcccactatatggctaggcactctcgatttttatctggttgtagcattcatgttcagaatttaccgcctgattcataaggttttttgtactctgtatgctaaatttcaatgaagttgctatttcatttcaaaagaaaaatattattgtgttgggcgtgctagttattgttctcataactgtattatctaattttttggaggacagtaatttgttaaataatggtaatcttttattgtggccttgatataattaacacatgcattttgattagacaataagttatcatgtttgaagagagtttaaatttcgtgagtttattagtgattttaattattttgtgaaaaaattaataattataaaatataaataattaatgagtactagactttgttattgccttaaatatgatacatataaggctcaaattctaaatcatgagatttggacaaaaacatatactattagtcacttacaaatacttttaataaatttaaaattgaatttgttttgacgaaattgaaaaaaaatatgataatttttacaaatattaattacttatgccactaataaaattattaaattattgaaataattacataagacactattttttgtaaaatatttacatttttacgttcaaagaatgtttttttttacatttttacagttttccaaaaaaataacacgaaactacataaaatcaacaaaaaaattatataaaagtaacatgaaaataacatcaaaataacaataaaaaataacatacatataataaaaaatcaacaacaaa

SEQ ID NO: 220797 - DNA, 1581 bp, Cannabis indica
atttatgaaagtacgtaactgcccataactcatcaagaaggctttgccgcgaccactgaattcgtagaagcgacgcctgggacctctccaattaaatttctctctgccaatctccaccacgactagaaagaatggctgtcgtggcgagctttgccagaaaaggactttcgctctttcttaactcttttcttttttgtccactctattcttgcgaatacttcctttaaacatttatggacctgaaacaaagagaattaagcgtaaaacagtcctaaaactggaaacaaagataaaaaactaccctagaaagtgacccaaaacttagactaaaattagcgtaacaatatgatgcaaataaccaattgtttctaattgcttttggtatcatcgacaagtagaatgatgactcttggacgttttcttacagaagttgagggaagcaattggggtgattgaaaaattagtgtttgtgtcagataggcattaaagtagtccattgtgcatgctattactatattgttatgaacgtaaacttcaagttcaagactgatccttttcacaaccaaatatatattgtagcttactgatggttgaaaactgattgtgatagatagtttgagaactttagaaagatgaatcctgccattcctacatatgtggagagtataggggttgagaagtgggatcactctaattgtttggccaatcgatacaacatcatgactagcaatgctgctaaaagctttaatattgtgaaagaagagtttaggaaatatccaataactactttagttaaatttatcaggttcacactaaaagcttggttcgctgatcgcctcaaaaaggcagacaaatgtacaacctctttagcgactctttttgaaaataacttggccaaaaatcataatgatggaaggttaaggggagtccaataaaatggagctatgtataacagtggtaggtggcctaatggtgaaagaggtggtgatgtaaacctagttgaaaggacatgcatctacgtcatgtttacgttgttgaagcttccttgtactcatgcatgttttgcgacattgaaaatgaatacgagtgtgtacatattatgctctccttattattcaaaagataaatggaggaagacttacgatgataccattaatcttgttggtgataaggatgattcggttctccctaaacacatcaagaacatgaaggttggggtacccgtggagaagaaaccaataggtcatccaaggaaaagaaaggctggaagaagataggagaatcgtttcctgtttagtgataaaagagtcacgatacctcgaaactgcattatttgtgacagttcaggccacaatagagcaacaaggaaagcccatattttaggcgtagtgtactattagttgtaataatatatttttcaactggatttgttatttagaactgcttattttgttttggtttctgctttgaaattaggttgttagcaggtgcatttttaatatgttaaagaacttgttgtttttttttttttgtaatcaacggtttgtcaacattttgtcgatgttaagtctgtatttgaga

SEQ ID NO: 220798 - DNA, 3561 bp, Cannabis indica
aagacatatagtaagtcctaagttgtataattgactataatggactcattgccaagccttctacatagtttccaagagaaaccacgcataaggccacaattctatatgcctccaaggccgtcacaagaccctagtcaaggtcaaaagagggagaaaaactggctgctcacttggagccttagccttggccggcgagggttccaagtcctagtggtcggccggacctcaagacctagtctagtggccagtaaggaaccctaattccaagcatcagtcggccagcctaggggtacaacccccttggctgggcaaaccccatgaaaactacccatggccggctaggcctcaaacaaggcctccttggccgaccaagatctgcatggattggaatacgtattttttcaagaactcaaacatgttcttcgtgactcaaagaactaagaatcacaatgaaggccagattcagatcttttttgtctagaaatcacacattatgtatcctaaggatatcatgcggattaaaataccaaaaggataacaatctaacgtaagaatcaaagcatgttcaaagcaaagaatattgttcatacattcatgtaaaaatcaaccaaatcaagtaaaattaaccaagaaaataattccctaagcataatagtaggaggtcttatgtatgttgttgcatgaactaggccagacatctgctgttgagtggaagttgtgagtaagtatcaatcaattccaaaaaaggtacattggaagataatcaaacatattttgacataagtaaagaagaactatatgctagttacaagggtgatattttaaaactcttaggctacaccaaatcagatttgtagatttgcatcaatgttagaaagtctaaatatgagatgatgattactctgggggtggaccagtgttttttgaaaactgtaaaaatctatttggaataactaactctaccgggaaggattaataataaggttgtcctaaaggcaattagggaattatttagactcaggaaagtttgatatagagtttggcataattcttgaaatagaataattgcttagtgtgactttgtgataacacaaatgcaattgccaactagtaaagaatgttgtaccctaaaaggagtaaaacacatggatggggaattcacaaaattatagattttatgactaaggaaaatatgatggtggagaaagttgatactgaatacaacctattagatccttttacatagttaatgccaaatactacatttgatcaagacatcaagtatatgagattaaattgaaagtcgtctagttttatattagtgcaccctaaataaaacccaatttcatattttgaccttgtcatatgctttgttcacatgttttacacatgattatatgtttaatatataagttctattaaatcttaaacatacagttatttacaattacagtgatgtctttacaatggaaagtcattgtgattagatgcttcaaattattaagtctcacgatttatcaatgtattagacttacactgaattgataatcaatgatgggattttcttacacttggataagtagaatatcttttccaaaaggcattagtactattatcgaatgtatcagatacacatcggacttgactgatattgacagtaaaaaatatatcataaaattatcattatatcttttataagtcaatattacttagtttattttatatcaaagatcttaatcttgagatagttaggttctagcttaattgtactatatgtgttctttgacttattcgttacaaccttactaggggatcgtctcaatacttatatcttggaaacacggtattgcaattgagtgagagtgttaatcatagaaatggaatctatagcttctataaatacatagaagtgaaatgataattttcttagagtttggctaacagacataaatagaagagctcttatttcagtaattatattagtttattaaaatatatttataagaagaagtgttttaaggataaaatacattgaagggtaaaatagtaattttagtccctactcagtgtagatcatctatagaggagcattgattatttagattgaaataatcgataacttatagtatatctattcttggtgaatagagtgttctatgtaatcaagagtgtaattttgaacatatagttgatttaggagaaattaataagataaagaatttactcgataaattctagaactgcttattgggagcttgattatatagtcacatggtctccacactagttgaaataatattgctttgtagtctcacttaattggtttaattaatcaactaagaatctaagtaagactttgtcttatttatgaattttactaaggaaaggtaatagagtttatttgttaattaagagaccttgtagggtttaactaataattatatttaaatagtaattttatttaataattagtttcaattattaaatagataaagttgtcatttaaataattagaatcgataaataaaatttttaaataaaagatagtttcattaaggaaataaaataatgacaaaattcaaactcataaaccttagtgagggttcattcatgaggttgttttagatttcattatagtcttttattcagcccatttaaattctaaacctaaccgtagactcaatctataaatataacattatagttcttgacatattcatatgatatatacagtgtatgtactatattctctttgtcaaacaaaagatatatttttttttgacaaagtgattagaatcactcatgaatttacgacgcagacgtccgccaccggcgctagaacctccttgaactaggatagctcatcgtctaaccgctgagcatgctttgccaagccatgggtcgctaaaatcttagaacgaaccacatgggacaaaactgcccccgaaaatttagacaataaagttataacaacttcaaacaacgctcctaattcgttgagtccaaataacaggactaaagatgggactccagctcaaggacctaaccccctgtctcctggctgtatatggtttctccggccaaggagtcgcacctctagggcaaattcacctacctctcattgttgggcaatctccgacaagcataactataatggcacaatttctggtattggacgttccatcagcctttaacgtcatgctaggccgaccagctttgtatgacttaaagactgttacgtcgatattccattcatgcctgaagttcccagcaaataatggggtagggtgtctgagaggaaactagcagattgctcaggaatttataaccttgcagtggccgaggctaagaaggaagtatcctccagtcagagcacggataagggaaaaaacatttctaagtagggaacttcacaaggcggggatgaagatgtggatcctcgacttggggaccgaagaagcaatgttggacctgtggaagaattagaagagatcgagatcgatccagatatctcggccaagaagctaaaaatcggaaaaggtttgttgttcgaaataaaat

SEQ ID NO: 220799 - DNA, 3055 bp, Cannabis indica
aacaagtggtagggaaagagaaggttgtggtcgtagaggaagaagatgggaattttttctaatgaagatgcataatctttacttgttcaggagggtgcactgccgaagtccagggtagatacttttccacttgtctttgtttgctcttgtttatttatatttttaacacgtgtttttcttttatgcaacaatgtcagaaagaatgatgtgtgcattaaggaagaggttaggtgacgtctctgagtaaaagtctctagctaaatgtccaatgctggacgatgcccctataagcattgcgttgagctccaaaacacctcagattaacattgagagagctcagttgtcatccctgcaaatattcccgaagctatcccttcgactaagaagacttccaactttgaatcttcaaatactttggccaaaaactctaaggaggccaacaatgaggggcccaggctgtcaaagcctgtagttactctgcctacactccaaccagaaacaaagaaggcgaagaagatgctatctttctactaggatcttctgatgcctgaggtaaacaagcaacttactggtgcagaggaaatttcaatatagctcctagtcggcgaagtcctgaaggaagtcacctgggtaagcttttgtcttagaattatttctatatagatttttccacgtacaagttttaacttgatttctttgtgcaggttaatttgacgctggcctacacttactcccaagccaagtctgcagttttaaaggctactgcgaccactagtgacttgaaaaaggcactaggagaggctcagaaagaggtcgagcaaaagggccatcagctaagtgaagtgatcaagcaacttattactacgaacaagctcattgatgaactaaggcataagataaaggatatgttgtccacgtctaagtttgaggaggatcttgaggcaacatccaaggaggtacggtctttgaccgatgagagggaaagtctccatactttgcttcaaaatcaggaggctaaagtcaaagaattgaccgagggtttgaccaaagaggccaaggaaaagattgccttccaagaatcctttgctactgagtgggagataatttataaggaggtcaaagagtacgaaactgctgccttagaggtcttttacaaattctagaatgaagtcaattttgactacctcaaggacaaactatatgctggctttttcaactattacgactcaaagaaagttgaggaagaagcaaagaaggctgatgaagacttttttaccgtccaagatcaagataacccgaccactcaggattcagccgttactgcccaagactcgaccgttcagtttcaagaccctgggaatcctttggagtcaatcttcaaaccttttttctatcttgttcgggccacgagcctttttatttggtacaatatggccgaccaaacgacctttaaacttggaaaaatattttattttgcttgagacaaccagctggtcaggcagcttttatcccgaacacaatctgcttcgttatcttaatataaatattttcctttaatattgacttttgctatagcttgttttttaccaatgccaattattctacgggtataggtgccccctaagtgaccaaacagacttttgactcttggtcagttacatttaacaagttttattttgtctctctggctttttggttcaggaaaatcctttgtacatgtttggtaattatataacttactataatttgcaaaaaaaaaaagcataagattgacacaatttgaatgataattgctatctatatcatttattagttggtatgtgttgttgccatagtaacctacctttattgaattataagaagttattacatgatctacctgatctttatcttattaaaataatgaacatttgaacagtatattttgcacaaaatacattactcaagagcaatggttttttaaactaattaactgtactttgaaaattgtcatccgacctaagcaccagttgtcctctgaacctttgagcgaggttcgctcataagaccattacttaagagtaatgttcaagcatcgtgcaacttaaatcatccccggacgtttcgcacttagtattttcttaaatgttcgacattctaataccttggtacaagaactaagtctatattttcattataccgacaaattttgtatgctctagatttggtaactttatttacttggtatgatcattcccaattaggttcgagtagacatgctgcattgtcctctgtgtttcgaaatactcttttgagtactatgtctgtcacaaaaaagttcatttttttcacttgcttattgaaatgttgaattactttttgcttatgagctagtagttttatgtgaaaattgtatatgcgtaaatatttaagctagaaatagttacaagagcttaaataaaattgtagtagtatttgtgtaattaatattttttttttggggtaaaattttcaatcttattagactaattatgtcttattcctataaggagcattattattacacatatagatgatatataaacattaatcaaccttgattattctaatcaacacgtgaaacataaccaacctaactctgaaaacggatattcgaaccctttaatatttacactttttatgagatcaaatctcaaccaacatccatcgacaaggaagaatcaatcaatttgactttttcctatctgttttttcgcttagtctaaaatagcatgtgaaatgaaagtacggtacaagcgccaaaatatccacccaagagaactgctattaataacaatttggttggcttgaatttcctctagagcctacctcgcttgtacatgtataacatgggtcccactatgatcatattcaaaacacaaatcccactatcatcatatacaagctcttacggcctaatacttatatcttggaaacatgatagtataattaagtgggagtgctaatcataaatatagaatctatagtttttatatgatgatttccttcgagcttgacttaatagagataaataatt

SEQ ID NO: 220800 - DNA, 2814 bp, Cannabis indica
attttagttgaaagtaagcactaaatgatatgatcaaacatataatttgataataattgtgtggtaaattatggtacatatagaattatattggtgtaaaattaaagtgtccttttgtattattggaaaatatcacatattgttttattggtatattttgatttaaatgtcacattggtacagtaaaagagcatattaccaaatactaaattcttcttctttcaaataaaaaaatattaaattcttattacaaacaaacaacttcaggttataattcaaaaaaagcacacacaaaaaaaaaaagtttgtgaggaatttttaacatttttttttttcagatatttagattttacttacataaaatataaaatataatttttttattgattttttgttatttgtatattattattttttttcatataattgttttgttatttttataaaatactgtaaaaatataaaaaaaaattaaaaatataaagtataaaaaattattagttttctaccactattatttttgtttaataccaagtaattaaaacatgtcatttatgatataattcgattatttattatatttatatgctttgatgtatgaatacacttacttatttttttattttgttatatggaacaaataatggtcttactgagtaacagaaattctcataaattatatgctaaaaacaaaaacaatataaaataaacaaactactacattcatttatgaatattattaatacaattttgaagtaatcatacaaatataaaaataatagcatatgtaattatagttattgattatatgtctagtacatgtattgatttctttaagctatttcagatcgacacaaaggacaaaatttacttgtttgtagccatttaacaatacattcttcatgatacttgtgtccgcaagataacttaacagcttcataaccagctaaaatactctcgaaacaaaccgagcatgaaactacttcaccattctcaatgtgatctttcttcaatctctcaatcgactgtttacttgctgctacgaaattaataggaatgatgtccatatcataaacttcatcactgtattcatcttcatcttcttcttcttcttcttcttcataatcaccttcatcgtcattatgttgttgaacaggtagttcatcaacaaaaacatcaatatccactctcacactcaaaacacgatgttcgtcactccacatcttccgaccataatcaataattttatcacttaaaaaaaacatagaagaaggaagattaactcctgcaagcgagttttctaacatatctttagctgtgtagttattcatcaacatgtcgtgtaaaagcactacaagatttgtaaaagtagtagaagcttcttcattgttgtcgcatagaagagtagattcattgtattgatcttgatcatcttgcatagtagataccgaaggccgagtgaaatttgcaaataagtgaattacaaatataggattgatactttcaactctagtaggattatatgggagtatagtgtaataaggatcaccaataatttgaggagaagccatagtgagttgaaaaagaaattaagaaagaaaaagagtaaaataggaactaattagaaggatcgtgtaaaataggaaactaaggaattaatagtttagattttgattttgattttgatttggaatgaattaattagggttggtttgtttatatagataaacaaagtcggtctaatatagataaataatgcttgtgaaagtttaaaatttgaatatagtctgttcgtctaataataataataataataataataataataataataataatatctattttccagtttacctcatttaaacaattaaaatatatttattttaatttttgaattattattcttataaaaattactattaatcttaattttttaatcatttatatatttactttagctacctatttttaatctatttatataattacggtaagttatatcatttttatatttaattttatatatattctttttttttgaacttgggttacaatttgagttgatgcatgagttacaatgtagattacgaattgagtttgattgcgatttgagttattgcattacgagtagaacatttactttaaagcaccatatatttataatttataccaattttataattcatcaagccgttcaaattgcccgcactgtaaaaaaaaaattgcagtttgaaattttttgcggtgcagtcacggtttgaattttttctaaaccgcgcggtgcggtgcggtttgcggttttgaattgttaatatgcggttcaaaccgcaccgcaccgtacattataaaaatactaatttttatatttatttaggtccaatatgtgaatgtccaacccaaagtctactaattattgtattgttgaaacttaatttttttttttcatttttattttcaagacttatggtatttttgacgagtgttgctcaaattttattatatttgtgatagtttaatcatttggtgatagttcaaaccgcaaaaatcgcaccacaccgtactattttttgcggtgcgcttttttagtttcgcgatgtgggtgcggtttgggaaattaaaaaaaccgtacgtgcggattggtttgaaaaatagtcaaaaaccacaccactcgtactgcaaacacccctaataaatgaacaaatctaaatttataatcatatatatacttcttgtttttatataatggaaagtgataattcattagaataaccaatgtcagttattacaaaagactagacagtaggagggacc

SEQ ID NO: 220801 - DNA, 3340 bp, Cannabis indica
agagaacttaagtaaaagcatcacttttgctcttatcataggaatactttctatgttcggtaattagagaaattatatctcaattttttttacatatatatattatattgtatagttatgaaattccaaataatttagttttatatgtaataaaaaaacgtaactatttaaatcttattttcagtatcataaattatttagaattctccaaaaataagcaaaatgcctactataattataatatacattgtcatatataaaaaaatcgacttataacttctccatctactaaatatgaaattggaaaatcctcctagtgacgctcctacctaaaaagtttccgatatttctttgtacaagtattataaaaatatcgaattctgtattgggatcctaaggttcaagatctgcaaaccaaccaattcattgtagaatatgaccagttgttttccttttcaatcaagagctaaagctaaacattactaatggaaaagaaaatatggtcaatatgatgagtacattaacatgaagaaatggaattagcaagtacagttgcaaatcaattctctcataacaaaggagaggaagatgaatttcttaccatatgaataatttgctatcttctgctctttttcggtcttactctcttgaaagccataaatgtaactgcagccgataaggaatacctgcattggagaaatttgttaaagagataatgcaagactttccaatgaaatgaaagtgagtttttcttcttctctttaatggttctaaacaagtctcgataagctgtcacaatcaggcaattcgttaaaagagatatctgatcgatctgtctttcaataattatctctgatcaagacttttacatactcaaaagagaaacaaacacagaaatgtatggagcttttacccaatgcaacattatagataatccacatcattattgttctatgaaagtaccaataatcactaggtaagcaaactaggtaggccttggtttgggatttcggtagctgatttgtcatgtcggtagtggctgagatgaaatgttttgagggagccgtcctattagtcctaaggtgttagttaacaccagttaggaggtgtgttagtgtataaatagaaaggctgagtaattgtaagggggaaagaattgtgtttctaacaaagggagtaaaagattactcggggagataccaaactgtctcgaaaagtttaaaactttgtaattttctctttgaaaacgcctttctaattctttcaagaactgaactagaatagtaacacaaataggtgttacatcaaattcagaacaattgtcatttcccacaaattgggcaatcaaaaaaatctaactgctatggctgaactttgtgacatgacagaggaaatgtctatatagcaagaatacttgaagaatcagcatacttaccatgtaaatgtatagtttaaatgatcctgaggcataactgaacttcgaatcacagtattcacatccttcggtaaagggtaaggattacttggattaacgttttcattgatatcttcaatgtaaacagtattctcagcaagtccacatgtgcgagcgattgcaggaacatcaacatagaaccactgattcgagtttggttcatttgctggaacgaatatgcttggcttttcactctcgcgaactataccaacaacttcaacagaacgaacagcaggagcatgatcctgtcaagttttaaagatgtaatcttgaatatttcttcgtcgttgataattgcaatacgaaactgttagaaaaactacctgaacttttgtaggctttgttttccatagcctccaccatgagcttctttcaccctcttgaacgtcgtgagtttcttgttccgattgttgatcaccatgtgagacttctaagaacttttctttccaacttcggggaacccatcctctattaactagaatcggtgatgggacgctggaaaaaggcgatttaaaaaacaaaagaaaagagtttgagctcaactattagtttggtaacaaaatgaaactatttgcaaagagtgttaagttacaataagaacatgaaatctaatgctagtgagaacttaggtgataagctaggaaattagatttttttctaatagtaaacctgagaaaaccttgatactcattccattgagtagtagtggtgctcaagatttctcatttttatttgaaaaaagcagagatccaagtgtgcaatacttgatgatggaacttagaaatttactcaagaaacaaaccgaaaatttctatggttactgaagtatgtacctgtcagggcagttgggtattggcagaaggggtgtaatgacatagtaaccattttctgttactccagaaatacttcttgaacgaggaccgatgtagattgatttttcttcgttgaaatgtcctttgcatacgacctttctaaactccattgagtttaatccttcatttggttgaaacacactgttccatttcaatggttccaattccaatctcttctgtctatattccaacatctttatctgtaacaataaacattttccttaaagtaagtccttctctaactattgaaaatctttattatcagttgtaatagtttacattgcttctcaacaatggaaataaaaaaaacaatcaaaacaaggactaatctgcataaagaatgaagaagacatggaagcaaattcctccaaaatacagaaaagaaaaagactatgaaaaaattgaaaacaaagtctgcacaaaaatagagagggcctgtaaaatgtaaaatggcattcttcattactcagaggggtattcaactaatgtagaagatctcactacaattattgtctaaacatgcatattttttcatgacatttatccctaacaagaattatgaatggagttatccatgtgttcttacaaatgactcaatattcttatattttatccatttgtgacactagacttaaacaatatcccctcaagatagtagctattttttgcttactaatctcgaattactggatcacgagtgaccctttatctgctcatgctcgcttgttttgttcccgtggacttacctttttttctgggacaatgtggatcaaatatccgcttaaggatatgactctgacaagaatcttagagttccatctcaaatctatttagtgatcaatggagttaccaaattcttataaactactcaatattctaacacttgttccttccatatggtgagacactatactccaatagtctccattgaaaaaacacatttttgcatttaaagtctaaattatgcaatcaaaacatataaattaatgacaaa

SEQ ID NO: 220802 - DNA, 3344 bp, Cannabis indica
gatctcagctctaagaaaatgaccattttatttccactaattgaaactataaattttcatatctacgatacatactcccactcaatgttactactaagttcttgattcgaagtatgggctagaccgtagggtaaattgttaacgaataagccaaggaattggatgatataattagttagaatgtaaaccactcataattaaggttgaattaacctacagtcaacttcgtaatctgactaaattatttaaccaacatactctctgttatctaacatcatgtccaaatcgatgtagtccaatgtaacaaatacatccactttgccaaagttctggaaagaacttaataatttactagtataagtagatgctatcattgattagctaattagtataaacccagtacactcactgatcttagggcatttaatattttgatcatgtaaatataatgtttgccctctatgatttacgtcacaataattatgagtagctacatgcttgaaatttaatagaatttaatattaaataaataatcatgaataaaatacgtgaacaatgtgattgttctttcttagaataaattattattttctttattgataataataataataataataataatgagggttacaaagttaattgggattttaatttgggcataaaaccctaacacgttgttgtagcatcaccgaagccggaaggatctcatgggctaccctccaaattacagtttaattttagaagtgagctttgttagccacaactttctccaccaacccttacaaggcctttggatgtagaagtatcaatggtactctctataataactctataagtcaacctaaatggataagagccactaggaatgaaattgacacataacatggtcactaattgcccgataacatagagaaatacatagaatttgagcacaatccacctcctaaaatatttgtcgaataaattcttcattccacctacaattaacaataaaattttcacgtgccactcattacttctcaatcccgccaaagatgttaggacagaacgtagataacctttgtaacaataggtccttagctagatgaatctcgcgatgatctcttactctccactaaatcctaatgtgaagagcctctcgtcccataaaatacttctccaaacaaatgacatcccattgtgtccattgacattgaaaaactcatgttcaaaatctagtatctggatcatccctcaaataaaccttcacctccctatgcaatggttttgaaatatcaatctggacacagaccataacgaaacacccaagatactaacaatctgcataatgagaaattagaaaacttggaatggtgatgaggtgtcaatcctaaaggtgcattgcactgcaatacactgcagcaacactaaagcatagaaagatttgattccctagaaattcggttatgaaattgtactatgtgcaatcattgtaaaagttgttagtataagaatattctctagggattcatttattggtcagttgtaaaagagtcgttggctccttctttctctatgtatgtgtaatgcctccttttgctataaatacaatactctggctcacgattgaattgagctgaacattatcaaaatcatttctctgtatttttaacttggtatcagagccaaccctaggcctttgccatggcaactcctggtgatgaaaatgatgctcttgctgcaagcacaggtggtgcttctacaatccaatgaactcaaaccattaaaaatggtgcttcctcttcccgaaacactagcctataccagaatcaactcaccactctcaatcaaccattctcccttaaactcaatcgaaacaactacaccttatggaagactatggtgtttgctattgtttgtggacataggttacatagacatctcagatgaaccaaagagtgtccattggagtttcttcctgcaggtgaaccagatgaatctagacatgttgaagttgttgtgaatcctgagtttgagcactggataataaatgaccagctactcttgggatggctttacagctctatgaaagagagtattgcaactgaggttatggaatctgcctcatctgctgaactgtggcatgctttacgaagcatgtatggttcttactcaaaatccaagatggatgatgcccgcaccttgatccaaacagtgagaaaaggctcaacacccatgacagagtatctcagacaaaagaaaaactggcccttgccggagatccctatctcaaggtacatctcgttactaatgtgttattaggacctgatgcacagtatctttcaatagtggttcaaatcgaatctagagctaaaaccacatggcaagaactttgagatatcctcctaagctttgacaacaagattgagaggttgcaaactcgcaactcaagaggaaacctcaagcaaatgttgcaaccaaaatcggatttggatctgctggtcgaggtcgtggatatgcacatcaaaatcaacagttcaacagtggaggacaattctctagtaatcgtggtggcactaacagatctcgtggaaagggtcgcacaaatggaccagggccaacttgccaagtttgtggcaagtatggccactcagcagcagtgtgctacaactggttcaatgaaagcttcatggtgtctgatcataacaacactcaaaaccagtagcaagaatgccaaagcaaccataatgcattcgttgcaacccttgaaatagtggacaatgatgcttggtttgctgactctggagcaagtaatcacattacttctgatacttccaacatgagcgagaagcaggattacacaggtaaagagtctgtcattgtgggcaatggtaacaggctcaaaatcactcacattggtaatggttatttgtatattgaagatggtagttgtttactgttaaaagatatgctacatgtgcctgaaattgctaagaaattaattagtgtatcgaagctcacttttgataataatattctgattgaattctatcttgattagtgtttggtgaaggacaaagtgacaaagagagtattgcttcaaggagtgcttaaggatggtctgtatcaacttgagtcacctcaatgtcaactcaattttccagttttcaacccagtaacaacagagtcatctcagtccaagtcttgttttctgtctagttctactgctaagtctaagagtcatgtaaatcagtcaagaactgataaggttttatcttccaaaattgatgtgtagcataagagattaggccacccaccttctcgtattttgactcaagagttagagtcaagtaatgtaaaag

SEQ ID NO: 220803 - DNA, 1940 bp, Cannabis indica
cacaatatttattattctataataatacacaaaataattcaccgaaagaatcatattgtataaaaaattatacagaaaaaaaatattcataaaaaaaatgaaaattaagatcattaagaaataaaaaaaaccccataaaagttgatgtaaaaaaatcccatttctaaaagaatgttaaaaaaaaatgctctctctctcgagaagagcctctttgaaatgctggaaaagcctttgaacatggaaccatcggacaccaccatggacgatctgcttgcccgaacaacaaatctgacggtactggaagatgaaggatgggaagtaaatgggtctggaggatcggaagtggcgtcgatgtgtgcgatgggaagatggtgctccaatcaaccgatcagtcgatcgctcttgaagactatcttgggacgagtctgggggattgccgaaagaaactggggtgttgaaatcaaaggcacgacaaaatctgcaagcttcttggtgttttcattcaaatcggctcaagatttgaatagaattcttgccaagaatccatggttcctgaattatggtatcttaataatggtgtcttaataatggagaaattcgaaggaatgctgcaagattgggacaaggttctcaccaaatttccacttagtggacgtatcttgaacctacccatccgatcgattacacagggcaacatggaactactggcctgttttgcaggacaaattattactgtccaaaatgcagatatccctaagattgcgtcaaagggctattttaccttcaaagtatggcatgacattgctactcctctttgtccgggctttctatttccatgtgagggtcgaaaaatctggcttccatacaggtatgatcgcttaccctttatgtgttttaaatgtggttttgtgggacatgatactcgggtttgtgcagaaccaattaaactctttgaagatggatggggaagcaacaaccagggtatggttcttggctcaaagttaatgaacaatacgacttcactacttcattcattcaagacccgtgtggtaatacaactcaggttaaagcccctcctggatttcctgaaaaacagaatgcctcttcgatgatgttgcctactggttatagttcgggtgctagtggtgaatcttcacacaccttcaattcgaaaccgactcaggtgcccctggtgagttcttctctttcccttaatattaatactgaaatattggggaagggtaagaacaatgtgaaagataacaagttggagttgttctgtattgatttggaagcccctaattacataaagactactggtatcgaattggatttgggattgaacaatactggacagggaagttcaaaaagagatggttcttggagggaagagagctatattgatctgggtggaaatttgcaacaacaacaaactaatcatgctcctaattgtcgaccgaatatactaaacaataatcttgatccactgccaaagttaatggatgttcccataagttatgatcatagttttgcttcgttgaaaaaaatggagggcccatctaagagaagaaaggtgattcctaaacgatccaagaacaaagggggtaatggtactaaggaggtgatgatagaggatgtgcacatagaaggtcggggttgtgatataaagggcatttcgaggatctctgatttgacctttagaacggatttacaagcggcgaacttagtgaaactgagtcgccgcgagcaatgatcgccttattttggaatgtccaagggcttgggaacccttggactttaaacaccctcaaatcccatgttaaagattatcatcccgggatgattttcttgtcggaaacgcggctgaatagtgttcgaatggagcatattagaatccaattgggttatgttggttgtttttcagttgatgctaagggtaa

SEQ ID NO: 220804 - DNA, 1901 bp, Cannabis indica
ggttgtcttctcaggtgaagtcaagtggaataatggtggttctctttctagttgaattttcgtttcggttgcgttaggttgttgcgtagttgcgcgatgtttgcgcgatagttgcccaggaagcatggatcctgggttgaaggtgtgtgtaagtggtatttgtgtaatttttaatttgggctgtatatttgtttatttagtcagctaaaactatttttgtaatattgttacttttttttggttaaaactgaaaaaaacccaaaaattaatatataataattaaaataaaaaataatatttaaaaattaataaattaaaaaggaaaaacttacgtcttcgattattatgtaataagaaagacgaaaataaactacatcttctgttattacataataactaaagataggtctccctccccacacgattataaaatctactccacctatgtgtttggttattttgtaaaaactaaagacataggtcccctttacgtcttcaatcttttcaaaacctacgtctttgcctcaaatgacttcaacatcaagtttttttttttttttaaatcgaaaataaactgggataaatactgaagataaatgtcattttttctagtagtgtcatgctaaaagttatactaaatttaacgcaagatataatattgtgccaaatttagcatacaataaatgtatcttttttaattacaattttatcattcattattaatgataaactttaacatatatttttgacttacaatgtttccataagctagtttttaaaatatataatttattgatgatcattagtaatattttaattttttgtcataacttatattttaaaatactattatgtaatagagcacaatatgtagcaaatataacatttatttatttagttgtttatcaaatttagcacaatatttagatcttgcatttaaaataatcttaccactaatgacacgtttattacgaactcagtattcagaattagaataaattaatagagaaatgtaacggaataaattaatagagaaatataacagaataaataaaaaataatcggaatcaatatttataatatgttgtttagtaaaagtgcttagaaatgaaatgatagtggtttatcttgtttacttcatcaagaaacgtaattgaaatgtttaaattgactaaattacccttttgagttaaattatagtatatggtagttatttagtaagacatgttttaaaggataaaattgtcattataaatttaatattaaaaaataaaataaaaataaataatatcttgagctattacataataactaaagacagctttccctccccacacgatttcaaaatctactccacctatgtgttcgattattttgtaaaaataaaagacataggccctctttatgtcttcaatcttttcggaacctaagtcttcgcctcaaacgacttcaacaacgagtattttttaaaattgaagataaattaggataaaaactgaagataaaggtttttttttctagtagtgtcacgctaaaagttatactaaatttaatgtaagatgtagtattgtgccaaatttagcacgcaataaatatatcttttttaactataattttatcattcatcattaataataaactttaacatatattttttttaattacaatatttccataaactattttctaaaatatataattttatggatgatcattagtaatattttaatttttgtcacaatttacattttaaaatgctattatgtaacggagcacaatatttagcaaatataacatttatttatttatttgtgtatcaaatttagtacaatatttagatcttgcatttaaaataatcttaccacactaatagcatgtttactatgttggaaattatttta

SEQ ID NO: 220805 - DNA, 3415 bp, Cannabis indica
agctgcagattggggggttgtgccgtcagactttattgcgtgtagcagtcccaacacgtttcctcccatgcggcattaaatgcgacttgattgctcaggggaagcctgacacctcgcggagatgccttagtattacttgggcttccgggagcgtatggggctccctatgtcttctccgggaggcatgtcccggatgctgccttattacataaagacttagcaaataattcaaatgttaagctgtttgatccacgtgtccttgtccggttggtccacgtatattgggcaaaatcaggggcaacaaaggtcaaagtcaggtattcataaacctaaggctctagctgctaatgttactagtactaaccaatttttgattgagccaaaatctataaagaaggctcttgcagatccccaatggaacaatgccatgaccactgaaaacaaagctctagttgagaacaagacttaggttcttgttcactacaattctaatatgaatgtccttgataacaaatgggttctaaggaaaaagtacaaggcagatggcactttggagaggttaaagctttgcttgtgcaaaggggtttcaacaacaacacctggagtagactattttgatacctttagtcctgtggtgaaatcctccaccctcagaataatgtttactcttgttgtcacttacaattgggacattcaacaagttgatattaataatgcctttttcaatggggagcttaatgagacagtctatatgcagcaaccaaagggctttgtgaatcctcaataccctacacatgtctgcaagttacaaaaaaccgtgtatggcctaaagcagacccctagagcctggtatgaaaaactgaaatctgctatggtgtcttggggattaataaattttgtatcttataattctctatttttctccaacaaaaatgaaaaactactggtaattctaatatatgtcgatgatatgctaattacgggtgaagacacagctgctgtcaatcatcttatctcttctcaactcccagtttgccttaaaagctatgggatcagtaagtttcttcttgggatttcaagccattcgagaccagtcaaccctctatcttaatcaagctcaatatgcaaaagacatcctaagaaaaacaaaaatggaagatgctaagacttgcaccactccaatgacacatggccaagctctctaccatggacaatgatcttttttctgatcccacactgtatagaagcaccatcgggtcactacaatatctcacgttaagatctcagctatgccataaacaaactcagtcaatatatgcaaaacccaacaaatgcacgttggcttgcttgcaaatgggttttgcgatacattaaaggcactatcaatcttggattagtcttgaaaccaaccaagcttctcactttggaaggcttctctgatgccgattgggcatgtaatttggatgatcgaaagtctaacactagttactatgttatgtttggctcaactcttatcacgtgtgggggtcaaaaaagcaaacggttgttgctcgttctagcacagaatctgaataccgatccttgtcttttactgccactgaagtagtatggatctcctctattttacacgaacttggcattacctcctaccactcctgtcatttggtgtgataatcagggtgcccaacaacttgcctctaaccctatttttcactcacgaactaaacacaacgaagttgatgttcactatgttcctgacttagtttctcagaacaaaataacagttgtctacataccgaccgaagaacaaccagctggcattcttacaaagcccttaactcttccaagttcaatttcctagctatggcacaagctctcactggagtaccctcctttgagcttgaggggggatattgaagagtttgttaaataagtagttatggttgttagttaagtttgttaaaagttagttactctttctttactttgtctctagctttgtatcaaattagttaaaaaataacaaattctgattcatttcttttttctctataattctttctgcaactattctcaagtgagatgaaatgtaacaagtgttaaactatgcttgtcttggattgtaatatacattgaatatcaataaagaaggcagtcattgctaaagactgcattgctgatcaatttccagctctcttcttcttcccttaattatattcttaattttagtgtgtgcttaattctcattgtcttattgtttttctgtttctgaattctgttcttgtattggtgtaataatttataccaacatatatataatattataaattgcccaatatattatatatatatattttgaaaaggatacatatatatattttaagaatgtttttttcagaaagaaaaagtcaagaatgtatttccttttttcttaatttaattacttttttagtataaatgttttatatatatgcaactgcttttatattataattaattgctttttttctaaagacattattttgatttaatattaattttttaacaatgattaaaattattttttagtttataattttcaataaaacatatattcttgaatttaaaattattattttatttcaaattacacgtgccattcacatcaaagcttaaatagcctaactaataaaatatataataatatatcctgttgaaagaacacatggaatattatttatggtacataaaactttttacacataccacaactgccatgtgtatccatccttgacccagcaaattaatcaaaaaagtctttgttaattttttttttttcagaattataaagccttaatagttcaataaacttccatgtgataaaaacaagtctaaccagataccaatgtacacattagtattacaaacccaggctacctaaatatctatatataagcaattctattgtggcggctacatagtgaaaacctatacccaaaatatctgtttggtcaaatatattgggtttatgaaattgggcgtgtagaactcattatcatcatcatcatcttatcttgatttatacaactatatatcgatcgatatatataacagcccgtatttaatgtcttaccagaccagttttatgaattaatctaaccctacttgttaaaattttgcctgctattggccctaatgggcatagatatttggactaccacactgccatcactatcaaaaatttgatcatatcattaatatattgcaagttgattcatccaaccaacatgtacatccaccatttaatccatttgtctttttagaattccatatactattacaactacaaatattaagggtgtttttttttttaactattaggttctttatatttttgataattaaaaaagtaaacataaataaaaaatatatatat

SEQ ID NO: 220806 - DNA, 2135 bp, Cannabis indica
tcttattgaacaaaaatggtgatattcttcctccattgatcaagaatttcaatttttggaaagtatcatgatcatccaataaaaagaatttccatttttttaaatgaatgatttgaagacttattaattataataattgatggcagaatcatttttctaagtctagttctaacgtgttcattagatgtttcaattaaattgcatggtattattttacatgattgctatgttgcatgatttattaaaaaaatgttctagcttaatatatcttttgtacttgtgtaggttctcagtattacaaaatttgtattgaaattcataatcacttaacattaattgcatataattttgtaacaaaaatttcaactctttttgcactagagtctcatacagaattttcggcattaaaaaattattgtaaaatgaaaatacagtgtcaaaaatgattaatgaagaaacatatatattaatattattttgaaaataaagtagtaggaaacattcctgtattctttgaagatgaaagataaaattctggttgagaaagcctataagatgatgaagaacacatacatttgcaatcaccaccaaaactcctccattcaatttcatctgacctataatatataatacaatacaattcataaacactccctcataagttttctcttccattctttcttccactcaaagtcacataattccactttcctttatttatagattcttccttaccaataccaataccaatacgaatcgaataataatattaactctttttaaacaatagaatcaattcttatccaatctcatctctctctctctctctctctctctctctccttcacaataacataatctgcaaggaaaagaaaaacgacaacagaaaataatgggatgcttcagttttcgcagctccaaaaccccatcatcatccgccatgaaaggacctcgtactgatcaaaacggttattacaacaacccagaaatacccaaaaacataagacacgaagtcctgcttcaaatcccagtatgcagagttcatttggtggaagcaggggaagctctggagctggccaatggagacttcaagctcaccagaatctcagaccaagacctctgtctggccatcatagtaagtgtgggaaacaaccttacttggcctttgaccaaagatgagcccgttctgaagctggattctctcaactatctcttctccttgcccatgactgaagatgaacctcctctaagctacggagtctcgttttgtgagcaccaccgggggtatctgcccactctcgactctttattgaagaataattcgtgcttctcagactcgaccactgctcaaactaaaggtgaggttgattggaaggagtttgcccccagagttgaaaactacaataactttttggcgaaggcaattgctggagggactggtcatattgtcaaaggcattttcatgttgaccgatgcttatgccaatcaggtcagactccctcactctcttttcacctatacaacttttctatacaaacttcttccacttctatatagtatactttttcttcttgcctaaaatgatatatattatttttttttggtttattttgctgcaaaatttctcttttgaaattttacacttaaattttttttttacgttcaaacaccgccatatttatcgtttaatactaactaaattattaatgtattgacttcctaggtttatttttatatctacacaaatgtacacagtgataatctagttgatattaaacaataatatttaactacacattttaaatttacaagaaaatttaaagagtttttccaactaaaaataaataaataaaggcatgtaaaaattaaaatataagaagatttcgcctctatactctatttttttatatatatatttttgcaaattatagtttatttgtttttattttcgtattttttatagctacatttttaatgaggtcgtaaaaataagtgtaatcatatatatatatatgggtgactatttaatggttacatttttattgtaactatcatggttacatttttctttgacctgtaatagtcaggttactaatagacaaacatttcttttttagatttaattaattataatt

SEQ ID NO: 220807 - DNA, 1609 bp, Cannabis indica
agtaacagttttttgtagtgatggtaaattgattcacaagtttgggaaaaaaaaagctttcacatcagaataacgaatctagttcatatataaacacagtaatatttgattatatgagttttggttaagaatatagtaaattacaatatatgtgtaaagatcgcttaagttttatataccgagttattaaataattagggtttaataatgtaattgaattattaattataatattgcatattggtgaagatttatttaattttaataaatattaattatgctatatgtgattttctcgtttacctgtaactatacttggaagcggtggaaagcgacgttgtagagagtcaagtttggtgtgtgttgtagaatttttttaatagcagggcattattgttaggtgtttgaaatatcgagaattgttgggagttgtaatgaccaatttacccttctttggttttaggcattttgatttatgttaagggcaaggaggtcatttgatgggttattcttttgtcttttgtgaacataatctgaatttatgatttaagttattaaattaaaagaaaaggaaatgaatttccttagaagcattgagaataaactagtaaaaggaaaccttggtcttctctttttctctctcgatttgtgatgaagcaagctagggcatgattctttctcagcttattctagaaggtgattacaagatttgggtgtgttagttcaaggtattagttcttagctttctcttctttaattttcttgaagttgaagttaggttttgaagttgagtttgtgttttatgtggctgtttactttagaagtgtttaattttgtattctagagctagattgaagctagttatgttgtttttaagctaatttggttgagtggaatgggttttgtgcaagattggtatttgagaattcaacctagggctttcatggtgtctttggattttgagtaaattgatgagttcttttgcttaaatttggttcattatagaatgtacaggtgttctggaaggtttcattgagtttggggttgaattttggtgtgagggtcgatttttggtttctctgcacacaaccgatttgccagttttgtgggatctgagaaaccggctaactagttttgccctcaggaaacccagtaaaccggttaaccagttgggaaaccagttttctggtcggggtttttccaggaaccctagttttccccaaattgttgattttagggtaaggtcatgtcttttattgataggattattcctagttgatcttaaagtccctgagaagtgtttagcgtgtctctcaccaaaattacaatgatgtgatttagggccctatgaaacgtcgagctgcaattccactcaggcttacaggcacacctgagcacggaaacgaggtaagatagcataaagcatatatatgtgaatgaatatatgttattatttgtttacactactaacactagcaataatgtaatttaagggtgttagtacagtgttggattttagagtagttatggtgttaccaacacgagtacaaaatcgacactcttttttatgtggtacaaccctaggaaactcttgggagtacaaattggc

SEQ ID NO: 220808 - DNA, 2932 bp, Cannabis indica
tcggcttcggatctcaatatggaacaagtaaatgaggtgttacggagggtttgaccgaaagtcactgctgaaatgaatgaggacttgttgcgtccgtttgtagaagaagaggtaattcaagctgtgaagtttatgaatccagttaaagcaccgggagtagatggatcgccagcactgttttatcaaaaaatttcgggtaaactccaagctgaagtggtcgcggtctgtttgaaagtgctgaatgaagatgctgatttggattgcttaaatgaaaccattattgctctaattcccaaagttgagaagccagttcgtgtggaggagtttaggccaattagcttgtttaatgttatatacaagatcgtttcgaagtgtcttgctagctgtttgcgaaccactatgagtgttgttatttccgacacccagagtgcttttgtacaagagaggttgattcatgataatgctattattgggtatgaggggcttcattgtatgcggaaaaatcaatttaggaatggtacaaagatggccttaaagttagatatggtaaaggcgtatgatagagtcgaatggtacttccttcgcgtgatgatggtgcggctgggatatgatacggtttgggttgaaaaggtgatgcgatgtgtgacctcggttagcttttcttttttaattaatggtgatataaaaggcaaagttattccgagaagaggtttgaggcaaggggatcctctctctccttttttgtttttattctgtgcggaggctttctcgaatctcattcaacatgaggaacaagagggtacaatgaacgggcttcggtttgggacgtatggattatcagtctcacatttattttttgctgatgatagtttgatttttatggatgctgaaatggagagttgtcaacggttcaaaagtcttcttgagttatattcggctgcttcaggtcaattagttaattaccataaatctgaagtgtgttttgggaggaatgtgtcacgggaggttagacagcagctggctttatttatgggtgttagacaagtagataatcatgggaagtatttgggtttaccatcatttgtgggccgaaacaagaaagaatttctagatcaaattaaaaataaagtttgggctaagatgaaaggatggaagagttctatgttttcaatggcggggaaagaggtgttgatcaaagcggtagtccaagcaattccgacttatgcaatgtcttgtttccgactatctaagaagactatctcaagtattcatcgtatggctgcgaggttttggtggggctcttcggagaaggacaagaagattcattggtgtaagtgggcacatttatgtaagccaaaggataagggtggattgggcttccgtgatttggggtttttcaatcaagctattctcgccaagcaagtgtggagatgcattagatgcctgaataatctctgtagccgtgtgcttaaggcatcctactttcctcataagaccattttggaggcaaagagtggagcatgtgcgtcttttgtatggcgaagtttgatatgggggaagaaagtgattgttaatggctaccggtggcgagttgggaatggggaaaatgttcgggttcttgaagatccgtggctcccgcgaccagtcacgtttaagatctatgataagccacctctcccggcgaatatggttgtggccgatatgaaacatggggatggtagttgggattcaatctttatccaagaggtctttaatagtgatgatgcggagctcatactttctatgcctagtacgggttgggaattagaagataaaatcatgtggcattatagtaagaatggggaatatacggttaaaagcggctataagatggcaagctctttggttgaagagcaatatcagtcaaatgacaaggtgttggtagattggtggaaagcattatggaggtttaagattccacccaaaatcaaacattttgtgtggaagcttgcttataattggcttcctacaaatgttactttggccaaacgtggtgggtgtgcataagaagtgtgagaggtgtacaggccatgtggaagaaaatgctattcatgccttatgggagtgtaaaaggagcaaggaattctgggctgttagtggcttcaaggatgagatgaaaaggctgaaggatgaagatgtgctttcttttttgatgaggatggctcggcaatgggacaagggtaagttcgagttctttttggttctcacatggaatatttggaacatacggaatagtgtcatacatggtgggatcgctcctatggcaggagagatggtggactggtgtaggaagtatttaactgagtttgagggaggaggagctactgccgtgagtcgagtcagaagggaaaattcgaaatggggggcacctgagttgggaaggatgaaaattaatgtggatgctagagtaaaaagtggtggaggggtgtcgggcatagggtgtgtgattcgggacagtggggggcgtactttgtatgcgtcatctgctgtagttcatcaggaactggctccacttcagctggagttgcaggctattctcgttggtttgcaggtaggaatacatcgtaaaatccatcgatttagcatagagtcggattgtctacaagccgttcagttaatccaaagaaaggatgaaggctgttttgatgtcgattgtttgttagatcaaatacgaactttattgttgtatgatagtgttgatggtatctcgtttgtatttcgtgaggccaatagagtagcttatgttttagccaattatgctttggttaacaaagctagtgccatgtggattggggtggaactctcttgtgcaagtcaagaactttctcttgacatgcctaatcctgtttgattgtgttattaatgaatatttctttttcaaaaaaataaaaaa

SEQ ID NO: 220809 - DNA, 3915 bp, Cannabis indica
tgttttctttttagtaaatctatcgatagtagattattgtcttttattttgtacaacccagtcactaaaaggacattttttacattttctcttcacatgggcccataatgtgctggtctcgttcaactttgtatctgtcgcataatcggtaccacaataattgtaagcagcccttggcttctcgggaccacaatctggcaacatagtgtaatgatcctaaacactagatgttttctttccaattatttgcttcttttccggtcttccattccctttttcattttcacatccctctttttctttgtctgtctccttgtctttgtccttgtccttgctcttgtccttgtcatgcatttaacgatcatttctattcttccttacattctcttttcttctttctttcactggttaatccccaccagaactagacaaattagtttctgtagcggtcaagtcatcaatcatctcctctacatttttctgattatccatattgctagaaataatttatactgcacaaagcaagacaatgatactagttaggttaagacttttatgccttttttagttctaaactactaactcttgctaaaactactaatgcaaatattaaactacttgtatatcctcaactattctaaacaagtgtccaaaaataataaaattgacttgcaaatgcttacacattcatcttcacttaaaacatcaatattcttgatgaatgtatgcacatcatagaaaaaaaataataataaacacattgcaatgcatttagacaaaaaaaactaggattttttattataactataatcaaatgattatgtcttaagtttcaactttgtactttagaatactgtctaaaatttaaataagatatagaggattaaccaaagtttgagtccaaaggaatttcatatcctactgatccaatttgtcatcaaaagatccctatgcataattgaaaggcctaagaacaaatttcctcgaatcatattaatccaaacaaattgaaataatttaataataatagaaagatacaaaaagcagccaaagtaacaaagccattagtagagactattatttcaatggaagcaacaacacaaacaactagtccccctacgacttgcttgatcacctcctataatctagaaccctcttatttcgtgaattatacacacacacagagaggatgcattggaaacatgtgtatatattcccaaaactatcaacatacaacattatcagtgagcaatattcccaaaattacagagataatttgaagccaaggaaaaacaactctcacaggatgcattggaacatgtgtatatattattatattgtaaaagcaacaatccaggtgagaaaaaaatcacctattggacttggaaaagtagtagcacaagagaaaatccaacacagcccaattcaatacattttggaccctgtgttttgtaaaagttactgattggaccctctgttttgttaaatgacaaaatagaccctgtattttccaaaacggtaaaaataggaccctgaactattttttgtcaaaataaaatttaataattatccgatctaaaagtgttatgacaaaactgtttacattttttgtatatgtttgtattttcaagttggttatattaaaaaaaaaattgtcaaaaattaagctcatggtcctatttgtactattttagaaaatacagggtctattttatcatttaaaaaaagagagggtccaattggtaacttttgcaaaacatagggtctaaaatggtatttacccttcaatatttgattttgatatgttgaaaaagtacctaaaactgaaactcaaaaaataatttaaactaggagctgttattccaataaaaaaataaagaacattgaatttgagagagagatcagagagtagaataaagaaagaaaaataagaggatgtacaacaagaaaaagagaaaaaaaaaattcccaataccttcaatctgaaaatagaagatggtgcttgattgatgttgttgatgagaagagagctcgggatggagagatgagagaagaagagagtgagagtaagagtgactgagtgagtgagattgggggtcgcggggtaatggattatggggctttgagtttgaagccctaaactatagcagaaagaaaatgagaagaagagatagagaaagagaaggtgagtgtggtgagtcacgagataaagaaagagtttggaaagagagagtcaagtcaatcactttaataaagttatacttttaaattttaatattaataaaataataatatattatatataatcacttatcagtatacaatataataaataaagtaaaaaatgaaaaaaattatatatgtataaggtattttggtcggtttcagttttattggtcggtttacgatctagaaaaaaattgaccgactattggcaatttttttggtttttggttcctccaatttcggttccagcggtgttcggtaggtcggtttgaacagtttttttagttttctggattttatgctcagccctacttttgccatttcagaaactctagaaatttttcaagcttttctgcagaaaaacaattcctagatttacccaaaaccttgcatgccatctctgtcattaatatttttcctacgagtttcatccgatttgattttcgacttcaagcattcgaagagatctttgcgtcgttcgttgtttcgtagattacagatacgctcatcgtccctaaacctaactccaaacagtaagtgacttttctccttattatcttacatgtttgttatgttgtatttctaggtttaattacccatttcttagtcagcatctttgttacctcatttggtttacttttagggcttaactgtatttgggtaaatgttagggtttaaatcgaacgtaagttttcgagattctccaatttaccaaattttggtttgataaatttcttcaaggaattgggattgctttctccttgcagcaatgtcccaatctggttcagaagtttatggtccagaagattcagaaatagagtatcctactgaattcgccatcccatacaaacctaaaattccaaaacccaaatgaaaattggagataaataatgcgaaatttagggaacacttagtgaaaaaccaccaagatgatattgctagtcaccaaaaacgcttcttgcaagaaattacagaaggcaggcgccgtttcttgagagatgttgcttggcctgaacatctcagtatgtcttctattcctttggctaagcctctatttttacccaaggtcacaattgcttttgaaccaaatgacttggactttgaaattatgtcttccaagacacataaatcaaagactctccaagaccctaatgtcacattcgaggctgagctaatagagtaaaaggtgcgagccatcggagactatgtaggtaacaccttgaggacttgtggggtcgaatataggcgagactgctgggttagattggtacgtgtcggcgagtacacttgctacgctccagtgcgtcttacaagtgaaacattcgagggggccagcggtgagaccagtacaactggctcgactgggatagtcgcttggagccttgagcacatcaaggctggagtaataatccccctacgagactacttcaaggacttcctaagccacctcaggctggccccattccaacttaatcccatttcatatagaatccttgaaggtttgagggttttatacaaaatcttgatttggaagtgccccactctcttggaaatagagtatctctactctgttaaggctgttctagtgagaaaaaatgcagcatgggttttttactattgtgggactcacacagggaatcgcaagatcattgtagatttgccaaataaaacttccttcaaggatgaatt

SEQ ID NO: 220810 - DNA, 1677 bp, Cannabis indica
gattctgctcttcatgatgtagaggaggaagataaggagtgtcatctagcagttcatagtgaaaagttagctattgtgtttgcaattctgaattcagaacctggaacaacgatcagaattacgaagaatcttcgtgtttgtggggattgtcatactgcagcgaaactgatatcgaaaatatctgaacgtgaaattgttgttagggatactcatcgtttccaccatttcacaaatggtatttgctcttgtggagattactggtaaacttcatcatatagagtagtatattcagttggattacattacttgattgaaaacttgaacttgttttactaaacactaatcagttgttatgtaaattatttatttatttattaaaaaattaaatcttttcatctgttagattgaggaacatctattttccacgtcttagtatatagattgttttgattgaaacttaatgtcctaagtagctagttaattccttatccaacttggcacattatatatgataagattaatgttaagtacatattcaaaatgtatatttgaactttttaattgacacactacataaatgtgtggtttaagatggataatatatacatggttatgtatattttagtgtatctaccattattaatgctatagagcactttaaagtgtcattgttaggcagattttatatagtttaatataaaaaaaatgtttaaaaagaattattggtgcttatcatctttcttatactgttattagtataattaaatattgagtcttatataacttaagaaaatagattttaagaaatatgactaattaattgtagagcgctacttataaaaggttttagacaccatttataaaaggtgatgggcactattggtacctgatagcaatgctataagtaatattaaaaattattaaatactaagaaagtgtattggacattaaagtgctaaataccatctaaatggatgtagtgtataatctagcacttcacgatggaccacatcccaatcaagccaagaagatgtagtaagtacgacacaagccgcgggaagaactctggacaaggcatcggcaaccttgctagcaatgcccgggcgatattgtatctcaaaatcaaattctaataacttcaccaaccactaccggggacaccaaacgttgttccaaaagaaatttcaagctttgttgatcggtcctcaccagaaaccgccgacccaacaagtatggccgccatttgagaatagccaacactatggccatgagctccttctcgtaaatggacttgagttgagcccgtggctttaagacttgactaaaatacgcaaggggccgaccttcttgcatgagaactgcacctaacgaatatctcgaggcatccgcctcaatcacgaattgcttagagaaattcggaagagctaaaactggaactgtgaccatggcgcgtttaagagcttcaaaagcagctgtagcgtcttcattccaacaaaatcgatatttttttagttgctccgtaagaggtcttgcaatggacccataccccttgacaaacttccgatattaccccgtaagacccaagaaaccgcgaagacttttcaaattggtaggcagcggccaatccaacattgcttcgaccttgttggagtcaaccgagaccccagaagcagagat

SEQ ID NO: 220811 - DNA, 2279 bp, Cannabis indica
aaataggaaatctaaaaataaacgttttgctacttctacatattgaaattattagaggtattatgtaaaatttggaataattttttcacatgctatattgagggggcttttatttgtaactctaaaaaaattcataaaggcactctatttttatattttaatttcatataaatatatatatttttaatttataattaattttttttaattttttttctttctcattttcttaaaaatacatttataaaatatgaataaatatatttaaaaattaagactagaaaaaaaaatatgaaattttaataaaataaaataaaaaaattatacaatatgaaaataaaattaaaataattactaaaattaacaaaataaaataaaaatatataataatgaagtaaatatgcttgttgttcatgtttttaaatagttagtaataagggtcgacgtccgatccaatcaaacttttttttccttatccaatccaattaataattggattttgaaaatcatcgtcccactaaatcgaattagatctcaaaatccaatccaattactaattagattggatcagtttttgaattggatatccaattacactcttagattttaatattaacataaaaatatgaagaaaaaaaatacgtaaaaattaaatattatcttttatttaagtttaatattctataaacataccatctttccaatgtaattaccaatatccttaaccactattactgacttaaagccagaaatcatgtcgtgcaattgaacccaaaaatttaaccgattaagagtgatcaatcttggattttcttcacttttcgacctttcataaactagcagtattcgatcaaaagtccatggactgccttcgatcactctatcgatatctatttcatggtaaaattgaaaaaagaatcgatgtagatcaagatttttcacaaataaacccctaacaaatctctacagtgaggtcattttgtgtcgcattgcttgaaaattaatggttctatctataaggaatctacccaccaaaaaccatcgatcatcaacttcaaatattcttcatcaccattctcgtacattaagaagtcatcatcctccccaccaagattcatagtttgatactctatgtccattttaagggcagcatgctgagtagacgtcattacaccaagaaatctaaccgaaaacaaaacaaaagataattgaaaaccaaacaaatatgacagaaatcaaaagaataacaactctaccatgtcaaaggacaagacaaagtatatagaagacttattttttaagatagttgttgattttttttattctttttttctttctcttctctctctattttttttttcatttttttctaattctcttttgttgtgtgtataattaaaaatatttttttatggtttttttttttgaataataaattgctttattaaccaataacttcagctaccaaacaaggtagcaaatcagttggaacatcctccaaactgaaacgacgattaggaaataacatagcagccttagcaaagttatgggtcactacattagcagatcgtttcacaaaaataacagaaataacaccaatattgttaagcagagacttacaatcctgaataactaaaccaaacaaagaatgcatttttaaagagctacgaatagcctggatcgccacaaggcaatcagactccaaagaaacattttgccaatgcatgtctttgatccaactaagggcctccttgagtcctatggctttggtaagagggggatcgactgcaccgtgagagagcacagttcgggcttcaataagcacaccatcatgattacgagccaccattcctataccataagtatttcctccattaaataaagtcgcatctacattaaccttgagactatttttagttggaggtgtccaatgcttattcccatcacccatctgaagttcagaccatgatgaatccaaattggattttctagcattcttccattgctcaaggtactttgttgcaaacaaaactatatcactaggattaaaaacttttttctgccatacaaggttgtttcgggctccccatattgcctaacatactgctgccaaaatgcatttctgctcaccatttgacccatgaaaaatactgatgcaccactgcagaaacgacgtacctggtgcaacagccgtgcctattcccacacggttccaacactgttgaaccaagttgcaggtgacaagacagtgaatggttgtctcttcttcagtttggcat

SEQ ID NO: 220812 - DNA, 1254 bp, Cannabis indica
gacaaaagtccttaaatttaacaacctcaatagttcgggggggaatttttaactgccaaaaacgttcagggggcacgatttactacatgtcaaaatttagggggaaaaattactaattagcttttttaaaaaacacaatttttaaatcataaaccaatcaaaaccagttacctttccaaaaactttaaagaaaataatgagaccaaatgtgtcttatcacatggtatacacacaaatcatttccctcgttactttgaattccctatacctatctacatcatatgatagagttgttattgtttgttacgaacaacttgattaaaaaaataatcacattatggaccacttcactaacccatcattcttttaataatgaggagatttctccattaaatgatgattaaaaaatttaaagcccccttcatcattgagagattaagaagactaaaggatcataggccatgtaatattctaaggtagctactcctacacccaacactaatttggatggctctcaataagaaacttttatgggggctattctcattccatatatattattgtcaaaaagttttggcaagttctatcctttaatgctttgagctatcactgtcggtgataccatagtggaattaggggtatagactagaggatactaattgttatgtattggctgtattgtattgccaatatgtccaccccaaaattggacattatctgtatatgtattaccaaagaataattgtgttcgtgaaaaagtgctgatgcgaaatctacacgagctgtaggaaaagaccttgtagctgtgggatacttttgtttttaaggtgctgatctattttgtccttaccttgaacaattatatcattagctagcattacttcataatttagtgagaaaaaaaatgctaaaaggtattggtgttgcttaagatgaaggcattatattgttttggtataattatgtattgaattttatataatttcaatatcatcactaactaattttaaggtgacacctcttaaaaaaaaattatgtttaaacatgcaatacctcatatgtagcgctagccgccacctgcttaaaaaaatgggatagggacttatttttttttgtctttttcaactcattaggttttcttttttggatggtgctaagtagcatcaagaatcttcattttatatcctacccatgtagctaaatgggtgagctcgtaattttcaggcacatggtatcttataacatccattggaa

SEQ ID NO: 220813 - DNA, 2250 bp, Cannabis indica
gatgctaaaagttggattctaattagattggatcggttattagatgtcaatctcaaaatccaattaaaaatcgatccaatccaattatatttatatatgttaaaaatttatatttatttatataataaaaaatataacttgcattaattatatttttattgaattttcttttgtgttgaatttgtaacacttgattgtttgtgtatttgttttcataatattttgttctattttattacttagaaatattgttgttttaattatttaaaacttttagttacattatattgtaacgatggtatgtcaatggatattgaacttatataaagcggggatatttaatttttacgtaattttcttcatatttttatgttaatattaaaatttaagtgtataattggatatccaattaaaaaaccgatcaaatccaattagtaattggattggattagattggattttgaggtctaattgaattggatcggatgatgattctccaaatccaattactaattggattggatcagatgaagagaaaaaggttagattggatcgaatgcactcttctggttacctctgatcattccattaatacttctggaatcacctgggaattttaggcgtagatagcagatggatgttattgccccaaagtcaactagaaatggtcctcccagaatgacgttgtaagttgtggggcaatcaactaccataaaggtgttgtatttgaaagaagatattgcattgcttccagagatttctccattgatcgtcattaaaagttgtatttttcccattggaatcaatgtgtcttcattaaatccttgcagttgaattgaacaagataacaaattttctaccacaagatcgatggctttaaaggcatctttgaaaatgatgttaatagagcttctattatttacgaggattttggaaactcttttatttgcaatgtgagcttctatcaccaaaggatcattatgaggaaaatgcacatgcttggtgtcatcttccgtgaaatttattggcgaattcatcatccgaggacactgagcaagttattgtaccaagttacaaattttttcttgatccaactcattcaagtaccttttttgtgcatttcgggtgttttcggcaatgtgtggtccactagaaataattgttacatgaccatctaacattggctaggctacttcaagaggctatggatttccaagatcgggagctacatcaggtcttgctgctggagcattttgcacccttgaagggattgtgcattgggagcttgtggatggcctactccctgaggaggattaacttcttcatgttgtctaggaataaaagctggccatgtgcaacccctatccaggataaataattggtattcttacccaattggatagatgactatttcggattcaatttcatctctcaactagtcatattcgttggttgtgtgccctatatcaacgtggtactcgcacctcttgtttagatctcttttttgtcttccgcccttgtacattggtggaggcttcttgtaatggaccgtgttacaagttgccttatagacattctctcgagtatcgacaaggcttgtttactcagagtatcttaacccttgagtcttccctttcttcgtagaatcattccaacttggacccttgtaactcatttttctccgcgattggcttacatgggactccagagcttttgctttttggttcgtttgtccgagaacgacactgtatcaggtttgtatcactccaaatctgaaaaaactagcctgtgtagctggctgcgcagaagcacttggtctgtaaacggtaggagtcgtaaaggaagttgccggagggaaaatttatggagtagtcatctgcaaagtttgggcagttgctacgttggtggaaggtgctggaagtactctgtaagcttgagcataagcttcctccaaattgatgaatcattgggctcttgtcaagaaattagtcaaagtctatgctctcttacgttagagttgtccccatagcaaagatcatgtggtcaatcctgatctcaaagtcaccaccttcatatcatcagtaacctcttttttagtagtccatcatacgttttatgtatttcttcaggctttctcctagttgttgtttgacactgttcagggaactagcttctaggttaaaggtctttgctgctacaaattgctttctgaacattgcttgtaggtccctccaattgtgggtcgatcct

SEQ ID NO: 220814 - DNA, 1703 bp, Cannabis indica
tatttcaaatcaaattatcaaaattaaattaattaatattttttcttggcattacccctgttggtctccttttgctcccctattttactctgcttacaatgacacttacttgccattgcttttgattccacaaaacatcatttcttgcctcccatacctggtatactaaggcagctagtattgtcttcaacatgcttcttctaattggtgaaacgtttttcatcttactggaaatttgcagtagcttctgcaagccaactgctggtgtcccccagtttaggttcctcttcatttccatcaggtactttctgctatactcacaattaaagaataagtgctcaatagtttttttttctttcccatacagtagacaggttgcaccaacattcagatcatatctactcactctttctttcgtattcaacctaccccacagcaccagccagagaataaatttatgcttagggatgaccagtctatcccacacataatgacaccaaggcttcttctccgggctaatgtatagtagttgataattttttgaaacactaaaattctgcaatgtgaatgtagcaaagtcagttttaagttttagctgattcttaactccaactagctttttccatgcccagctacaatctgtgggagcttcataatcccaccaatgtttgtcctttagatacacattgtgtatccatttaacaaacaaacaatccttctttttagctatatcccatacatatcttgtcatggctgctatgttccacttttgaatgtttcttagtccaagaccaccagctcctttaggtaggcagacatgctcccaagccaccaacccggcacctgcaccagcatgagtccctttccataggaaaaatctaaaaattgcctcaatttcttcgataatagcataatctgagaccaatatgcatgtattgatatgagcacaacattaagcagagtcactctccccatatatgacaagtttcgggtgctccacactcttatcctacccaccattttctctaggataatttgacattcaagagtggatatcttctttgagcagatcggtattccaagatacctgaatggtagtgtacttctttggaattgtgaggcctcaagaattcttcccacttcatcacttgacatgccagagcaataaatagcagttttctgttcatttggcatcagaccagatgtagcagagaatagtaactcctctcaacatcaacatgactgaaacaaagtctccatgactaaactccaagagatcatctgcaaaatagagatgattcaatttcaaagatgaaaacctgtcatgaaactgaaaaccaggccagtcaccaatcttctgaaatatttgagataagtactccatccctaatacaaagagaagaggagacatgagatttccttgtctcaatcccctctttgcattaaaaaaaccacacatagaaccatttaataggagtgagaattttggtgtcctgatgcaaatcattataagtttaatgaaatgatcaggaaaaccaaattccatgagcatttcttcaagaaatccccattacacagtgtcatatgccttccttagatcaatcttcatcatgcagcttggcttgcaatttttcctcccataaagtctcacaagatcttgacaaaccagtacattatgagcaatatacctcccatgaacaaac

SEQ ID NO: 220815 - DNA, 2513 bp, Cannabis indica
catgtaaatttccctaataatttatgtaatttcctgttttttttacgaagcccattacataagcccaaacccattttgttagggtttcttcactagcagactaaaacccccaaagaaaacctaccttctaaatttcatatcttcctttctcgtaccagaactactcttttctacgcatctttttagggtttcataacccaatcaaaggaacctagtttctactataacctctctcagttactcaaatctctctgtcgacctcattgggtttcttctgccactaatttatcagagaagaggaattacgtttagatacggggtttgtagtattgcttcattcatttcaggaatatgctttgtatttccaataataatttttatctccattagttagtttgaatatgttgtattctaaactcaaagataatttaattgttcaattatgttttgtgctgtgaaatttcggggttattatgtttaggcgaggatttatttttctcggttttcttttgagttttaagtagagtatattgttggtgaattagaatttttattgttcttgttgattttgggaaatatttgcttgcagtaggttttttcttcataaaatacttgaaaactatgtaattttttttttttttaaagtatgtgaaatagttcgttttatggtagagataaaagggtcatatgcattcattagagctttgaagtttttatctctgtggattgcatttgatatctgatgtgagtatacgaattattcatttattcatcctttgtaaatctctttcaggttaaagcaagcgcaattataaatggagtctaagcaagcgcaattatcgatggaagttgagacagtaccttctgaaatgaattctgcacccgcttctctgccaacaaaaccaaagtttgagcctttaatggctcatgagatgtctgatggccgagttcaatttcggaaggtgtctgtccccccacatcgttattcacctctcaagaaactatggttggatatctacacaccggtatacgagcagatgaagatcgacatacgaatgaatcttaaggctcggaaggtggaattaaagactagacaagacacacctgatgttagtaatctacagaagtgtgctgattttgttcatgctttcatgctcggttttgaagtgattgatgccattgcccttcttcgtatggatgagctctatgttgagtcctttgagataaaggatgttaaaactctccgtggtgagcacttgtctcgtgcaataggtagactatctgggaaaggtggtaaaacgaaattcgcaattgagaatgctactaagacaagaattgtgattgctgataccaagattcacatattggggtcttttgcaaatattaaggtagctagagattccctttgcagccttattctcggttcccctgccggaaaggtatactcgaaactaagagcagtttctgctagattggcagaaagattttgattcatacattcatgcaatcttgttctagtttataactgcgtgttatgagttttggtagtttttttgggttcttataagcttagttttctgagaattgagttttgatttgcttttgagaaatcttttttagggaaaaatttatgtcttgaaatatcatttataaggacatcatttgtacttaagttcttcaatgaactacaggcaccatatataagaatgttttgaatgaaactttttcgattggtttgcattattcgttctaggattttcaaccctaataacgttagtctaattataaaacgacaataaagtgatggtttcactttaaaatcgacaaatattttagttagaaatagaaagcttgtaaaattgaaagtactctattatgtaaaagctgaaacacttttggttttccctttgccagatttttttgtccaaagcttcaagctttaaattcaatattaaacttgttcacctttgatatcaaatgaagttaatttagatggcttgcttaaggtgtggtatcttctcataactcctcaaagtcaagggaagaatcatttatcatgtaataaagttgagatttatgtcactatgcgcaaatttctcttatttctgtagctgaattggtattatttaacatagggctactcaaaaaaattaacaaattcctcaatttgaataaaccgtccaaaccgaataaaccggcaaaaaatacaacttgaataactttacgaaaattttaaactgcccaataaatatattgggcgggtggaataaattttaaaccggccaataaatattgaggaaattatactctatactatttttatattgtcctcttatttttaccctcttttttaaagtacctctttttttaaacattgtatcaaataacccgaataaaccgatttgcatattttttactaaaattattaataacataatatataaattacgtttaatagttaaaactattttgcatttaaagtttgtattttatagtgtttattttgaaattta

SEQ ID NO: 220816 - DNA, 1835 bp, Cannabis indica
gggtaattctccttaaatttattggtatatttaaatttatttttaaataaaaaataaatttaatgacatgtaataatcatggattgtcatgtgattattagctcgatacttaactgtcatgtacgttccagaaatataaattaaatattattactattgtaattaggaatcaaatttatgtatttatgcggcagattattttttttagttttttatctcttgaactaataccattacttttattcaaaaagaaaaaataaaaatactataaccaaattgtatctaatatttttgctccttgaaaattacttgaattattcgacatcataaaatatataggattttgttaagttttatttcatatgactaataaaatgttgatgtggttgatgtgttattgtcataacaactcaacatgtgcaatataaattttaaaaatatatatttattattgataattaataaataaaaataaaagaattttatattgttgataaggaaaaaatttcttaaatttaattaatttttatttaaattacacatatgtattgattgatatgataatgatacattagcattttgttagtccaatataaatttaaccaaaatcttatatataaacactgtaaataattcagaagaaatttatacaagcaaaattctaattaatttattctatttagtaaactcgacatttaaattaatgttatttttatgtcgttttcatattttaataaatttttattttaattttaataaaattttgtatttcttgttataaaattttcttattattaaaaacaaaatgtgttcgataaattaaatatatattttatctatagtaaaaatgaaaaataaataacattataaattattgagtgctaataaaactctcaacaaaaaatagtgtagcatgtaaagtctccttggtaaactagtttttcttataaatcccaatttattggattatgagctctataatcccaatgtatttgatttccttttaacttgtgagatctacaactaaaataaataaataacaaatacacaaataaagtttgttgagaaatgttaaagacattagtaatttagtaatgtatgtctagcattagggttggtcttgaaatttaatggatcataagaaaaaaaaatatttttgaattcttatttagaaaaaaatgtggtattttttaaaattataaaaaaaatatatataattttagaagggaaaaatacttttttgagccctgagttaggtgagccctagacacaatacaagcctaacatatttagcacctttctaagtatcaatataatttaatgtagtaatttttaggatttttgttatctaattgaaaggtgacacgtcgtgaaaggctaaaaggcataaataaagtttgaaaaatgttaaaggacataatggtgcctagcacactcctatgtgtcaatatcgttattgatgcaattaagtaccgggtcccatataatttaatataataatgtttagagaatatcactagccaaaaagagcatatttagaggtgttaagcactactggtgtccaatagcaatactcataaagtttgttgagaaatgttaaaaagcatccgtggttcctaacaccttaaattcgtgtaattaaatatagagtcctatataatttaatataataatttttaaaaattattgctaactaattacaaaataacatatctaaatagtactaaaatacctaataacaatcctatttaaataataagtgattaaatgtaccaaatctttaattttagtgcaattctagttgggaaccaacactaatcaatttggggaatgcc

SEQ ID NO: 220817 - DNA, 1329 bp, Cannabis indica
attgaaaagagttttatttagggcataaaatcccaacacttatatctatatatatacacaactttgctagtgaagttagaagaggaatgccactgttgttcaaatcaacttcaataatttgtttcatggtctaggtctaaaaacttcttcaataaatgatgaatatggatatatatatttattttatataaaatgtggttatataataaaatttttggtttaacaatattttttattttctacattaactttaacataatatactattacttaataagatattctttattaattttatctattctcttattcttttcccttattcttagagtcaaataaaagattaggaataattatgaatataaatatataaatatttaaaaatatgtttttaattaattcgttgaattttaggaaaatattttaataagttttttttgggaggttaatataattgtagtatagttatagcatattctttccctcgattctcacttgtgtgttttttttctttttttcttaatttttttaattaaaaataaatatatatcatacttattcgaattaattaaagtatcataccacaatatcatcattaatatagattattaatattatatgtactatcacactgtataaaagatgaattacattattaaaggttaatttaaatctgtatttaattatattattagttgtgtgatttgtgtggttgctttccatagatatatagcttagctatattactttgtgggggaagttatttttttatattaattataaatttaattaataatatccaaacgaatatatatataaatatatgtatatatatatttgtgttgctttctgtacaaactaatttggttctaaatcttagcttgctattttctacattaacataattcaataataatttttggattattttttgaaaatatttgcagatttatagattcacccctaacaaaagtaagtttgtattacttcaaatcaattatgtacatcaatcttataacttaatgatctttacaaaccacacccctttaaaacccatacctcctattacacttcactcaacaatctgttaaaatatatgctatctttatcttttattttaagtatatgtagactatactctctttacaacgaatttcacaaaattgactaaattattaacaatttgtacatcttataccagacaactttattttttgccttccaaatcacactccaaaaatttttacttttagtcacaacaaaattagtgactaaaagtaaaaaaattgtgactaattataaattattattcctatattgtaactaaaa

SEQ ID NO: 220818 - DNA, 2499 bp, Cannabis indica
tcaattttagccttttttggttcacattttgcttctctctcgacgacaattgttagattttcattacagaccacatctttattttttatgaccttcttattaattggatcccaaagcctatacccaaattcttcatttctatagctaatgaagatacatggaacttgttatacccaaaattcggctgtactttagaagtgacacgtgtcaatctcgggaaatatgaatcaacaaatataatgataattttatcattaaacgcaaaatagaataactcattaaatgtagaactaatagagtatatttgttacttgctgattgtatagctctaagcgagatagggatatacaaactatcaatacatgtattgacgagaaaccatcttgtcccagaaggcataatcctaagggagccatagacaacgcatagcgaggcatctacatcgctgaatgtaaagaagtattgacgagacgaatcggttattagaacacttaacgtataatacacgctataataattaagtgtaataacttgagaacttggaggactgagtctgctgcaaggccttatggtcaaagagcagttcttaagtttgctcagtacattggtgctcatgccattgctggaaggaatatgaataaattaagtaattcatctatgtacaaggcgacatacctccgacgaggtacctttggaagggagttcctattcttataagcgttgaccgccttaaagatggtttaaatcacagctgtgggatcttctaatgttatctacatgtatttaagtagaacgtaattaaagcccacatttttaggaaatattgttatggaattcgaatttaaatgtaattatctgcctacctatattactataaataggggcagattatacagaaaggggaaggaaaatctttgagaaaaaagagagactaattgtaaaaccaaaattctgtatctagaaatatctgaataagatagacttgtggactatgcagagttaactgcaaaaccatgtaaaaattttggtgtcattgttattattttatttattaatttctttatatctgcattagatttatcacaaaataggctcataatcgttaacgaaaaactacgttaacaaaactgctttataatttagtttggacctttgttcctttggtacgtgcacgaatgtcttgtatccaaacacctttagatgtgagtatgacacatctttccttgtccaaactctttttgaaatatcaaactttaaaggaacgaatggagatctattgataagataacatgcagtctgtattgccactactacaaatatcaaatttgcagtggtcctaaaaaagatttttttcaaggaccgtcgctaaaaaaattaagtaactattttaaaccgtcaggagaaatttggtattcccgacggttttaaatcgtcaactacaggccaagcccaattaaacctagctaattagccactttgtcgagtactcatcattccacacaagccacttcatcgatcattccacagcagagcccaaccccaacacgaaccacaccagtcacccaacccccaacacgaaaaccacaccagcagccccacccccaacataaaaaccacataaaaccttcaaacctaaccctcgtctcctctgtctctctctcgtctctaacatctctctcaatctttgcctctctttcatcgtttctccatataaaaccctcatcgtctctcctcagtgctgtggccttaccgccgtctccatctatatctctgaccggtcaacctcaacctcccaaggtatgtataatatttatttatatattttcatacatatttatttattaatttttcttattaaaaccaaatatatatgtaaatgtaatgtgtttaatttaaaaatagttgttatttgttaatgtataaattgttattagtaaaagatttatttatatcatttgttattgtaaaaatattttaaattttctaatttagtttaggtaaaattatttatttttattagtaaaaatataaaatagtattaatttaggtataaataaatatttgtgtataagttaactatagttagggaaaaaaagtttattataagtttaattttaattagttttatttaataatatttttaattgtgtattgttaattttgtgtcagtgtttatttatggtgatagcatttgacaaaacatgaatgctatattagacttagtaatctatttaaacttttttattcaatatttaaaaatgttagaaaaaattgaagtgtttcgaattgttaatttgaattatgtttaggtattagtgtggtgttgttcgagtaagctttaaatttaatatttaaatattttctaggtatcgagttctttgtgttgattgatgagtggacaattatagctatctttattggagaaatgtataatctctaaaactataaaattcgttatttagtggagtttattgacgttagatattcatctgtagtgaa

SEQ ID NO: 220819 - DNA, 1548 bp, Cannabis indica
actaaagattatattcatacatattttattgagatgaactgatattttagaaatttagtttattacttaagttatgactttactggttatatcggttcacataaattaacatttgattacgtccttaagattattagtaagttgtatcgtggagagctttaattgttattttcatatagaagtccgattcatgtattgttttaaggatacatctcgtatggtgtattacaaagaagcgtaactgttcattaagtacgcaacactaaattgaatgatcgtaatattcttgactaaaggcatatcacagcataaattcaaagatcatatagtaaacatgggattcagtttcccttttgcagtttctgttgtacaactaaaattattctatgaaactcttctttcgatatttttctcatatttatgtgcaccttaattttatttgagaaaattatcttcagagaaccagaataaatataaggtttatgatttatttgcttaagtacattgtcacattaagtacattattgtgtaataaatatatcgtaatacatggaagataatactcgctatataatgagaatttatcgctatgattcatgagtttattatgtaacaagaatcgttggatttaagtagtacatttaaatattgaccaagtggaaggatattaggatattagactattttataattgataagtacaatatttgaattgttttttcaaatctttgatttgattctgatttataaaatatataatttattaattatttgataattaattaaatattctatataagattttgatttaccaaatatttcattattcgattccatttcttaaattaattatcaaaatatgcaaacaattaatgtggtacaaattttgatggagtatctaactaataaatatagggtaccgatttccaaactcactactcattttgtaaaacacaataaatacgtctaagagagttagagagagcttggaagtcgaatatccacactaactaagttttgttttcttttctagattcaaagatcgtgtggaattgaagcctcaaataatcaatggcctcaaaaaatcaatggctggagatatttcgattatttagttatatcatgtatatatttgatttattccgcatttaataaatcgttcatatatgcttatgtttacatagtaattcatataaagtttctaacagcagtggcagtgggtagtgatgttttgcgtggtgatgggtagtggtggtttcggtggtggtgatggtgttggtacgaagaatgaaaaaaaaatcttgaaaaaaagaagctaaaagaagaaagaagaaggaaatggagatggagatggagatggagggaaaaattgttttttaattttttatttttaataattaattacatggaccaataaaattgtgcacgtgtaaactgtgtacacatagaaaatctatcatgtcactttttttttgaaccataatccaacatgtcacttaacatatgaaaatggatgaaaaaactcaattgctaatagaacacgagttt

SEQ ID NO: 220820 - DNA, 1805 bp, Cannabis indica
tttttttgttgttgttgttattattattattattattttctttttctgtttaaatggtggttattttttccattgctctctctcctccttcaggtttgacgttttatcttgtatgtaatagtacctcatttgttaatttgttgtattcaagaatcaagtttgctaaacttgcttgcatctactatgggcattttggttggcaatagatgttttatgtattgcatcattgcatgtatgactttgttgaagttgtagaggatacttatttattagatttacactatacaccataatttgttttccagagtttgaggttctgcattattttgggtgattattggtaataggataatgaagaagaggtttgttgaacttagaagcagagacaagtacattgtaacacatcttggttaggcatgtagtttgctccgacaaagttcgaaaatttaagtaactattggttacctatatggcgaatattgtaagattatgaaaggaactcacaagaaacgtcaaaagaatagggtggaatcacccgtgacaacttctacaaattactgaacactataatgaatcatgaaaatagatgtaatgaaaatcttttaggggttgtttggtacgcccgtattgtattaaataataaataacaatatgtttggataaagcaatgtattatattaattattacgactaaaatttttaatacaatatatgttgtattatttaatacataacaaatggtttgtattagcttgtattataatatttacaaaggatttggggtcaacaccaatctctaattcggacctgggacctagacttggacccccccgaacttcgacctggacctcggactcggactcggacttcggacccgaactcgggacttggaccccgacttggatcccaaacccagaccctgacccgaaccgggacccaaacccagacctaggactcggacccggattaaataatactaatacaatacaatataatatattaatacaagtcaataccaaacataatattgtatttaataatactaatacaatataacattgtttcaaaaaaaaatacaatataacataatccaacacaatacaatacggtgtaccaaatgagcccttaaaggattcattaatcaaactaacgaaagagcacaacaaacaacaacactacacaaccggcaacctcaccccaccccaaagttacatcttacaaacaaattcaaaactagctttgtcaagatattcatcctatcaagctttaagagaatgttaattttcttatctaactaagaaatcataaacactttctgttcattccaccaaatacaatataccatcctttagaaagaaaaatacaatataccacagctgccatggtcgctaccgtaatgtaatgatatttttggttttcattttatttgtaggtaattgtggcgaaatatttttatattttaatttctatgcactattttttcttgtgatttaacttcacattctttaaatttcaagtactagttaaattttattattaaacgctaattgagattacacaaatacctcaaatttaacaataaaatttaaaatatttcaaatttgtaaagaaaattgaaggtaagggtaatgccaaacaaaaaaaaacaaccaaaaaaaaacaaaacaaaaaaaaaaactaacaaatagattaagtgtacaaaatacaaaattaaaaggtttaaccgccagttacttttatttaatattatactttatataaaaatagtttattagtgttctactgtattagtataaatttttttt

SEQ ID NO: 220821 - DNA, 3407 bp, Cannabis indica
cccctaataaaaaattaaaatttataataaaattttaaatatataaaattattaaactacataaaaattaaaatattacacattaattattatctaaaacacaacttaaaatttataaaaaagatactaatatattaaaaaaaaataaacataaactagaaattataaaatattattagaaatatataataaaatactaaacgggtcaatgttccctcccccgtttaacatttggggtcaaaaggtaattcccctccccgttccgttcctcatttacacgggaaatctccggcccgttaggggtggagccctttcgaggccccatcctcataggaaaaatgtgcatccctaaccaaaattgttgttcacatttaacaatccctaattatattaattgatagactaaaacttattaatatcctaactacttaaaaattttcaatctcacttctactaacctctacatatttacattttcatattttattctaattgctgaaaatctcaatatatgatttgaattaatgtaaatatcgtatatgtaagcttaatttgctctaacatttattatttgtacataattggagaaaaaatctcagtcaattactataaatgtaaaatctaaattaggttgcttattaatttttatatacataattaggacttatatagaaattaaaagctacagctaagctaagcatatttccaaagaggtaaaaacaagtatgtatgtagaaattgaatagttgtaaatattgtatgtagatatattgctgatgtgttcttccatatgtattaattaaatcataattaccatacataattattccttattgatttatataatatatatagtaacgatacatatataaaaggaattttagctattcatatttataaagaaataaatccaattggttttatataatattgcatggtatatattgcatgtagatagtttcttctctaccatatacctaaattggatataatataaaaactgaatattcattttcttaaaataaaaaatgaaaattatagaaagataaaaagtaactataatactataacttaaagattgataaaaatgagctgtgtcaaatcacaagctctttgatcttttatatatgaagaataagtaatacaagtaacagaatttagttaagagatgagttgtgtaagagtgacacgtctttcctaaacgcacaactctgtaactaactttataatagaaaactaacctactaactactttcactaatactcccctcaagctatacttagaatgttctaaacaaagcttgttacatagaaattgaaatcaagaagaaggcaaaggtattgtgaacagatcgacaatttgatcctgagtaggtatatagcagacttataacttgttctgagaaatctaatctctaatgtaatggacatcaagctcaatgtgcttcattcttgtgtgaaaaactgaattcaatgcaagcgattgagcactttgattatcacactaaaaataggggtgttttgtggagagttatgccaagttcagtcatgagagaactaatccatacaagctcagttgcagcagaagcaagagctctatattcagattctgttgatgattgagctacaactttttgttttctagaactccagttaatgatattgcctctaagaaagatgcagactacttgtggatttttgatcatcaagacttgaggctagtctgcatcagaataaccttcaaggttgagtaaagtggagggtctgaagtgtaagccaagatgaggagttcctttggcatatctcaaaattcgtttgcaagcattccaatgattacagtgggagactttagatattgactcaatttgttgacaaagtacgcaatgtcaggccttgtcaatattaaatattgtaaagctcccatagtatttaggtaaatttctagtttatcaaagcttggactatcattttgagataatttgttggccagaatcattggagtgttgcattctttcgcatcttcaaagttgactttatttaggagatctatatatagcatattttgactaagtaagatagatccctaatgtgtttctgtaggcctcgaaacccaataaataactaatagagccaagggacttgagggcaaattttgtgtgtaaatatgtgatcaacttggagatagcatttgaatcaacacatgttattagtaaattatcaacataaacaagaaccagtaacaaagaaccctgctggtttttataaagtaatgaagaatctgacacagaaactttaaacccccaagtaattaaagtacattttaaggtgtcaaaccaagtccttggtgcttgtttgagaccataaagggacttgtttagctgacacacatggtctggtttggtgacatcttcataccctggtggctgctgcatatacactttttcttttaattctccatttaaaaaagtattgtttacatctatttgttgaatgtcccaatcataagtaacagctaaagagaatatgattcttatagttgaagcttttatgacagggctgaaggtatatgaaaatccaaacttggagtttgtcgaaaatctaccaatcttgctttaaatttgttcagtgatccatccttattttacttagtcctgaaaatccatttgttagttaaaacattcatatatatcagcagtccgaggaaccaaaacatagattttctttcgtgttaaggccgtgttttcataatccatggccttttaatttccaatgtggtatgctaagggcctgtttgacagttttaggttcttcatagatttggtttttggaggcagtaacaagaaaggatttgggtttgtaaataccagactttgatcttgtttgcattggatggccttgaggtaatggtggaggaatgggagagatggttgggaatgaccacttcctcagtattgacagaagcagcatttggtagtggggaatgaggcacattttcatctgcagaagagtactcaactgtttgttcaacatgttgagttgagacaaatggtgtactgatttgattttcagaggtaagactaagagagccaaactaaatttgggaatagattagcagtaggtgatacactgggaatgacaaaggctggagcaattaaatttttgtgataagaggaaggttgtgtgttgttgaacatagttgaatagggaaattatttttcactgaagttgacacttctgccaatataaattctgcttgaagagtataggcacttatagcttttgtggaaaggactataaccaagaaagacacattttgatgtcttgaattgaaatttatgttgattgtaaggcctaaggaagggaaaacatgcacaaccaaatgtttttaaaaagctataatatggttt

SEQ ID NO: 220822 - DNA, 4129 bp, Cannabis indica
gtcctaactgatattcttgttaccccccccttcaagatggaccatatatgtcatgtatggccatcttggataagtgagaattaagagttgtagagggtagggccttcgtgaacgcatcagcaagctggagattgctgctgacaggaatgaggcggatgacagattgtgcaatcttttctcgaacgaaatggcagtccaactcgatgtgtttagttcgttcgtgaaaagttgggttgttggcaatatgaatggcagattggttgtcacaatagatgaaggcaggtgtaggttgagggatttgtaagtctttgaggagatattgtaaccaagttaactcacttgtggtggcagccaaagcgcgatattcagcctcggcagagcttttggagacagtgggttgtttcttggttttccatgatatgagacagtcacctaggaatatgcaaaaaccggttgtcgaccgtcttgttataggacaagtagcccaatccgagtctgaaaagcctcgaaggtgaagagaagatgaagaagaatacaatattccttggcctggtgtgcctttcaagtagcgcaataaatgatgaagagctgtgaggtgagttgttcgggggcaagacatgaattggctaagagtgttcacggcaaaagtgatgtcgggccgtgaaagagtcaaatataataatctgccaattaattgtctgtagtgagatggattgttcaagacatctccttcttggtcagtcaatcggattttgggatccataggtgcctttgcaggtttgctactagtgtatcctgtatcagcaagtaattgcaaagtgtatttgcgttgagaaaggaagaggccatactgagcacgggctatttcaaatccaaggaagtacttgaggggcccgagtgtctttaacttgaacttggcctgaagggatgtttgtaattgttgaagaatgttgatatttggaccagcgaggattatatcatcaacatatacaagaagagcaacaaaggttgtgtgggagccttttgtaaacagtgtgtaatcggcatgggattgagtgaatccttcttggataagagcattggtgagttttttgtaccattgtcgtgaggattgacgaagaccgtaaatagatttgtttagtttgcacaccaaattagagcccgtgacattagagggaaccgtgtaaccttggggaagttgcatataaacctcttcttctagatcaccatttaaaaaggcgttgttgatgtcaagttgtaaagtgtgccattgcttgatgttgacaatggcaagtaagagtttgaaagtgaccatttttgcaactggggagaaagtatcaaaaaaatccaatccttcttgctgcgtatatccttgtgcaactaagcgagctttgagtctttcaacgctaccatcactgttatacttgattttgtacacccatcgacaacctattgcgtgcttgcccggtggaagaggaacaacggtccaagtgttgttgatgatgagggcaagtaattcattgtccattgctgccaaccattgcttgaattgtgcagcttgtttgtaattttgaggttcaaactcggctgtgacagcaagtataaaggctttgtaagctttagataattttgcataagacatgaatttagatataggatgaggtgtagtagatttatcctgtaggagattgtagcattcaaaatcttgaagatagcttggaggtcgtgagacacgagaggttcttcgaggtgcaattggttctggtgtagaagtttcttgctgtgaagtaacaggaggtgtcgactgggctggtgttgacatggtattttcttgctgttgagtagcagtatgagtatcatgggagatattgtcatcttcattgtcattatcctgtaaaatgggattaaaggcagtatcattgtaattttgtgggaaataatcagctatatgcgtgttggttatgtgatgtgatggtaataccagaggtaaaaaaggatctatagattgatcttgcaagttaagtttatgaaaaggaaagacattttcatgaaatataacattgcgagaaataaatacttgtttggtattaatatcatataacttataaccctttattcctctaggatagccgatgaagacacatgttcttgcccttggtgcaaatttggttctatgagaagaaatagtggaagcaaaagctagacacccaaagcatttgagatgactgtaatcaggtggtttgcccagcagtatttcataaggggtcttgttcttgaggttaggtgttggtgttcgattaattaggaacactgctgtcatgagacactcagtccagtattggataggcactttggactgaaaatataaagcccttgctacattaaggaggtgttgatgttttctttcagcaacggcattttgttcgggtgtctctatgcaagtgaaatcatgggaaataccattcttggagaacaaatctttgaaagcaagttcaggagcattgtcagatctaaaacgtttgaaaacacaattatattgagtttgtatgtaagaaagaaattcaggtataatagatatgacatcagatttttgcttaagaagataaatccaagtgaacctagagtgatcatcaaccaaagtaaggaaatatctatggttagaatgcgaagtaacatgatagggtccccaaatatcacaatgaatgagatcaaaacaattattggtaaagttgtttttattaggaaaaggtagtttcctttgcttagctaaaggacaaatgtaacaaggttcaatactatgcaaatctttagttttacaattcaaagaatcttgtaataaatccaaacatttattagacaaatgacccaaacgcttgtgccaagtttcagcagatgcaaaagcattgatgagaacgggtgtggtgtccaatatgtagagaccattagccgattcacctttgccaatcatcatcttggtgtgcgtttcctgtatgtaaaaagtatcagcaaagaatttcaaagaataattgtccccttttgtcaagcaactaacagaaataatgttataatgaaaagagggaacatataggacatcatgaaggataagatgattgtttattttgatattaccacttcgatataccagaaggctgttattattaggcagaattaacttagtttctgcaataaaatgaacactttggaatagatttaagtcagaacaaatgtgcctagttgcacccgagtctatgatccaagatttctctttcgataacatagcataatttgttaagataatacctgagttcccattagaagtactcgggtctgtagcaggtccgttaacagtttgagcaccaagaaggttcagcaattgctgatattggtttgctgtgagttggggcagcaaggtgttgctttcactgggacccgaacctgtttcattggatgtttggaattggtttgctgcagcatcctttgattttcctcctttgttgtacccggggggatatccatgtatcttgtaacatttttcgatggtgtgaccatgcatgttacaatgagtacaaaagggcctgccacgtttaggttgctgagttttaggtggtccttgagtgtcacccttgcttgaagccttttccccttgaaaagcgaaggccatattcgagtttggatctgttgtactgccttgtcctcttctttggttctcttcttgcgttactagatgaaagactctattaatttcaggaagaggatccatgacaaggatattaccacgcacttgagcataaagatcggaaagacccatgagaaatgacataatgtactccatattgtgatgttcttgtaatttcttgactcctccacaagaacacccattacaagtacaatttggcctgaaattagatagctgttcccaaactgttttcagcttagtaaagtatatactcacagtttgattttcttgtctgagattcatcaagtctttccttaggttgtatatatgagctccatttttctgctggaatcgcacctttaaatcgttccagattgcagcagcagactcatcgtatagtatgctagatgagatttcctttgaaacggaattgataatccaggaaataacaat

SEQ ID NO: 220823 - DNA, 1630 bp, Cannabis indica
ttttttttttttttgttcttttagtgaaatagtgagagagtaataaaaatgctgatcggttaattttactatataaactttatagagagagtgaaatatattaagtattacatatatattagataaatatataggtttatgtgtttttatggccaatatttagtgtacttgttttgagtgatattaatcaattacataatataatatcgctagaaagagaaaaaaagagaagaatactactaaaaataattaatgaattatttcaataaatttacaatctatatatatttaaaaccttaagaaccataacattaatcaattctcatcagttagtcattttataacgtttttgtttgttcatctgtttttcctttaattagttatgatcatatatcaaaattcattaacagtactatacctagctagctaattataacattcacatatttctgtttaacacattttatacgtacattatttatgaataagttttaaattaagtacatataatttattcatgaatccttggtatatatattatgatcacaggagccaaagttaacagaatggtcattactagaattattcagtcataataaagaagcaatgctaaaagttgaagttttatttgcttccttcgcttcgggagagggtgcttgttcggtgatagccgtacttatctctcattggcttcactgtaacccgaatctaatccccacaaggctacaatttgaatctttaatcatccaaggctcctctgaatggcgagtactttgcactgaaacttcttactatggtcactttgacatagagaccgtggtaaatgctggtattaaaccactctctatttgcgcaaataaatctatcatgggaattttaggggttgaaaagttcgagccattgaaggatcttttctctttagacgaaatgtgggagaccataacaaagaacttaacaacagagccaagagtattcatcgtgggctgggatgatcatttctttgtactgaaattagaacttcatgcttgttatattttcgattcgtttggagcaagattgtttcgagggtgcaacaaggcttatgttcttaagtttgacgagtcaagtgtcatttttggctctgatcaaaaaactgtactttgtgctggtaaagagtgttgcaaggagttcatgaagaaattttttactaatagtgttgtcatggttcttaaaaaggaatacgaaaagggatgcattcaattaccacatctttatgaaaaattgcaagtgaatatgagctatatgtgcttgaatactatatcgtcgtcgataacatcgtcttcctctgatgctccttctcgtaatgaaagtgatattcagtcacttccctaatgaaatatttgatcttgcttctctttctgatgaaatatttgaccttaattatgaactcaattaagctcataaaaaaaattaggatatacaaagtctgtgttatgtattttttttttaattttattattttggtataggaatttatttattttgttgtgtccaaatcaattttaaaataatgtttttattattatggaagtgaaatggttgataatcctacaaagagtgcattggtcaaactaatgtatatcaaaatacc

SEQ ID NO: 220824 - DNA, 2000 bp, Cannabis indica
tcattctcatattgacctttttttaacttactaacacctttttttttatactacaacatgacttattattgttttttttttttgcttcatagctaaatattttatttttataaactaatttataatgtaaatacttaaaataaattttagttacagataaatatatgtttaaatttttataataataatacttaaattatatttgtgaaactttcataaatacttgaccgttaaataataaatttttacaaaaattaaacttaaacatttatgtcacaaattaataccttaaacttacccctttataagaactatgtataatctactactttgaatatttctaatcgaagttaataattttcatttacttttaatgagttcttttaaaacataataaacaattgataaatgtatctgatcaattttttaaataaataaatattattattcttaccaaataattaaaaggatcaaatactttttagttattagcaattattgtctacatagatgaggtatttaaatgttttatttaaacattattttcactaaataatgtttttttaaaatgaataaacagtctattatgtacacaagtttttttttaaaaaaaaaaactttattattaaaaaacacaactacgcaagtttgctttaacaagaacaaacacacaattagacaaatttccaaaccaaacttagttacaatcagacataatagccaatttggccaatcaatgagcaacagaatacctttctttttagcatgaataacagcctgacacagcttaaatctctcgaattaaagtaggtccaacaaaaaaacactataatcagtgctgctaggactcgagtgttgcaaaaaacagaccactaacagataattggattgcagaatacagggggagagtgcagcttgaatgcaaggtgaagacccatttagacaacaagactttttgccaacttcactgaaaaatgccttcccgcttctgcgtttcagccacaagcacctttcaaaatgatctctaataacagctcccaagccataacaatccctatgaataggaacactaacatcacaattgatacaaagcatccatgacggaggagactgccaagcaaaacgctcaatacctaactatttattactgtgaagatcctcaattagtgaaggaaacaactcattaagctcaaagctagcccaatccgacagttctcaactgaagttgtgtaaatattgagtcgtttttttatttcttctttgccatagcaaccagaaaataatcataaattaaagaaaattagacattggcctacctgaaaacacatgaagaataaactccaaggggtctaaaagaaacctcgaaaagcagtgccaaagcaaaaagcgtttccacaccttaacaacagcagggtaaaaccagaaggcatggagggatagactctataggggacttacactagcaacaaataccatcaatcttcatacctcggtgtacaatgacagaacttgtatggagccagcttttacaaactctccaagtaaagttcttgacttttggaggaacttccagcttccataatattttccaccacaccagcagacattcttgagaactttcatgaactgaatggacattataactcacttcataaccacttttaactgtataaaagccttgagatgtatagtgccaaaccaaatcatcctcacacgttgaggtacaaggagctaaacccaaatctgaagaacatcatctttatgaaatatggtggtaatatgagagtcattctaggaaccatccacatttttaagagtggccccaacttgacctagagtggctgttgcagggactctaggtgatggggtcgaggaagccaatggctattgtcttcattaatatgcacttgccctattcgatttgatttgacctcgaatcccatttgcaattaagatcctcccccataaaaacactacgccaaataaggagcttgacttgg

SEQ ID NO: 220825 - DNA, 6239 bp, Cannabis indica
  modified_base (4680)..(4680): a, c, t, g, unknown or other
aataaaaaaaattgttaaataatatgtgctggtaacgtttacactgcttttaacgttcattggctttattttaatttgtcaaaacacaatgaaaaattaaagcttgtcgaagttgggacttttggtgaaagcatgtagagactgagagagtcatcaaatgtctatgtcgacatgtatagcattaactttatcaataaccagaagtataaatttaggccaacaaaataatagctaacttaatattatttacgcacgatatgtgcagtgcaaattataaagacaacatctctggtcttatttagtaagagtatcatggcaataacacacaaaacaatgcaaatctatatataaagattcttcatttctgcgtcaaatttcagtcctgactgggagaaaacagctattgaatttagccttagacagcagtgaggaaggcctttccaggctgacggttatctaaacgaccatggcatccaagaagctgcacaatcacagcacagcatatcattagtcaaagaaaaatttgcattattaattattccatttattgttttgatgtaaataaataccttggcattgacaccatctgctataatcctgttctctgacttgaatttcacataatcagcacggctgaacttggtgaatcccctgaaaaatataagggcaaaaaaaaaacgtaacaataatattcctgaactagttagtagggcttatagttataccaccattttccgaaaacatcataccacttcctgctgacaatgatcttttgacggccagggaacttgaacttagcacggcggagggcctcctgagcatgatggctgttgctgtccttgcaacgtacggaaagaaggacctgaccaatgctgactctcgcacacacgccttgaggtttcccgaaagcacctctcattcctgtctggagcctatcagctccagcgcacgaaagcattttgttaatacgcagaacatggaaagggtgcaccctcaccctcaaatggaaagcatcctttccggcaaacttagccatgtacttgttgcaagcaatcctagctgcttccaatgcctctgacgaaacattctccttctcccaactgacgaggtgaacgcagaatgggaattcatcaacacccttcttcttcattccaacatcgtaaattctgatcttaggatcaggaacaccacggcaaaaccttgactttgggtaaggtttgttcttgatttgacggtaacaccttgcaggtcctataccaattcaaattgttgtatatgaaaatgtaagtttttacacaattcgaatctaaacaaaatatacacttacatgcataagaaagacaaccttttgactcagatacgttacaatagttttgtctttaactaatataaaattatgaacaataaaaaataccatatttctcatgaattacaatactccgttagcttatacaaactacttgcaatagaacaacgttttaaatcacatcaagtttttttttttatttactggagaaattatttatcaaccagacgagggaaattctactaaaatttattttacccaaagaacaaaattttcagcaaattatatacacacatcaatttaatacattaaattgtgcccgcgacaaagccgttttctttttttattattgttctctcttttcaacacaaaattagtgacagaggattcaaaagggtaaaattgaaaaccatatccataggaatatgaagatttcactgttgaaattaaaatatagaaaattcagagtattggataattacttacgtctacccatggcgtggcctcggcttcaacttcagctcccacttggtggtgattgttccaaaatgcaaaccctaattaaagcgattattatatagtcgggcgatggattacccataacgggcctgaagagatctaagctcaagcccaagtaatcgttgggccactctatacatcagacccaaaggcccggtccaatagtacaagctagaagccgacgtggtgacatccaaagaaaagcagctgaaccggtctcctctccgccataactaccgccatttcaagagcttcaagaagaaaagtcaaaggtcaaagcgaacggagaaatgaagattcatcacattccatgtttagaggacaactactcttacttgtaatacgcaatctcttttccccctttttctcaatttcatatacttctgaaatttttcatctttatgttaaggattatatataaagtttttccttcgtatgaattttgatgggtttcggctaattttgcaggattatcgatgagagcaccaaggaagccgcagcagttgatcctgtagagcccgagaaggttctcaacgttgctcaacaacatggcgtcgttcttaagcttgttctcaccactcatcaccactggttcttctttggatattccctttgtttttttattctttagactttgattgatcataatatatcatgctttacagttttagtattaagcttccttggtgtgaatgaggagctatggaactttctggttgtttgtccatgttagctcaaagaaaggctctctcctggctttgttttcatagaaaattgctgcttcatatgatcttcattgtggattgacttgcatttctgaattgtataatggtatactatagtagttgatgtgaaagtcatcatagcatttatttaactgttttcttatggttgaaatgaatagggatcatgctggtggaaatgaaaagctaaggcaattagtccctgggattaaggtgtatggcggttctaaggacaatgtgaagggctgcactgatattgtagacaatggtgataaaatttcacttggagctgatattagtatattggcgcttcacactccttggtattgtttttagcatatatatattgtgattttgtctcttagtatgaatatagattttcattgttgtagttatgatgggaaatagattgtagaaattccaattattatttttttcccataacaagttcctaagttaaactgttctccacaaaacattaaagttgaaggtttgtgagatttttcagcgtgcatgtttacttgtgatacttctttggactgaaattttttaatttacacattaatttttctactgtttggtattatatgtagaattttcttcggaattcctgcattctgtactcttaactaaaattctcttccttatctaatttcttcagccacaccaatggtcatattagttattatgtaactggcaaagagggagaggatccagctgtttttactggagatactcttgtaagttaattggaatattgtattttattccttttactcctctagtttccgaaatcaaattgtcatgggatagtgggaacaaatcaaataacattgtcatatattgggtttataagatccacttactgaaaattgattctgcaacaaactagtatgaaactataaacaattgcttaaagcttggacgatcagatccttattccctatactcaaaacttttttggctactgattattctgattctagaagaattttttctctcttcatgggttattatgaatgacgtaggcatgcaaggatttgtaaatcagtgtttcttttagcaaattatgttgcgtaacatattattcttctacatgcagtttgtagctggctgcgggaaattttttgaagggacagcagagcagatgcatcagtccctatgtgtgacattagcgtcattgcctaagccaactcgagtttactgtggtcatgaggtagctaatgtgatctttcttattctaaacttgtacctgtggacaacaagttgggtgtatgttagaatgtggaagtgtggttagaaagtaggatagggtgaagtgtatgataagatgtatgaaatttcgttttaatatcagtaggcaatgagtggattatttagatttggatcagttacctgttacagaattgtttttttgttttttcactctagtattatggtagaatgtggaagtgtgggtagaaagtaggatgggatgaagtgatggtgagatcgatggagaattatctcaaaactaattggtgatggagtggtatcccatttatcttatatatggtttttgacatctgatatatatttatggtatttttcctttcttgtttagattttcacttcaagtgttctttcacttgaaatttaaccgatggaactttattattagtcaaagtgtaattgaaaataaatgttggtgtgccacaaaagaaaataaatgtttgtggcagagcttaagagttaaaattgttatttactttaccagaaccataatcttctttcacgtttgtaagttttctaacgtatccacgagactcgctgaatacctgttgtcagtgaacatggatcattacaattgttctttgatcaaactaagtcatatattataagagatatttaggacctaatggtcattagatgtcatcagtttttcacccttctttgttgttgaatgaattttcacatagtattgaggaacttcttgctggcactggcaggatacattcccgttgttctgatcactttatttctgtgataaaatataatttctctagttctagttgcgtcttttgctgcgaacctttctcttccagtatctataattgacaattgcactttgtngttgcctcagtacactgtcaagaacttgcagtttgctgtcacagttgaaccagaaaatagtgaaaaatacaacgcaaaaaactatcatgggcccagcagcagcgcaaagcaggcctccccacaattccttcaacaatcgaggaggagatggaagcaaacccattcattcgggttgatctaccagagattcaggttcgcatagttatcattatcatgccttagtccaacacaacagctcaaaggtaatcacgtaatttcccagtattctatgtcattttcttatggtaaattctggatcttttacaggagaaggttgggtgtgactctgctgtggaagccatccgcgagataaggaagaggaaggacaattggaggggctaattgaagaccagaggatggtctgtctttctgtatttgtttgctttctcttataaaactttgatctgggtgggtgtgcaataaatttacaagattccaagttttatgaagccttgtgagcattataacatgaggaattagcaaaacaaatgtccatgatgtttgttcatgtaattagccaaaaattgacttattctgctttcttctaaaagatgcattcaagcaactacttttgttcttgcttccctgacttttccttctcgctgaatgtcaaagtttccacacgttattcattcaaaaagaaagaaagaaaaaaaaaaaaagcatgacattaaaggtatatatggctgtgatatttgtcaaaaagcttgtgctccatccattgttaaaaataataagcttgtgcttcatccattcatatgatcattggagttaggtgaggatagtgttgtgacgagtacaatatatatgaatgaatgggtttgtctccatcatatgatcatctattgtttttactatatatataaattaatggaaaattttgtggtaaaactaatgttaatgataaggcataaccttcatagatgtataaatgttgagcactctaatgcgtgttcaacttatagagcaccctctcgagtgttaaacttctcgaattggaacacttgtaggtgtttggattttggtcaactttcatttcatggatatcaagcaacctcaactttaagctttcaacatatttttttttaaataagaaaaaaaaatgaaaatacatcttgctcatgagtcatgatacactggcgttttttttttcagtaattatacattggcttcgttttttttttgcaaagatacattggctttttaaaatcgaaagtttgactagacgttagaaagttgaccttacgtttagaattaattttatttaagtatggcacaattattattctagttaaaaaaaaaattaatttgtataattttattctggttaaattttcttttatttgatgtaagaaatttaaactagttgttttaataagggtaaatagcgttataagtacttaaagttttgagtgtacagattctgttttaaatttttttaaaaaaaaaaagatttagaagtaactgatactacatattttttcgtccagaccaaataatttaaaatttaggtcttatac

SEQ ID NO: 220826 - DNA, 3776 bp, Cannabis indica
ttaatcttggggaaaatggagaactcgaacgactcttggaagaatgacctgaccttctttccaatatggggtcgagcactaggggtaccagtcgatttcttgactccaaaaaacactgtgcgattggcggcaatggctggggaggttatcacggttcataactcagatgtctcaaggatggtggcgaatggctatttcagattccaggtctggatgtcaataaacaaaccagtatgtccgggatttcctctaccgtgttcgggaaagaagaagtggattgcatttaagtatgacgagttgcctttcatgtgtttcaagtgtggaagaatcggccacagtctcaaagattgtcaccaagaaccaatcatagtcactagggatgataatgtcacagcttctgcatatgggatatggttgaaagtggagaatgacactagagatggatttcaagatagaaggttgggacaaggaaatcacattacacaagggaataaggtaaatcaggaggctctgggattggcacaaggagttaaaatatccaattcctttgcttcgttagatgagactacaacaagtgtggaaaacctattaataggaattgcttccaagaccgaatcattgaaacaaaacgaagcagtaggacaaagtttaatggcgcaagttaataaagaggttccaggaggcatggaaaatgaagtggataaaaggctcggtgatgatggagggagagggaagagaagaatggtggaagaccaaggaatttcatggcaaggaaagttacaaaaaactatcaacccttcatcctcagaaactcagacacacaacctctacaacgttccaataacatactcacaagagattccaacaatggaggggccctcttcatttgtgtttggttcgattttgaagaatttatctaaggagaacagaagaaaggtttcggtcaagaaagattcaaaaactaagaaagggaagaatggcggtacagtggaggatgtttctcagaaggaagattcagcaggcactacaatcactgaagaggtgaaccctgtaattcagggtcacctacagcaatggatattcttctctggaacgtccaagggctggggaacccttggactgttcgttccttgaactccctggtgattcgttacactcctcaattggttttcattatggaatcgaagcttaacaatgttcgtgcggaagctttgcatgtcaagttgggttttggtgggtgctttgtggttgaagccaaagggaaaagcgggggtcttcctttattgtggtccgagaaagttgaaacacatgttctttctttctcccctttccatatagattctttcattagaatggaggaagggcagtggtggaggtttactggtttctatagagatccggatccaagtcaacgtactcaatcttggaagctgttgaacaggattttccgtatgtactcgaggccgtgggcagtgggtggagattttaatgaaattctgagccaaaaagaataaatgggaggtcctcccaaaccgggttaccttattaaaaacttcaaaaaggctctggacgcatgtaaacttcgggagattgcgtttgaaggtagtgattacacttggtgtaatgggaggaagaataatctcattttcgaaagacttgatcgagtttgtggcaactcgattggtttgacatgtttccctttgctcaagtgagtcacttagagagaaccaactcggaccattgcccccttcttctcacggcgagtggctcttctcctatgaccacgagtaagattagatggagaacccgatttcattttgaaagtgcatgggcagatgatgaagattgcacaaggattgtcaatttggcttggcaacacagtgacccaattatgaccactagggatctgaaagataagttagacagatgtggagcggctcttcaaaagtggaatagagtaaaacggaaggaaatgacaaaacaattgaatgaatatgcagataaaatttctaaactctcccgaagtaccgatgttatggaatggcagcaattaaatgaattggaacacaaacaaaatatccttcttgacaaggaagagaagttctggaaacagagaagtagagttctttggctgaaagagggggataaaaacacaaaatttttccatcggaaagcgagcaatagaaaggctaagaataccattaaagggctgattgataataagttgaattgggtgacagggaataagcaaatggggcaggtggcttgtgactacttcatgaacttgttcacttcgaattcgaccaccccggaagagctagaagagtttcaacggattgtcccaaaccgtatctctagagccacgaatgaatatctgttagaacccttcaaagtggaggaaatttataatgcaatgcgtgccatacatccccaaaaagctcctggaagtgacggactgcctgggttattttatagaaaatgctggccgactattggtcatgaggtgtcaaaagtttgcttgggaattatcaatgatgatatgaaggtggaggaaatcaatgatacccttatttgcttaatccctaaggtccctaaaccgaagtgtatggtagaatatagacccataagtctatgcaatgttgtttataaaatagtggcaaaatgccttgcgggaaggatgaaaactagcctccatgaagccatctcggaggaacaaagtgcttttgtggggggtagactaatccaagacaatgcgataataggatttgaaagcctccactgcttgaagacaaaacgattcgaaaatggctctcaagcttgatatgtcaaaggcctacgatagagtggagtggagtttcttgattacaatgatgagaggccttggttatgaggagaagtggattgagaagataatgaaatgtgacaagtgtgtccttttcagttctaattaatggggagaaaattggaagattccaacctacccgaggtcttagacaaggtgactcgttatccccatatctttttttgatttgttcagagggtctttcctgccttatacatgaagccgagagggctggaaggatcaatggagttcaatttgggagaaatagagtcaaggtctcacacttattttttgccgatgatagctttgtgttcctagaagcaagggagaatgaatgtgacaatatgaaactaatgttgcaacgatatgccaggctgtcgggtcaacaaattaacctagaaaaatcgaaggtgtgtatgggaaagagaatttccactactcagggccatgctcttgctgctagacttggggtgcgtcttgtttctcatcatgctaaatatctggggctacctagtttcgtgagaagaaggaaaaaagaggtgtttgagattattaaagataaagtgtggaataaactaaaggggtggaaggcctcgatgttctcccaagcgggtcgggaaattctaatcaaagtcgtggtccaagcaatcccaagctatgccatgagctgcttccgtcttcccaaaaaacttattaaaaacctccataccatggcaaccaacttctggtggggcgacaaaagacaataagaaacttcattggagctcgtgggatcagctttgtaagccaaaggaggacggagggctaggcttccgtagtgtaaccgaataacaagcacttttggccaaacaagggtggcgtctcattcataatccccactccttgttggcccgggtcttgaaaaatagctatttcccacttcatctttcatgga

SEQ ID NO: 220827 - DNA, 2917 bp, Cannabis indica
catagtgagtaagacggtggtaaccaaacctgaaggagagaaagagatctaggcttagatcttgataatactctgcgataaaaaggaataagagttagagatctaagcggaaggagtcattatattccgctgcagctaatgtaaggttttctaaactcttatatgtttattttcattgttttagagatattcatatttaggatgttaattcaacatacttgttagtaaatctagatcctgaaaaaatattgccaacgtcaccatcatgtaatgagagctttactggcattttgacaggacttagcaccttccatgtgtaacctaactagaagatcaatgatatattttgtctgagagagatacataccagtgttatctgtgtaaatttcaacccctagaaagtaatgaacctatcctaaatctttaagagaaaaagacttgttgagatcagagataagctcggatatcattgaatgattggggtctgttaagtatatcatcaaaatataccagcaagattattagagatgaaccagagccaacaataaagagttaactattagcctttgaaccttgaaaaccccgtgagacaagagtttatctaagtttctcattccagacccttggagcctgtttaagaccatagatggccttgtttaacttgcaaacatgtgtaggatgtgtagtgtcttcagaccctggtggttgattcatgaatacagttttagataggttaccactgaggaaagccttcatgacatcaagctgtatgacatcccaggttcagatcttgatcatactttgcaatagaaaggatcaagggttaaagatctgaacgaaaggagtcatattattttactgacatcattgtaaagattacgtaatctctaatgtgtttatttatcgtttttaggaattttatatttaggatgttagattatagaattataataatcaacatacatgcatgttagtaaatttagatattggtaaaataagtttccaacaatttgtgcccatgaattgctgtttttcctctagaatggcatattacccctttttgatgaagatggattcgatgcaaaagtcggatctctgatcggacacttggaaggtgcccatattgatagattgtctacctgggcactaggtggttggggcccggggactcgagtgctcaaaaatcaacttgcttttattctaattttgatacctcaaatatgtctgtggtatgtctagctgatgtgccgatgcaatttttgaccattttgtactaagacgatcccgaaaactgaaaccttagttgaagatatcaacttgggcgattggtgaaaccctaggtgcccaggttggcttttgggttatagtttcgtgtaattttagctcccagggcttagatttgctccatgtcttcatggtataccatactaaaagatagtgagttgaattcaagttgttgaagcttgaactttcatcccagaaatcccagagtcaacttggacgcagggctagggtctcttcccaggtcgagtgctatgactcgggtctacttgatttcatgatgtcatccttcatgccacgtgtcaaacattgatgtccaaattactaagaaaaattttcaaattaacatcgactttatataaaattaataagaattaatatcaatatttctattaatatatacgatgatattcttaaagtttgggtatatattttgagattcataattggatctctgatttacatatatatatattgtgatattttaaaattaatctaattttgttctgattgtgtatgttgaaatccagtgagatagacgtataactttgtttaagctaagtaaatttgggttcttgaagctttctgcatatgtatattttatatatttatatttagcatcaattaaagactaatacaatgaccctattacacattgtcatcgaggcttacactatatttggtaaagaaggagggatgaataaaggaagagagaggagagatggattgagacttttccttcaaatacacaattttcaatccctaaaaaaaatatagaagaatttaagaaaaagacaaaaagtaaccatatgatttgtctattttacccttaaacattataattttattaataaaataataattttaaaatttactttactctccatctttctaacttactcatatatcaaacaacacaatagagaaccaactatcttctccatccttcctaccccccatcatcttttctaaactctccattctccctcattcctaccaaacatagccatattgtctgtaatcgagcactgctataatttgtatttttagtaacactctttagtgacctacacaaagtgtgcgggtcatgactaaatgttttagtcaacttttaggctatgtttggcaggagggagggatagtaggatggatggagaggttagagaggatggggagtaaaagggatagagatgattgttcacctcctttgtattgtttggtattaggggtgaggcgggaaggataaagaaaaatttaattagtaaaattacaaaattatcattttaaaaatattttttttttttaagggtagttattgtattttgcaaaatgtgttttgtctttttctacaatccttccaaatatggagggattaaattttcaaagtttggagggagaatgtctccctccatctctcctctccctccttctctccctcttgccaaacaagtgatttagtctctccttctatcactctccctccaccctctccatccacccatcttcccctcctaccaaaccatacgtgttagtgaccctcattggtggacataaaaattaaacattaatctccctatgataccaagatgctaaaaatcgaaagggttactaaagacttaactaattatttaaaaat

SEQ ID NO: 220828 - DNA, 1046 bp, Cannabis indica
tatatgatggatatataagacggggcaatagatgagtaaaggcgctttgagatatcatctctctattagctctctcgtttaaaataatcatattacgtgtactaattacttctatctatttgcatgtttattacgtgtgatatagctgttgttaaatatatataaatgtgtgtggtttggtttggtgtgttcttcttttttgatgaatttaattaatttgcatggtttgttattatttgaatgcaaaactgcgtactcatggtcaagcacgatgccaaacttgcaatcagtagtacgttttttcctttttgatgaataagatcagtatatccttttttttgttaatcagtagtacattttctttatgttgaattaatttttatagaaatttattcttggtttagttagagaagacaatagaacaataattatctccaaaacatatatactatatatatcacaataaatgtataaggttcgtgcctataagtaagtcattgttgatttaaaaattcaaatatgagtgtttaattttattttatttttggcttaaaaacagattattttttttttaaaaaaaaagttgagaattaatggaattcaaataaacatatattagggtaatatttttagaaaaatagggtcaataatttaaatagataaaacatgaccaaaaggtcattacatgatcatactgcaattgtcgcagtgaagttgcccatttggtaatattatgggcaacatcattaagaaaagatacatgagcccgagtagagctgaggcagtgttgttacaattatcaattatatgtttaccaataatttaccaagtatatatgtttaccaatttacgactatcaaacaatattcgctagtctcagtgacaattgatataattggtaggctgctggtgcaaaatagtttgagaatattctgcaaaacaactagaaaccagattaattaattaatgagattaattaggaagattacaggatgaatgacacatccactacaatggaagcatacaaaaccactccattagtatct

SEQ ID NO: 220829 - DNA, 1599 bp, Cannabis indica
gggagttcgggcttgaagtgattcaagaagtcagattcataaagtggattacaaaggattgcggcaatactttagagggagtctaaacttgtttaagtcaattgtctttgtaattttgatactttattaattgatttcattctctggcgtggccccgtggactaggagtgttcgggagaacactgataccacgtataaatctcttgtgtcaagttatttatttttctgcaaatattttatattctgcctgttctgttttgctgtagcagaattactttctgctgctgcaaacgattacagtttttatattttcttatatacaactgacatttgcaaaaacacggtttttcaagaatcaaaaagtttcaaaaagcttaaaaatcattaatgctagattcaaagaaagaaagatattttgaagaagagaagatgatgaaagtaaaaggcagacatggagagagaagatcaaaggtttgaaagtgcaacatccaaaaagtccaatactctgccaaacaaggctacttggtaaaagcttccgcaatcaagacaagagctaaaaagtctctatccaaatagacgttcgaatatggacttcgaagaaaatgttatcctaaatttattccacctggcgtggtatgtccacatagtcaaaagcagaagacacgtggagaatatctcatcactaactttccaagttagtgcgtatagccttcaacttgccaaggtactgcctgcaacctttcaacctgcctggttagtgcatatagccttcaacctgccaagttagtgcttgtagcccttcaacctaccatgttagtccgtaaaatcttcaacatgctaggtaagtgcctccaacccttcaacctaccaggttagtgtgtgcagcctgcaacctgctaggttagtgcgttcagcctacaacctgctaggttagtgtgtacaaccttcaacctaccaggtcagtgtttgcagtccttcaacctgccaggttggtgcgtgtagcctgcaacttgccaggttagtgcgttcaaccttcaacctgccaggttagtgcatacagccttcaacctgtcaggttagtacttgtaacctttcaacctggaaggttagtgcctacagcctttaacctggtaggttagtgcctgcagctttcaaccaggaagatcccatggctacacggtggacacaagcaaagacagatccacatacctgccaataaagtcctggctggccaggctggatagccctcatcaaggttgttcggcgcccaggctagacagccctcagcaaggttggctagccagaacttgcagataggtcctaacaagctcacctacaattacaggataagtctaacatcccatgaagatagggtcctatatttaatagatttaattatcttttttgtgatttaaatataagataaaaaatatattattttccctattttaaaggaatatctttgcctatttgaattaggatcttatgtaagtcctacactatataaagggcattagatcacataaaaaatggacttaggctaggccacacgcccaattcttctttctctctcaatccttatattctatctatgcctcc

SEQ ID NO: 220830 - DNA, 1686 bp, Cannabis indica
gcggtgtgggattgcacagcttacctgatatttccccttacgaatcatgggactaatgactgtcacagagttgcgaagagtacacacatcataaaaccatatgtcgtcaactagcaccacccaactttaacatgcacatgaccaatgcctatatttgataatccaagcattcttttcaaacatcggatcttgaattaacgacgtcattgtataacgcaaaatgatgatttaagattttgtttagtagttttagttaaggacatattaacgtacaacctagattactttatatttcttttgattttggattctaatttctataataaaatttgatgggatatgcttttggattatacaacttgtaggagggtactagaagcgagcttgaactaccactaatgtaagtgcgagtggattcattgctcacctgaaccctcttgctttaattaagtatttggggtcaagatcagagaggagctccgtattggcagtaggagaaaccataaatctaggctcttcaagacctcccttctcacttcagcaatttcgaagccaagtttgatatcgttcattatgttgcatctcttctgtttaataaaatggaagcaaaatagattggacatgataacacggctcgaaacctgtttaaaaataaacaatttagatttttcttaaattattatttttgggatgatatggctaactcgtttattaaacaaattatttttgagtgtgacgtaaataattctaaagtgacacaactatatataatatattatatttattacatgtaaattaaatagattaagttagttaaatgcatatatcataaatatattaaaagaatcataaacatgtgtgtcataaaaatattgtaaacatgttaaaattgtcataaaaaattattgagttgatgtaatttgttccaaattaaatattaaccatattataattaacagattatacagattgtgttatgtcaatccctttgcaagcatattgagtctgggttttaagttttaatacgattaataaatgagttaattttagattaataattctttttattacttataagtctcgacacaacacgaatatgatttgcgaaaataacttatcatattcttacctatgttttttcctctcaattgtgagcatatgatgcatgtgctaaagtttatgacgttcagcgtagtaactctattagctacagcactctcaacatctttccattagtaagatttaccttttttatattttactttaaattttacattaagctatatattaattttctttactaatactaaaacctcaataatattaatatatatacatatactcatatatacactataaaattaaagttaaaacctaaaataaatcgacaaaatatgtttaaactaatggatgataatctataaataaattaacttttaaagatatgctttaaaattaaaaagtaataagttaaacatttaggtggggtttggtaacatttttttaaatgtagttttctgtttttaaaaagtagaaaaagtgaaaaatattttctaaaaaacattatttataaaaactgttttttaactttttacatttttataaattagtaaaatcaaaaatttttaaaaaacccaaaaaaaatttaaactttctaaatatttttttaaactaagtttttttttc

SEQ ID NO: 220831 - DNA, 6185 bp, Cannabis indica
agcctcaacaatgagcatgttgccgctgaaaaattagctaatgtcgactcgttagataggcaaaaaaaataatagatgaaagaaattgaataacagagacaccacaatttatagtagttcactccccatgtcgcgatggtaatggagctacatttttatttctcatgagaattacaagaaaattgattaaggaaagagctcaaatttttagagagagatgctctcaccgatggtgacttagcagaatgtaaaaaaatgagcttgtggagctctccttttataggcaaagagatctattaaaatattaataaataatacaaaaaatataaaaaaaatatttcaaggctaatcttgaccattggtcaagatctaatggttaaaatgactttgggttataattgtaaatttttggagctcgaattctgttggatcacttttcaagctttttgtagataaaaatcgcccttgacttggggatgaattttcgactttaaatctttagaattgagatatgaaagtgagacatgcatagaaagatcttgaacagatataaacacaacttaaattgtgtcaatcgaattaatattgagtgggttatggtcgttaattgaaggttgttcaacaatcaacacccaggttgacatcctaatgttaacctagacattgtatgagtgaaaaaacgtgtcagacttgtattttttgatgtctaagtaatattttaacatcacttagtcaatttcttacttctggtaaagttgtttactagttctcaaagatgttgcttttccccgaaatagggtagacacgaaacttccatatttgcaactaatttgctgatattccactttgccaaaaaaggtaaattataaaagtaagattttcaattgtcacaagttgtagctctcatttactttgaaaaaaataattaaatgctcaagacggaactagaatcgaataaacagaacctaacgcactaggtcacatgccaacctaggcattgtgtgttcattaatgagcttcccagaacttgttctggtacttctatgtcatttcagattacaagcaaggtctcttactctgttttggaccaagataagaggaatgtccagagcaaaatttacttttgagtagtaaaaacatgcgaaccaagttaaatgtcagtctaggtgcaggcccaacaccagtgtcgaccgtgcgttgggtacatgttttggccatcaaaacatctcttttgcttcctcagaacacttgtatattcattattgatgaaaatggaaaaaattcttgggagactttctaggaagaatgcttggaaatgtcaatgaccctagcaccttatcaacctgagcgttgggtctttcaattggccaccagatggttctctttgtttcttgaaagcacccgtacttcatcaatgtattgaagaatagctaaagattgaggaatgggtttatgtgcatggataagaattgggactttcttgtggactgggttggacttgagaagcaaatcactttttggtctgtacttctatttaatgaactcacacttaacacgtttcaagcccaatctgagtcctcaaaacaaatggacttgtccatgtacctataagcttcaagttcacgcaactttccccccatttcatatcatttttgttttagagcattttgctaaaacttaattctaataatgatataaaatgtgtgtcaaatttagttcaagttaagaattgtattaaatttgacacaaaagataacatgactaaattttagctcacaaaaatcacattttttaattacctctttatcactcattaatactgttcactaatgaaaaaataattatgtaacaaaatattataattttgtttttggtgaccataacttttaaccttctctaacatacaatattactaaatttgtcaaaataattatttttttaatattaatttcttaaaccaattgtgataaataatgtaccttttatagtttctataatatatttttttttatgagtgttctagtagtttctataatatataaagtaaaaataaaatacttctgagaagtgattggttccaactacagctaatactttgattatcccagattcagaccaattaaaataattaaacaactactttaaccatcacatttgcaattcaatgtaaaaaaaattaaaaataatgaaactttacacatgatttataatattgaaagctcatcttttttttcttatttttttttttttgaaagtgatgaccatattcattgataaccacttcctagaacaaattgattcaacttaaagaggtagaaaccaaagacagctcaacactagttaaaaagtgatcaaaaaataggaaggtgatgaatggtgcagatcatgatagcaaacaacaatgaaatcctcccctaaagcattaaacttatgataagcctaaatacaatatatttaagatatttctaacatgccttacacaatcacctttaagtagcaacaaagtgaaaaactaaagaaaaaaaaataacttcatcttcctatgtagactcttctcctccagttgggatgggttctaatcaattttcacagatgagaacagatagtgaacaaagtagaaagacatgaggaaaccaatggtgcccgttgacaacatgattgcaaccgccattaaaagtgaatagccaagataaagtacagcggagacgggtccactcaaactctgcaggtcaaacaccaagtaattgatagagtacaagaatacataaagggcaactgaacctgatgcgaagaatgccttccaccaccaccgccaatcctctacgcagagatgcatgtaggtgaggaccaccgacacttcagcacagacgattaccagcaatagaagaactattagcaggaagccaaagacataatagaaccttccaagccagatgctggaaaggataaagaaaagttcaatgaagagggttccaaatggaagggtgccagcaccaagaacaaggagccatgatggatattttcgggcagggatttcccttggaatctgattggtcctcacaggaaaagaaattggttcagctcttgtcccaaggaatcctcccagaagggtaagtggaactgaaacgcaaaaccagagagcaaagagcacaaaatacaaggaaatgggaatagcaccagtactgttgttagcccaaagtatgaaattaagtactgttaggatagcaaatgcaattccggggaagaagcaagccacagaccaagagacagacctccatccttcagaggttcctttgagagttctccacatgcgcacaccaacataaccagcagatattcccaggaaaagataaagaataatcattccagtcaaaagcattcctcgtgaagctggtgacataaaaccaaaggctgcaaatacaattgtaacaactgccatccctgtaatttgaactccatccccaaccatcacacacagaagttttgagcattctggttctctgaaaacatctcccacaaccagcttccatccagatagctcctcattcatctgggcttgcgcttctttgtccaattcctcatactttgtcaagtctcttctcacagtccttagaaatatgacaaagacaataccagcaaggaaagttatgaccattagtgaattaagaatagaaaaccagtgcactcgggctccctccatcctcaaataagcatcccaccttgaaggccatcttgtttcactcttaacaaactctacctcataagtgaatgacactctttcttgttcccttattatttgagacttctcaagctccccagggcagcttatggctgagatgttgtcatacatgtgaagtttcaacatggcctccggatcatgtttgacgctgcaagggaacacctcaaaacctactatttcaaatccagaagccttctttttatcagcttcggaaataacacccataccttcctccccagttccaattatctccacaccactcccttcatactcatgaatcaggactttaaacttcaaatggttaataatgtaatcatcattgctgtttggtggagtgtacccaacagggaacccagtccactgaatgttaactccattttgctgggcatatctcatggcaggcaagttatccaagatcatattcacttgatacaaatcacgagttctctgtttcaaaagcttcacctcattctcattcaacgggctagtagtacagaggtatattgtctcatttgtgttcatccgaaatcggtaaggggaattatcaatctgatctcccataagaagttcaccaagattctcagcactcttctttataccacctctgggcttgcaataaggaaggctgtaatagctaaatggaagctcggtttcaatagatgttaaggaattaacttttgcatagatctcatcttgtttagagtacgtgtgcatgtagcttccagggagataaaacccattacaagcatgtgctaaaaaggccaacacaagcaaagcacgttggattgagggcgacctcatattcgataatcccatcgaaataaaacgaacgcccgccaagtgtttgagaaattgccccacttgtggatctatgctactctaatattcataaagccaaatatgcaatctacatcacaataaacacattttccaatgtcagcctctttaaactcaattaaggtattaccaaaatcataattaaaattcccaaatcataatgtgggcaaaggtattaccaatctacaacaagatctactaaatcaaaagcacaaatatgaaaccagatccaaaagtaaaaattgagaatgaagcccaacaaagcaagttaacttaccaacagaaataaaaggcaacaacacaatgcacatatatataaaaatatatacaaattcaagtgaaccacaaaaagagatctaaccaaaacccaccatgcaaatggatggatgttgcggcaacaacccatatacctaaatttcccaagtacaaagcgttaatttcaaatttgatatatataagatgagatcgtgagataaaatgagattaatatgtatacatatacacatatcaaaaatcaagaacccaaaccctaaataatggccacaccctgatctgtttcataaaaactaaaagcaaaccaaattaaaaatatctaaatcattaacagtgatcttgaaacaaacaaagacaaagttctcatagaaaaaacgataaaaactttggagattggagatggcttacagtgaggtgtcgttggttgccaacgaataaaggaaatggaattaagcttggtgttgtcgctgcctgccttccaagtatggctggctgggaaatggagagagttagattctgcgatagattgcggccgatgattggagaagacggtcgaccagatcagataaaaaaacgcaccttgttcttaagatgaagaaaatagaaaacgcatctgaagttgagatggagatggaggcaaaaccagatcagatctgaagggttccgttaggagtgaaatggaagcaaaggagggtaggagagtggaagaagaagaagaagaaaggttggatttggatctcctttgatgggattggattgggagtcacagagaaggtgagacaactttcgttggtttaaatatggggttcaaagttgtttccaaaaataaaaaataaagcatattattttatagttatttatttcaatcagtgttagtcaccacactatcaaatatttttaattatttaatttgattatttaatatacggaaattattttatttttaattttttatttaatttacagtttaggtttcctctaatagtttttatgtggacttttatatgaatttaagttgcttttgtgcgtgaaattttataaaaatatatatataaaaaactattttaaagtgtaaaataaaaataaaattatttattatattatcatatacaatattataatatatataaataatgaataatcacataatatatcgtattttctttaaattatacttatatgtttaaagatttttttttttacatttttaaaattttttataaaaatagtacgaaaacattaagaaaattacataaaaataatatctaaataacatcaaataagaaaaaaaataacatggaaataacaaaaaaacaacatcaaattaacaagagta

SEQ ID NO: 220832 - DNA, 2969 bp, Cannabis indica
ataatgtatataccgcataaaatattataaatatatgaaaaagagtattataaaaatgatcatgcaataaaatcatataatcaatgtataatatatataaacatattaaatgaaatatatatacaaataatcgtgattattaaaatatgaaagtatatatataaaacatataaatgaagaacaccgtatacatatatatatgaaaaaaaattcaaaataaaaataaggtagagataaaaaccgctctgataccaactattagactataatataatatgaacaagaaaacatttataaacaatatgtaatgtagaataaactgtaaatatatcaaaattgtatatgtaatgaaaggatcaaaatagctccagccattgatatttgaacttcaatccctgcgatagcttcggtatgggaaattgagcttcttcgctctctcaactctctttagatagaattttgatgaatagaatagaatgagtgaagagctaggggactgagaccctatatttataggtgagatactccatcagtacctacgccacattaattgtcagaatatattgacaattaattgaggaaatcaaatcgggtaatgaatattgaaatctgaccatatatagaatattacgtaattaattttgtctgaattcaataaaaattagatattcatttatcataaaatcaattctttattttatttcataattaaaaatattccaatattcattaagatgtaaataagaaaagaattgctaaggggcattgccaagcactctaagaagccacatgagaatgcgttggaaccataaggtccctaatacactaataacaatgttcaaataaaaaatagtaagagcatttgtgatgatgttagacactattattcaataatgagcaagcttggtgaaaattgttatgtagtatgtcttaattttttttttccttaaatgtttacttgaaatgatttagactatatatattgggtgaaaactaaactcagctaatagcttttaaataatctctaaaaattattgtacatgttataattcgttgaattttttttttttttggaaaggtcaattatcagcccaatacttatattttagggacatggtagtgcaattgagagggagcgctaatcctcaatatgaaatctatagcttctataactattaaaagtaaaatgatgatttcgttcgagcttggcttaacgcgacaaacgatggagtgctcatttcagtaattatattagtttactgaaatattatttataagtagttaagtattttaaggataaattacaatttatccctactcaatgtagattatatatagagaatctttgattatttggattgaaacaattgataatttatagtgtatctattcttggtaaatagaacattttatgtaaccaggagttcaattccaaatttatagtggagttagaagaaattaataagttagaaaattcacttggtaaattttgaatttacttattgggagcttggttacatacctatggtccccgcactaactgggataaatatattttgtagtttcaattaattaatttatttaatcaattagaattctaaataaatactttatcttatttgtgaattttatcaaggaagggcacaattgagaagaaaagggagttcaaggtttatttattaattaagagacattggaaggtctaattagtaaatatatttaaatagtaattttatttataaattattaaaaatgtagaattaatatttaaataactagagcagaaaaaaatattattgagaaaagataaatttgtttctttaaggaagcaaaataatgacaaaattctaactcatggaattcataagggatttggcgataagggcccatctaaattcattggatctttctaatcagcccatttagctcttactctaagcctaacgaatctttataaatcgcataaaaatgaaacctattattttctagatgatgatgactctagactctcttttgtctgacaaatcgaaaaaaagaaacatattattttctatcattatttacgaattcctcttaagattttttcatagaaatttgtgctccttggtttgagaataagcccacacatgtcaaagcaatacctagcatagtgaggaagattgtatagttcaactgtcaactgaaggagatccaagttctaatcctgatcatactctacaatagaaaggatcaagggctagagatctgaaaagaatgagtcattatattccgttgccaccaatgtaaggctttctataacattatatgtttttatttccttgttttaggaaattcaaatttaggattttagattatagattataatcaaacatacatgttagtaaatctagatcctggtaaaatacgttctaacagacagtggtacatgcgatttgatagcttcatcagagaacaaaagtacacccccagacaatatgaccattatgtatacttttggaaaatctaagatggtaccttcatttatttgctcttatatgttgatgatatgttaattgcatctaagagcaaggtggagattttcaggctaaaaaatcattaagtaatttaaatgaaagatcttggagaagctaagaaaattcttgcgattgagatcacaagaaaattagttgcaagtaaagtctgtctgacacagactcagtatctgaagaaagtattgcaaaggtttgacatgaatgagaagactaaacctatcagtacatcacttgcacctcattttaagttgagtgcaaagatgtcacctagcaccgccaatgagaagaagcaaatggagtgtattccatatgcaaatgttgttggtgccttaatgtatgcaatggtatgcatacgacctgatatttcgcatgctgtcaatatggtaagtgttgggttttatgccctaaataaaactctttacaatctgattagttatc

SEQ ID NO: 220833 - DNA, 2835 bp, Cannabis indica
gaaggggtggattttcatgagattttttcaccagtagtgaagcacacttcaattagaatgattctagcaatggtagcaattcaggatcttgaacttgagcaaatggatgttaaaacagcctttttgcatggagaattagaagaggagatattcatgagacaaccagagggctttgaggttgagggaaaagaagatcatgtgtgtttgcttaagaaatctctatatggacttaagcaatcaccaagacaatggtataagaggtttgatgagtatatggtcaaatcgggtttcaaaaggtgtgcatatgatagctgtgtttacatcaagagttctaaggtaaagtcaaatgtttacctattactctatgttgatgacatgttaattgcaggcaaatacatggaggatatcaacaaggtaaaagagatgctatgcactgaatttgagatgaaaaatcttgggccagccaagaaaattctgggaatagaaatctgtagagacagaaataaaagagaattgattctatctcagacagggtacatctcaaagctattaactaggtttggtttccaagatgccaaacctgttagcacaccaatagctcaacatttcaagctatctaacatgcaagcacccacaacagatgatgaaatcaagtatatggagaaggtgccatacacaaacttggttggaagcatcatgtatgttatgatttgcaccaggccagacttgtgctatgccatgagcatggttagtagatttatgcaaaatccagggattgagcattggaaagcagttaagtggatgatgaggtatttgaaggggacatccactctgggaatgagatatcattcagggtctgaaactccagagatcacagggtatgttgactcggattatgctggtgattcagacaccagaaggtcccaaacaggctatgtgttttgcctaaatggctgcacaattagttggaaggctaacttgcagaccattgtggctctctcaacaacagaggctcagtacatagcctgcactgaagctgttaaagaagctttgtggctaaagggaatggccacagattttggtttaactcaaagacagatacatgtgcacagtgacagtcaaagtgcattgcacttaagcagaaatcagatgtttcacgaacgtaacaagcacattgatgtgaggttacatttcaatagagaggtgattgcagatgggaagatcaaattagacaagattgccacagctatatcacaaaataactaaatttagagaccgggaggtaagccaggtaccaaactttagacacatttaaagataaagcaacacaagtaaaaaaaatgagctataacattatgagaccgattagagagaaacaaatatccatgaaagaaagagatttcttctaatatcatgcacaatgatactaaactcagaagactgcttatcattaattactaaaaataacttgcactaactgaagacaatcagagaacaccaaaacttgcctaaccaagttgtaaacaaagaagaagggccatgcaacaaagccacagctacgagtgttaaggggtcaggtcggatctgatccgcctatgatctaacctgatccagatcatgtaaggatctgccccgtctcgccctgccccgctagatcaaatacccaaatcggacagatctgacccaacttattcagatcaagagtgctacttgtgttctttaagttgttagtcaaagcctaccatttggttcgggtcacttgtgttctttaagagtgggagcgctaattatagatatggaatctatagcttccatctggacatagaagtgaaatgatgacttccttcgagcttggcttaatagagataaatggaagagctcttatttcagtaattatattagtttattgaaatatcatttatagaaagctaagtgttttaaggataaaatacattaaggggtgaaatggtgaatttgtctctactcggtgtaaatcatctatagatcggatctttgattattggaattagaatgatggttaaattttcatagcgtatctatatcatggaaaatatagagcgttctatataattgagagtatgattccaaatctatggtacaaggaggaattaataagttagggaatttacttagtaaattctacatctgcttattagaagctcgattatataggcccatagtcccagcccatactagttgagacaatactgcttgtatgactcagttaattgattttaaattaatcaattataattctaaaattagactatgtcttatttatgaattttaattgtgaagaaaagagattctagggtttattttttaattaggagactttattaagtttaattaataaatatattaaatggcaattttaagtggttgaattggaaaatacggcgtttgtgaaagaatgggataaaaagttaaaaaatggcaaaattgaaagtggtgggcccacatcccatggtcggccactagtgcttaattttaccatttatttatcaattttttaatgccaaataattcgaacctaaacctagaaggattcctattaatagatagtgatagactcaaaactgacagttgatgaagtttacgcattcactagccttcagttaaatttgagccttctcttcttctctctatttcgaatccttccctctctctttctcttcaatatttgaactcttatagtgatagagtacatacccacacatagcaagctggtactcaatcatagtgtgtaagactatgaagaagccaatcaattgaaggagaatcgggctcaaataatcttggtgatactctgct

SEQ ID NO: 220834 - DNA, 1768 bp, Cannabis indica
cataatatataataatatagttctattaagcatgtaattaattaatttcatccttttaccttctcgggtcataattaccaaaatgcccctggctcaccaacggggtcttaacatattaaaattcatattaattcacatataatgaactatataataatataattcttcaattattcataattatctaattagggttttgctaatccatttcttaattccagggtattacaccatttgtcaacttgggcactaagtagccattcccgagctctcgggatctcattttaatacttttaaggcttctaaacttgaggatgggatctcttccttgtttttgaccattttggattcaatggtcgcatcagatttgacatttgagtaattaatgacagcgtcccaagctgattgtcagcctggccacagggcccaacaccaagttaacctgggctgggccctgtttcttggggcttaggattgtggttttcttcttgagcttgcttgaatctttattatttctgatgatggagaaaatgtatggaacactttttgttgaacttgatttaaaacagcccatgttgacaatatatcaacctgggcgctaggcccaattccaggtgtcaacctgggccctgggacccaaattttcccattcaaaaattctatttggtccccataaatagttgaatctcaatattttctgaaggcagagaagatgctaaaagaattcttaaaaaactccattttaaatggcctaggttgatagaatgtcaacataggcgcatggccagccccaagtgtcaaccagggcactgggtcctattatttgtgcctaggagttgatgtttttcctttagaacgatctatttccttattgttgatgaagacaaatttgatgcaaaagttggatctctgattggacacttggaaggtgcctaatgtcaacctgggcgctggggtgctaggggcctcgaggcctcaagtgctcaaaaatcaacttgctctaattttgattctgatgcctcaaatatgttcgtggtatgtctaattgatgtaccaaattaatttttactattttacactaagacggtcttagaaattgaaatactagttgaggatgtcaacctgggtgccaggtgaaaccctaggtgaccaggttggcttttggattgcacttttgtgtaatttcagctcctggaccttggattaggttgctccatgttttcatggtacataatactgaaagatagtaagttggattcaagttattaaagactgaacttctattatggagttcccaaagtcaacctaggcgtagggctagggaccccctcccaagtcgacctgctatgactcgggactacacaactctgagatgtcatctttcttgccacgtgtcaaacatttatgtccacatcatcagagctactcttagtgtaaacatttccccccaggtcaactttacatttgtgtgaggttgacttaataacgtgaactaagcccgttcctctcaaaactaccaggtgggcatcgattttgacaattttggacaattatttctattcttcaagaatttccactaagagtatgtttttgaatccccattgcatgttgaattgtaatattccaggattagtaaatagattagcaaccctaattaaaatggattaatagttcttgagtaattatattattatataattaattatgtgtgtttatcgtagtttttcagtagctaaatatttttagagcttaggaaagtaaagataga

SEQ ID NO: 220835 - DNA, 2832 bp, Cannabis indica
atgagagcaactgaccaaccccactggatagaaaagaatgctcaagccccaaggctaggccgatcgatcaatttgcggggcagagtcacatgaagcgatggaccatgtactcaggtacaagagcctaacgtttgaggatggataaaccaccctaaaaattctgttaaccatagcattcctatggagaatttggacccggaagatgcatgtcaacaatggacctcaaggattgctggaatgcaaaacaggaaaaagcgaagggtgagaaagtaaggcctcgtggaggccatttaaggaactacattaatgacagaattcatgaacgtgagctcccagatgaacacactagaaaattagaggatcaaatagtcgatctaacaaaaatcatgtaatgtttggtctgaaaacaaagtggagttgtatttgactaggaagatgaggatccagatccatgcgtaagaagagttatagaggctcagttgcgaaaaaattttagaatgccacaaatagaatcatacgagggtaagatggatcctagggcccacctgcccaagtacaacaagttgctgcaagtgacgcaagcaagtgatgattggaagtgtttgtgcttctctttaactttttctagaattcatagaggacaggtggaataagttgccattcactctatccaaaactggaaggatctacaatccatgtttcagaagaaatttaagaatgctaaagatttttacatggaggtcagttcattgatcaacatcaatcaacaacctgaatagagcctcaagaactacgtcgaacggatgattggagcagtcgtgaagaccgaaatcaatgatggcatgaaattggtgaccctacattcagggatatcagttagatccctactttggttagaaatgcaaagaaagaggtccaacactttgtccgatttcttgaccagagctcaaggtttcattaatttagaatatgctaacacacaagctccaacaaccttagataatgtcagtaattcaggtttttcacaacagcttccagctccatcgattgtgccacttgagacccagtacaagcacctatcgtctacggacaagctgccttaaggtacgagcccacacatgtggttttttttccagttttggagcgacacaaactggatgcagcgtcattcttgaacataacaaacgaatcaacaaatggaagtttcagaatcaagcataagccggtcgcagagtaagagaatagaaaagagtcagagccaaggtgaagctcaaaaaaaggacaaaaagcatatgatgcccaatatacgtagtacatcaacttgatcgacactcgtgagaatgtctataaggctacttgcaatacgggtcattacaggaagcctccttcgatgtacaagggaggcaagcataggagagatcccaacaagatgtgcgagtaccacagtgatattgggcatactaccaacgagtgtgataattttttgccgaagacttcttcatgtatattgaagaaaatttgttccacaagcctaaatctttctcctcatttgagtcttctctcaatatctcatcacttatactcaataaaattgcactatgtactttggtttcaatctcatacctcttctttttgttttcaatggctttgaaagctttctcatccaaggcttctaaaataccttgatggaccaacaatgctttcatcttgattatccaaaggacaaaatcattgactccattaaacttgtatactttgaattttgagctagacattcaaactcttcttgatgagttcttcgaagaacacctttgattcttgaaatgttaagaactttctcctcagctctgatactaattgtggagtctcaaactcctaattacaagaaccaaaccaaacacaaagaacaataacaaaactaatcaatgaatgataaaacataaactagaaataaaattcgaacataagcatagatttgaacacaaagtttacatagtcgggctacacaatagggatgatcataagctttatccacaggagaaagtaaccttaaataacttttcgtttgtatctttattaatgccagaatagatgttacaaaaaagagacaaagtccttgactcaatggagacttgctccttacacaaaacctcacttgagacctttcaatcaaacacatgagaatgtctatttacaaccctccagctcatactttctctttcttaatttctcaactgaacacaatgtatgtgactactatttatagtgtttgcacagaatacactaaacaactaagggcatacttaactgtcaaatagttaagttagttgaggtgtagcacaattgttaaaacagttgataaaactagttgtttgtcacatgaaagtgtctcttagcatttttctataataatagttgcacttaagtacaaatatagttaaatattgaagaaatatgggtacttccatgcaaattttaacacagcttgtaagtttaccgtaaaaaaaaaatactattataaaagtaattttgtctcaaataccccaaagttgtaaatccccgagttactttggtgagataggaatatgcccgagttactttgggtactgaagaaatgcaatatggcaatacaaacataatctctcctacttcctagcacccagcagagacttgacaagggaactagagactggagagatagagaaaaagtaaatatgtatatgtattaaaatattaaatatatcgacgttattgtttacacaacccactttcttgttttgtttaatgaggtgtatgttagactttttatttgggcttacattaagttttatt

SEQ ID NO: 220836 - DNA, 2297 bp, Cannabis indica
accgtccctagttaaaattgatagttactttatgtaatagtaatagttacttaattacaatttacaacaactcaagttaaaatatggatttccagtgtcaaagtttatttaatttaataattgaaactttcaactttatttaatacaataatgataataataatgcacttgacaataattatgcaaataataaccttaacctaaatgttgctttttttccacatattataacctcaattaaatttcatttggctgcgagctaaaatatatttatatatgctaattgatatttttattcttaaattttgacatgtatattatgactcttaaacttttaaggtttttaacaatctctttcaaattattaaaattgttgaattaaagaattttgtctaattttaataaaaaaaatgtaacataaataaaaatttaatatttaatatatatcaaaatttaagggacatagtttgatagatattaaaatttaggcataatttagtacaaataaaaattgaatgcaatcaaataaatttttttaaattttaataattttaataataaagaatttttaaaggctaagaaaaaattaaataacattatttgatacataataaagtataggggtcaaaatatgcattatttattttatctataaaaaaaaggaagtggtgggtcatcactattctattaccgtcaatacaataatatataaaaaggacgagtcttacttatatatttttttagaacaagactcttatttatatttttgtatatgtaatgtccataagcataacctaaccttgtcggtttaatcataaatgtatgtacatgcaaattagataggattacttttacttgcattgaaatttctttctcagacaaacgacgacgctgaaattttcattaatttcttcgcattccgtattggcggctttctctatatagttccccttttcccctttgttccttttcaactttgttttcgaaattcgtaacctttcgtagtttgatttagtttgaacttttatgtttgtttgttcgttcttgcttccttccatgttttttctcaactactgtttttactgctttctctttccaattcaaaacattaaatatttaaaaattcaatatcgaacaatacaataccatcactttcttcctctcttctttttccttttagtagttgaatcactcttccacttccccactctttcttaaaccccctttcgttctccttctcctacaacccattttctctctatttctgtctctccaaatggggtttgtgttctgtaccaataaaattattgctgtttttgttttcggatttctcgttttggatgctttcttctctggatttggatccaacgctcaacttttgcccgaagatgaaggtacgctttcggtttttctcgccttaaaattttccgagatttggattttaatattttagtgacttctcaataatcatagtgatgacgtgtcacttgtaggattaatattattctgtttgggctgagtaaatgttggccaaaactgtcatagaattgctgtcattcaaattatttaattaatttattatttattattttttttattatcggttcgttcttagttttcaaacagaagtaatttgaatattgttgacaaattaagtgttctcagaatcgaatacctcgccatgaattcttcacacacctttttcaatcatttcattaattaaattgaaaaaaattgtgtttcttgggagtaattttaagtcaacactaaggctattgagttttgtattattgcccttaaacttttcagtttaaaaataattcatcaactattcatatttgtataaaataataacatgattgttagtgacatgtaaacgttaaggtgacgttgggttggagataatgaaatctaaaagaaacaattttcattttggttgcattttaaagtattggtggagtgactactccatttaaaaaaaggaatgaacattccaatgtaacaagaaaaaaaatttaattatttttttattaatttttttttatgcattttaaattttattccattcttattcccattcctatattttcattcctcccaaccaacttagtgtaattattttttttaattaattttacattattttttaattcattaattgatttttaatttaataatttttataaaatgtaaattttttattttaaatattaaattatacgctgatacaataattaactaagcaattgtattattattttatttgctacttcttaaaatttggcagaagtaccaat

SEQ ID NO: 220837 - DNA, 1248 bp, Cannabis indica
aacgagtgtggaatcgaacctctacctcgcctgagcaacccaatctccgcctaaacaactaaggctccacctgaacaactcgagtttcgcctgaggaaaaatcgcaccatcagcttcgctgaaatcgaaccactagctccgttggagaaggaaattgaactcctaactccacctgagaagcaaatctcaccttaaatccgtctgagaaggaaatgacattatagtgaaaggagattgagtgatgattaagttttacaatatctgggaaaaaaataaaaaaaaaatgaaaaaaaaaactgcataataatttaaaataaatatataccataagtagctaaaaataaaatttatccatatatgtctaaacatttattaaaatttcttagtacaagtaattttctcttaaatctaaaaaaatatcataagagagtggtaaatttataagtgttatatttttgtaatttttttttaatcaaattccataattcatgttttttttttactattattaattcatttgtattcaaagaaaagaaaatattggcatttgaattcttctttttcatatttgatgtttgtaattaaattacatataaaacagattcacccttctttatactttaaagaagcatttcaacggaaggaatagggttctcggctgatgcctcggttgactgtgttgtggccgggagaaatgtttctggaagaggtaagattgatggagataagatgaccagcgggcatagagataaagagcagtcgaggcgctcattccaccgttgtctcttggttagtcttcagaggaagttttcttttcctatattttaattattattattagtttctatttctctgtgactgaatttctaggaagagatgatgttctacaaagttgtttccggaaaaaagttaaaagagttacattttccgatgacgagggtggtagcggaataaccagagacatgatttgggttgttttggtttaagctttattagtttttatggtaatttatatattataattattacatttattattttcatgtatatatttattacatttattattatagttatataattatataattttatataattttgacttttgttattaatagtatcttttcttgattttttcctatatgtttagcggtaaagtttgattcttttcatttattaaatcagaactttctaaatttcttttttaatattttattttaatgaattttattattattattatta

SEQ ID NO: 220838 - DNA, 3160 bp, Cannabis indica
tcattgagagctgaagaaagtagtgagaccatctggagattacgctcaagtaatcatggtactcacccaaacaaattctggtcttcattttacttgtcctagcaacaaagtagggaacaccgatgacccacacgaggcgaccattcgctagaaaggtcaccatgatgaagattggaatcaagatgatccaataatcaaagatgcagaatctagaggaagtagttcttgtgatgctatagacaattctcaggatactctcgaggacatacttgaagacaatcctcaaaacaacgccgctgatagtaatgttggaaaaaagaatcaacttgatgagtcaaaccctgtggtcataattgctaaacaacttcaactggtagaaagcaaattaactcatcaagatcagtttaacgagatatttctcacaaagatgaccaggatggaggtcgtgatgaccgccctaaccaaagggactcttgatgatgtataagcttctccaatagttgatgctcctaggagtgtagatttgaaagatcctgaacctcaggtcttcgcaaagacaaagggaaagagatagtcgttgaaaatccaaagaagactccttctacaaacaacataaaaactctaaatctgtcgaccaacctcaacaaaagatgaaaggaaaccatgcttcagggcatggtgaccaaactaattctagaggcagagtcacacaaaaaagtgagactgatgccgaagttcggaagccaaagtcgcggaaggagaagcatcatctcagtgattttagtaatcacgatgatgatgttgatgacgtatatctagtatcagatgacagcaatggaagtctctccacgattgatattcgaagagattgaatgagaaaaaagaagagccaatgcataaaaaccaaacccgtgggaacaatctaagagaccatatcaacgatcgtgattgcggaagagaatcttcaagtgacaagactcaaacatctggaacgtaaagttagaggagttgatgaaaatcactgaaaagatctataggtaaaataatttccaacatgtcagactttgaggaagaagatgcggatccttgtgtgaaaagaatcatagaaatgccactatcgaagcattttaaaatgccacagatggaactgtacgaaggaaggacggaccccagcgaccacctgtctaagtacaatcacattatgcaagttgccaaggccagtgatggcacaaaatgtttatgcctttcactaacactaagcaaattcgcagaggactggtggaagatattgtctctgggattgatccacaattggagagatttgcaagcaatgtttaaaaagcagtttgtagcagcaaaagaacttcgacctggaagctagttcactgactagagtcaagcaacaaccaggagaaagcctgaagaaatacatgcaatgcatgatggatgtaactgctaaaactaaggtcactaatgacaagaaaatggtggccttaacatccagacttgcaactagatctttgctgtggggagaccttcaacgcaaaagagcaaatactctaactgatttcttggcaagagctcaaggatttataaatttagaaggagcttatactcaagcatatagagtactcccagcatattccaccgatataccaaatgcccaaactttgcagttgatgactgcatctatttacccttcaccaactacttttacaactcctacggtttgtggaccaaatacttccgtacagccagctgcacagagctacacaaactggatatagtgacgctcctagacaaacaaactaaaaagatgaagttccagagtccaatataacccaatcacagagtaaatggcgttcaaagggtccaaatcgaagtgattctgcagagaagggaaagagccaagagtcaagatactctaagtatacaagtcttatagatacttcagagaatgtgtataaggcaagttcattacaagaagtctccgtcaatgtacaagggccgaagacaaaaaagagatccaaacaagaagtgcaaatatcacggtgatatttgacacaccacaaatgaatgtgactatctaacgaataaaattgaaggacttgtgcgaaatgggcatttgtccaattaggtaagcatttagtcatctatcatggacatgcagttgcacatggacaactttttattctgggacaacatggagccattaatcctcctcagggagtaggccatccataggcttctagaatacaagctctaaatgtgcaagcccttcacgaggcacaaaatgctctagcagcagcattagttgtagccctcggtcctggaaattcgtaccctctaagagcttctctaccagctttggatggtcatgttgcaaccatttctggtggacttcacattgcaggaagcacccaaaatgcgcaaaaaaagtacttgaatgaattgaactaaaaggaagcttgccaccttgtacaattgcctgctcaacgttcaagattgatgaatttgccaatgacattcacagaagatatgccaggcatgtacattttcctcacaatgaccctctagtgatagaggctcagatagcaaacaaaagagtttccaaaattcttgtagataatggaagctctgtgaatatcattttcaaaggagccttcaaagccattggtctggtggaagccaatctgctatcgtgtccaattcaaattcaaggcttcaatggagacacgctgatccccatgggaaaaatataacttctgatgataataaacggggaagtttccaaaagtaatacaatgtcttctttcaagtacaatacatacgtaatagttgattgccctacttcttacaacgccattctgggacgacaatttctgatagattttggggtagtagtattctgattgccctacataatattcttcagagcactacgtatcttacgaagaatttcatctccttgacttgtttgttcaagtaccttgcaactttttgctggaagacatgccactttaagttagcttagtctcttctttcttcccttttatcaatggattttgctagcaatatgtggtgttataatagacaaaaagtatgagagtagactattggcaggtcaggccgaccaagttacagactaggtggctggcca

SEQ ID NO: 220839 - DNA, 1777 bp, Cannabis indica
attattgtgagctaagctttcgacctattgtactttgttcttgttgcttctatgagtttttactagttcctagtttctaccttcttgttagcttgttaagcttctacatggtatcagaagtcttccatggagtcgtcgattccatctcccgatcctactccttcaactgtcacagctcctacaccgaacatgtctacacaatcttccaatactgactcctctgtttggaatccattttctaattcactgtctacatctctcacgatcaaactggatcatgctaacttccttccttggaagtctgaggttgttaccattgtcattggacatgatcttgatgaaattctctttagtggcatccctcctcctcaaatcttgatcgatggcaaacccaatcatgtctatcaatagtggaagaaacgtgatcaactgcttctttcatggcttcgatcctccatgactgaaggtgttgctaatcatcacacctcctctgctgtctggtgtgccttggaacagagatttgtgagtcaatctcgtgctaggttgcttcatctgaaaggttagttctctaatgttcacaaaggcaatctctcaatatatgattatgtggataaggtccaatgtcttgctgattccttggccattgttggttctaacattagtgatcaagatgttgttcttcagatcttgaatggcttaggtgctgaatttgatcccgtagtttctagaaatcacttcaaaaagtgattctttgtctcttgatgaggttcaggctcttctcatgtctcatgagagtagactggagcatcatagtacaatgacaaatattttcatgaagctccaagccaatcttgctcttggtaacaatcgaaccaatccatgccgatatattctcccatctactcgaggaaataccaatgactcatctttaagaactattggtaaaggttgtcctcgtggttcttttatttttcggaatcgtctgatgtgtcaactgtgcctcaaaagtggacacactgctgctatgtgtcactaccgttttgacaaaaactttgttccaccaaaatctagtgttgttccacctcgtgcctattttactgaaatggaaatggacagtgaatatcaagtatataactcaactattttacctgaccttggtgatgataatctttggtttgtggatacaggaccaaatgttcatgtgaccaatggatctgaatctcttgaatctccctctccctacactggaatttaatccttggatgttggtgatggtaagaaattacttatcactcacatagggtcaactattctatctcccaatactccacaccctttacatttgaattatgttcttaatgttcccgccattaaaaagaatttagttagcgtatctaaactaataaatgataataatgtgtatcttgaatttcacaaaaattgttgttttgtcaagaacaaactcataggagctattcttctcaagggaccagttaaagatggcctatatgtgcttggtgaatctagtcattcttcccctacattacaatgtaatcttaccacagtgtctcaattgaattgtattcaaaatgttcctagccatgctacctgttgtaatatttctactgatcactcagtagattcttatactttttcgaacattgataaagaaaatgattttgcatattcttcaatttattttttcattgcattgtctactactttaaatcaagatgttaatgtttggaatcaataattaggccatccatcttctgca

SEQ ID NO: 220840 - DNA, 2186 bp, Cannabis indica
attattccatgtgggacattgtccacaataagatcactaagaagataagagatccaattgagttcggcggcagcattcgccactgatctatactcagcttctgtggatgatcgagcaacagtcttttgtttattagaactccatgagatgggattacgaccaagatagatgatataagcactagtggaagaaaaatcatctttatttcctgcctaatcagcatcagaaaaagcatgaagacttgtgggagattgatgatatagttggagaccgtcattgatagttccacaaagataccgcaataaacgcttagcaaagttccaatgatcagtagttgggctatgcatttattgagataatttattgacagcatatgctagatcaggccttgtgagcagaaggtattgaaggctcccaacaatcgtccgaaattctgtaggatctgtcaatggagtgccagagtgtaatgtgagcgatggacttgtgggaagaggagtgagcaccggcttggcttctgtcatatgagttcgttgcaatatatccataatgtaacgcctttgcgatagcaaaataccatgtttatttggaataacttcaactcctaagaagtaggacaactgaccaagatctttgactgaaaaacgaagagccaaggtactaacaaaagagtcaattaattgaggactatcaccagtaatgattaaatcatcaacatagacaagtagatatgtgtcggcatgtgaatttttgaatccggattccaacagaaaagtacgaagttcatggtaccaagcacgaggagcttgcttaaggccataaattgctttgcgtagcttgcagacataggatggatgatcttgatcaacaaaaccaggtggttgttgcatgaacacatcttccgtgagatgaccctgaagaaatgtgttattaacatccagttggcgtaaactccaattttgtgagacagcaagactaagaacaacacgtattgttgtgggtttgacaactggactaaaagtttcaacataatcaattccagggcgttgatgaaaaccttttgccaccaagcgtgccttgtacctgtcaatagagccatcagaattacgtttaattcgaaaaacccatttacacccaactacattttgattagattcaggaggaacaagaacccatgtgccattgtgtactaatgcatcacattcagaagacatagcctgtcgccatttaggattagcaagtgctttagtcattgatgttggttcgagatcctcggttgtggtaagttgagtgtgcaagttcattttcttgatgggtttgtgaacattattttttgatcgggtggtcatggagtgagagggaataggattggggtgagatggtggtggtggtgagggtgagttggtgataggcaggtttggtggtggtggtggtgagttggtgattggcgggttaggtggtggtgatggtgatggttcaactgtcggagaatgtgttggagttgcacatgaggtttgctgtgagatttcaacttgagatggcattgtgagtggcggttgaggagttggtgacataacctgaataggtggaggtatccatgtgtcaatggagagagggggagaacaagtggtttgactagacaactttgcaaatggaaattgagactctacaaattttacatgcctagaaacatagattcttgagtttgttggatctaagcaatagtaagcactttgagtaagtgagtagcctagaaaaacacaaggtttggatcttgattctagtttatgagatgtgtaggggcgaagccaaggatagcatagacaaccaaaagtttttaactttaagtaatttggtgttgtatgaaagatcttttgaaatggggagataagattcaaggtgggtgttggcattcgatttatgaggtatacagcagcggcaaatgcataaggccaataagagtgtggcaaggaagcatgggtgagtaatgcaagtccagtttcaacaatgtgaagatgtcttctttcagagtatccattgtgttctggagtgtggggaggagtggtgaagtgtgaaatgccagaggtggacagaaaagtagctaaaccaaggtactcaccaccattgtctgaatatagaattttaatggctaattgaaaatatttttctgtaattgctttgaatcttat

SEQ ID NO: 220841 - DNA, 1729 bp, Cannabis indica
gggcataaaacccaacagagtcatcgaagaaaaaataagaactagcaacaaaataaaatcatgttacacagacaagactaaaacactcaaaactatgtcacagatacaagactaaaacattaaaaatcatgtttcaaagataagactaaaacactcaaaactatttcacagagataagactaatcacagtagcaaaaatcgaatcgcaatagcaaaacacaatcccgacctaacacacctatgttaagggaaggttgcgaacatggccagagaaaaaagataaccttatgtagctctaaatttaaaaaccctaatttttttaatttatttgatgttaccgttgttattactatatgtcataatagtgagttagcatgaaaatttaatatatgtttaatcatgaatacaaataaaatataaaaataagtgtgtatgttctattatatgtatatatctatatatacatataataatattgaaatataataattgtaataccctaaactaaaaacataacaatatgaaatatgattattttcagtcgttttcttagtctctcaaggcaataatttttatgaacaatccaagttaataatagaagaacacaaatttctatttactctctcaacacaactgaattatttttatctacaattaaggtggaggatagagaagaaatcatagaaccaaagtgaattttttctatcatagttttaagtttttgtcacggtatgttaaattcaattatcatgttctacttatataattttatcgatcattctcaaatgtgttttcttacaaaagaattatatgtttgaaaatattttgtgttgtaatatttggtgttatggtaatagataattatccatatatatcacgtgattaatatatttatatacttatacatttgtatattatattattgtacttatataactttatcgatcattctcaaatgtgttttcttacaaaagaattatatgttagaaaatatttggtgctgtaatatttggtgttatggtaatagataattatccatatatatcacgtgattaatatatttatatacttatacatttgtatattatattattgtacttatataattttatcgatcattctacaaatgtgttttcttgtaagagaattatatgttagaaaatatttggtgttatggcattgaaaataagcattcatatatcacgtttatatatatacatatattatattataatatagtgtaattagacattaattttagtgataggggtaatggattttttggattaaaccagcactagcatgcatcaccaatatgtgttgagagcatcaatcattataaagcaagcattggagttgttctctgtagaagctcatcaaggcaaaaaccacaacagaaagaaacagagtgaattgcagagcaaagaaaacgattgccaagaaaagcttaaccagaatggttagcttaagtctttatttataatactgagaaaacaagtacaagctgagaaaacagaaaaataactaactaacaacttgcagaataaaattaactaactaaacattaactaacagaatctgggttaatatccccccaaacgaaatggtgatgatgccatatgaaatttgccctttaagtagttgaaccgatttgtagttaaaggtttagtcaagatatctgcaacttaatcaaacgatggaacatagcagactgatagttgtttttgtt

SEQ ID NO: 220842 - DNA, 2367 bp, Cannabis indica
taccagtgattgcttgaagaaaacaaacttacatcaaaggattgagtaaggacactaacaaacaacaaagagtaaccaatcttgattccaattcagaatatctcaaacacaagacccaacaaagaaataattaacaaaatgacataaaacgaccaaattccagaaacccataaagcaaaaacagtttcaataatctccaaaagtgaaaaatgaaaatcccaaatcatttcttgttatacctggaacaaaatcttgacacgctcaagtggtgcaacgacagtcttagcaaacccaccagcgaccccaccggcgatcagttccttggcaaacaacggcatggcctctattattccatccaataacagacccatatccccttcttctctcttctttgccattacggagagatagaaagagaagagctgcttcgctgggcctaaaacaaagactagactaaactagttgttgtctttgcttccaaggaagagtaggaagaaaaggaatcgaaaattttcacgaaggaatatatgtaaggcaatgtaaagcagtgtttttttatatatgtttgggaagaacccaaaatatttgtaatgtttttacacagacgacgaattagattaaagaaaaaaaagcccacgctttatctgatattctctcttttgctatgtgttttttttttcttcccattaattaatatatattattatcataattagagagaattaaaatttgttgttgtggagttttgtttagctacttctactcgtaagaaagagaaatagaagagaagagaaactaaacgatcagaatcgttaaatcagttgactatttttttatgcaataatcagttgactattaaaaccgaatttgaagggccgtattattttgaccatctacactctcttcaccaatcaccattgcctgctgccgtgcccaactttgttaatagattattctatttatttgggacacttgtagtgtagaatagaatctcatagaatggtaaaggagacatctcataaatcaatttttttttttctttaccatttactattttttaattaaaaatcaaatttttaagttactttcaaatccaattcaattaagttttaaaatctaatcgcataatagtaagaagaaatctaattccaaaaaatcttaaatggtactagtggtgtaagtatcattacgaaggactatattgttattagtgtaattaaaatttgaattttatattattatctcaatttttattaaataaaaacatgtatcatccttgaaaaaagggcctatgaacgatttagggtttgttttggtccaagcgttgcggtttgggtgcaagtgtagaacatcaacctatatggtcccagataggatgccataaatggtcccggacaactagtatgaccctagttaaggaggcacaaattatctcgaacaacttatatgatctcaaataaggaaggtccaataagtatcgaactaaacccatctttggcccaaaagaaattccaagtaatgacatttactaagtgttgacgcagattcagaccccatattcagataaaaattgagaacctaaatggagcatgccttccctagtacatctcaaattatacatttgcacaatgatccaagcagttagaagcccggatgaactctaggaaaggtcatctcgggacttagacagtagtgtggccaaacatgtcatgtttaataggggcatagactaatgaaagagaattttcttgaacgtgggacaaaccttatcttttccttgattgagaaaagtgagcatgtctcgtcccggacattctcctaaacagaagcctaagcatccgcgagaaaataagagcgatattctagtagaaaaggtcactttatcacaaatgtgattctctccaagaaaccatactacttgaaaaagacattttacgcgtgtgtctgaaagggggtaccgcactcccactctctcttttgacattcttttttctcacacaaaaagtaacaacttatatctgtaccgatcatatcaagtcacatcatttttcacccaccacccaattgagactccctactttggcccaactatagggcgtatcttatttaccattgtattaacctcattagatggcaaaatatttcaaaccaagcttcttaattaaatgggccctagctaaccaaggccttcattgtaaataaatttatactttctattcttaaagcaaaaacccaatagaaagtgagagagaatcaccattgttgtgcttctacaacacctcttaataagagtgactcgtagactaagggttattaacgccttcaataagagtgactcatgaattaaaattcattaacgcttcaatc

SEQ ID NO: 220843 - DNA, 2108 bp, Cannabis indica
agcctgtaggagcataccttgatcgatacctccggtcaaggaagtattgccctgtgtcatcgcaggcgttattatcaccatgacgatgtttgctgggatattgactccagtggtcgcagctagtgcggcaggcgggttggtatgattgtttatgccctgatcgcccacatgaagatcacgaggctgttcgacgttccagggcgtctgggagcgcgccctaaaaacagtgttaagatgatcacgaagatcacccttacgtacttggtattgccctcctcgcagtgtttccaccgaacctgatctggtgtacctgctgggagtgcgactatgcgaggatgaggaggcggactcaatgtcgttgtacttcgtctcgcggctggggtttgctacgaggattacgtcgctcagggtcctcctctgtttgtgcctcctaattgtggttcctcgcggattggcccctcgatgtcagttggttcaaattaagtccttcctcattggccctccgttccctgcgagtacggttattacgacgtctagaattggttacctgagggttgttcgtgcgagtagtggttactcggagaggacgtcgagccctattttttccatcgacctcgacctgcagagcacgtagctgatcttgaattgcagtgtactgatcgctagttagctggataataccttcggataccactactggtgtgataggtggaaaatgtcccgttgtggctgccggggaagacatttccccagcgtgaggggtagtagtctcagggaatatattaagaggcgtcacattgccccgtcctactccgccgttgataacgtctacgggaggcaccctgcctcctgacagtgggacgttcatcatcccgtttccttggtttccagccattgtaattctccttttaaatcatcaagaagtattgtcgttcccacagacggcgcctaaggttgttgaaggaactttacaacaccaaaaattgaattataataataataaaaatgatgaacaagtgcgagtattcaacccagaatggcgagtactcaaaccgggaacacaaatacttaatataagattggaaaaatattgaacacgagagaagtatagtggttcaatcagatcactgtctgcttagtccactgctgtgaagattctgtcctttttcatttcacggcggatcaactcctttacatacaaagcaagtgtcctatcatttacacaaggattgcattcattgtcaatccgtttatacattgaattacaataattaagctaaaaaacgtaaacataataaatgaagaacaatttccagtttaatctactaaatacaacaacgtatgcgacttctctagtgcgagttagctgtttatattcctgcataagcttgcttagcatacatttgagactagtcggatctaagatgtctacgtctttgtaaagacccttttgcggacatcatataacggactgatagaaccaagacatgcgaatctatatcggtttatcgaggctgttgggtcatctggaccagctcgtgatatagagaattgatctctctgtttttgcaggaggatcgcgaggatactcgcatatatcgtgatatatgcgggctattgtcgttccttggtcctacataatgcgagtcattcgaatgcgattagactcggtcatattcgcatcatctcgctgagtttggttcaggcaaggtctatactcgaggagtctctcattgacagctcagcttacctcggggaaattgaatacacgtgtccttttaaataggaatctagtctcgagtttttaggtgagaaaaatctcactataacatttgtgataaatattcaattagaacacttcttatttccatccactactatgtactcttctcaataccttgtcaatttctacttattaacacatcaattcctcttgataatatctagaatgactactaattctgaatctttctagcatactttgtcctcactcatacgctttctgagatgactccccaaaatattttccatcttgagattacccaaagttaagtatgtttaactccaaagtaagctcatggtgggttattaaaaagtagatgcttctt

SEQ ID NO: 220844 - DNA, 2418 bp, Cannabis indica
tttcttagatgtgagacatttctgttgagatacatttcaatttgcagtttatcatcaacaatttttaacatcataaaagcagtttaatttatatcaatatctcaaaaatgaaagaaatggtcatacatacagcatacttttattttcatgaattggatttcccaagtttatttaagctctttttggatcagatattatttaaggaggtgtaagagtagaattgttaaccttagttactgtttgtattttatataagttaatattttcttaaattcttactttgtggatactatgtaagatttcattgttcttcctttgaacagataaacgacagcgaagatgaaaacatcagtagtatctttgatgatgcttctgactttattgatcatgttgagcaaaaaggtggcaaggttttagttcattgttttgagggaagaagtagaagtgccacagtggtgcttgcatacctaatgctcaggaagtaagtagtgaaaaatacattttactagttagaattatatgtgaattgaattccatattctgtgatatctatctaacctttaaccactaatcattctcacccttccatcttgcagaaatttcactttgctagaagcatggaacacacttaaacgtgttcatcgccgagcccagcctaatgatggatttgcaaagaacttactcaatctggataggaaactgcatgggaatgtttccatggaatggcaacagagaaaaccgatgatgaaagtttgcccatctgtgggaagaatgctggtctgagcagcagctcacttaagcttcacttgcagaaatctcacaagaagctatcatcaggcagtgttgacagtgccatgacaatggaaattcaaaaggctttgatggcattacaaattagccgaggtgggagtgttagccctactcaaagggtatcttgttcggatatggatgattagaaactcatgtacaccttcaacagagatgatcaaaagcttttacaaagaacaaaaaatacaaaaaaaaaagataaatttgatttacatttgcaaaatggtgttacaacaggcctctgtctctatttgcttgcacataaccattaaccataaagtgttaaaaaaaaaaaaaaaaaaataaattatggagtttcagtgtttacttcattcatgtatgtaaataatgaggcatagttgtaatcaagaagctttggctcattatctgtaatggggtttggcatttgaaaaggaaatgaacttgaacgatctgtctttaaatagagaatgtatcatcactaatttgggggatataattggaatgtgcataaacgactgattttatcttttcaaaggcagtccttgctagaatttgacttgtgtaagcgcaaaggaaggattattagtaatctagtttaattctaatctaatcttgcatcacgaggaaatctttaactggatgtaatgaaaatttattaatgaaatagctattttatcaaaatagtaaaaatgaataaatctattaccaaatatatccaaagtattttcctacagtttctttaatttataattgtcctattcctaatttagctatgcttttgtaattcctaagatgtgttagacttgattatttttaataaaatattcttttaaaaaaaaaaaattacgaaatattcttttttagacaattctatgagaaagcaaaacatgggaagtttaagccgtatgattttaatatctcacttctacaacatattactcggtcaagccagtcaccaatggttgttgataagatctgaaacatgttcgtcaccacttgctcttggatcattaaagcgtgatacttttcaaaaatatatgaagccatatgattgaatattcaatgaatattcctcaccattactttttcaccatttctagatacttttcaatacatcaacttcaacattttaagattctataaactactataacatattatgtaatatagacataatttggtttggtggacccattttctcgagtattgccttttgacccgcataacccatagtttatattttccaaagttaagatatattagactaaatcgtttccattgaaggaaagaagaatatattacatcattttagttcaataattctatatacgacctccaaaatgaaaactgatagtacaatcttattattgttactcaagagagcaaaggctataaaattaatgagggccaaaactattatctgtaacagaactgtgcatattaaattgaataacagatacagccttttgacacagccaataacttaaaataatctggctttcaattccactaccaaaatacacctttgaagaggggaaaaaaaactaggtctatggaagagttccaactaacaggaaaacaaaaagacaattctactgataagattaa

SEQ ID NO: 220845 - DNA, 1652 bp, Cannabis indica
ggccttttgaacaacttggaaggtgttctattgatgaggtaagtagcagtttgcactagaaagggccaatataccagaggtaaattggattggaaacctaaagctcgagttacatttaaaatgtgttggtattttctttcaacaaccgaattttgttttggtcttttcacacatgaatggtaatgtatgatgcctttggaggcataaaaggttttttaggttcaactctttagcattatctaatcgaattgccttaatgttggttgagaattgggtgcaaactatgttaaaaaaattaggtataacagtttgaacatcaaacttgtttttgagcatatatatccaagtaaaacaagatttgtcatccactatagtgagaaagtacttgtaatcttctacacttgtgatgtggaaaggacctcaaatgtccatgtgcactaagtcaaatatcttattggcaaagttatggttagaaagaaagggtaatcatttttgttaagccaattgacaaatgtgacactgctgattggtaaaatagagagaatgatcactctttttattaaagaaattggaaatgtacatagatggatgaccaaggcgattgtgccaatggtctacatgtttattatcaaactgaaagaaaattgcattagttgttggtgtatcttgttgcagcaagtatagctttccatatttttcagctatctcaatcaccacattccgggtaaaatcctgaataacacaagtgttttgatgaaaagttacgaaattagaattgtatgaacaaattcagaaatggaaatgagattgatcttgaaacttggtacatataacacattatgaagggttatgtgaggattaatgtgtattgtaccagacttgtgaaccagaattttatgtccatttggaagaatgacatgctaaggaaaatgatgattggaaaaagaagtaaagcatgttatgttggaacacatgtggtgagtagcaccactatctaaaatccacgtgaattaattgaggtgagaatcaatttttacccacaagatttgaaggagcaggggccatggcagcaagatcaacatgaggtgtattgttgttgagctgctggctgagtagggaaatcaagtgctgacattaggttgaaagatcagagggaatcgattggccatcgacatcagtcttcccagtgctgacaatatttgctttagctttccctttttcttgtctctttttatcttcatagccaggaggaaaaccgtgtaagaagtagcacttgtcaaccaagtgacctggtttgccacaattggagcaagaggcacgaggttccttggctcttggaggattagtaggcatggagcttgtagcagcagccaagggaattgtttcagcagagccaagagatcattgacgctcttcttgaatgatcatggcaataacacacgggacaggttggggattggttcattgagcaagatttgagctcaaaccgatgcaaaagattcatttagaccaatcaagaattgaagcacttgattatgattgtagtaatctaaaaagattttcatagcaccatatgtgcaggtggtgattggttaaaatattagaatatttctaattaaggtaataaaataatattattgattctgataaat

SEQ ID NO: 220846 - DNA, 1700 bp, Cannabis indica
atatatatatgcatattttaatttagtaagtgagatcaaataaaaataataattaaaatcgatacacatattttttgaatggacattaaaattatattgattattgagtttggcaaggacacttatcactactctttatctatacacattatcacttattatgtataacatttgttcattttaagttaaatttagtggataaatgctagctgtgataaaaaattatcaacaaaaaaaaaacttgtataatccactgataaagtttgtgtaattaaataaatgttaccattaaaatttatataaaaaagattaatttattataattttaaatattaataatatgtatatgaccactaacaatgttaccttatcttttctttcaagtgtatatatgctcttattaaattaaatggaagaaaaaaaaaaaacaaatcgacaccaatattgtatttttttgattttatgcaaactcgtcatgtcattactacatttatttatatatttattttttataaactactctttttattatttaggaaaatttaaaagcattaaatgtattacttagtttatgccacattatatcagaaaaaacaaagtaggtgaaatgaacagagcacaagtaaacccatatactgaggaggagtaactaagaacagtcttaacacaaatggttaaaagcacaaacccttttccaggtggcaccacaacgtcacccaattttttttattattattattatagttattattatacactaaaattatttattctacaataataatagtttttcctatatgtgtaattacataatgcaggtatgttttattttcaactaaagatggtgtagaaatgatttttgtcactacaatgaaactgtcattttcttatcaattattcaatataaaaaaaaaataaaataatgataaaaaaatgataaaccaaaacacagagagatatacatacataagcttaataacttagagagaggagaggagagagagagagagacacccttttcgttttatcactcctctttctcttctcagaagggtttcttgcaatttaaggtacctgcagtttcttcaacatcaatcaaagcttcaaactcatttttctgccttaatattactgattttgttttcatttctctctcaaactcagaaaccctaaccagccaaatccattatttggttgtcagaatccaaagcttgtcctttttccgctgatgggtcgtgaatccttagtggcagctcagcgtgctatggcggctccgccgacttcaccgccttctctatccctctctgtgccatcggaaaaaactcgccttgcgccgcaagccaagacgcccgcggcgcctactttggccccggggttcaggttccaccccactgacgaagagctcgttatttattacctcaagcgaaaggtttgtggtaagacctttcgatttaacgccataactgaggttgatgtctacaaaagcgagccttgggaccttggaggtgaaaactcaactctttactctttattttattaatttatttatttttattttttattaatattttgggtgtatgaatgggtgttgttacattcaattttccttgagttttctgggctttttgtatttttgcgagcttactttgttgtcagttcggagtgggttctagcttgttggcactgatttgtgtttttcc

SEQ ID NO: 220847 - DNA, 3782 bp, Cannabis indica
caagcgtgctcgtgcagcccctggtgatgatgctgtggtcccttccctttcagatgatgaaccaacggcgggtgtcgcttcgcgaccccgccgagaaaaatgaatctctgcagttggaacgctcgaggtttagggagttctcgagcgttccgtcacctctccctcctggtcaagcaacaccagccagccttgctttttgttatggaaaccaagcagccagccaaccggggacttcccttgaagtataagcttaattttgataatgtatttgaagttcctaggcaaggtttagggggggtcttttgcttttttggaaaaattgtattgatgtaactgtggtttcttactcccttaatcatgtggactgttttataaataattctaatgatataaactggcatttcactggcttctatggttctccttatgctgattcaaaaatttttacttggacacttcttaatcgcttatttgatactgcccccttttaccgtggttagtgattggggactttaatgactacttatcccttaatgatcgtaactctgcttcaccccctccctctcatgccatgcaccattttcacactttcctgcattctcgtaatttaaccccccttccttacatgggaaacaaatacacctggcgccatggctctaccctggaacgccttgattggtgcactatttccccttcttggaaaagtcttttccctcatgcctccctcactcatttgggattttatggatctgatcacagagtcctcaaactccaactggaagacacttcttttaggaatcattaccagtctcgtttccatcttgagaacttccttctcaatgacccctcctttccaatcatggtccgcgactcttggtgcattcattcctctccttccccccaccctttacaacattttctcaacaaacaatcttcatgcctctccactattaaggcctggcaatcttctcaaccctcccttaagctccaaatttcaaacactcaagctgaactcaaccggttgttaaacaacaatcactcaactccccttgctaaccaacaaatatctcacctccaatctgagcttaatcgacttctcctaaaagatgaaatctattggaaacaaagatcaagggttgcttggcttcgtgctggagataagaacactcggtttttccaccaaaaagcttctaatcgaaaacacaataattacatccgtggtctaactctccctgatggttccatcattcatgacactcaaaccattttcactcaattccattcatactttactgatctttttacctcccaaggaacttctccatctaccatctcttccatccttcagggggtcaccaactacctctcccctgctcaatctgcttttcttgctaaggaatttaccgttgaggagataaaatcagccatgttcagtctctctggagacaaatcccctggtcctgattgtttaaattctttcttttatcagaaaaattgggatactcttggtcatgatctcactcagggtctgcttcatatcctcaataatcagggggatttctctcaaatcaataacactatcttggtccttatccctaaaaagaagaatcctaaaattgttcgtgattttcgtccaattagcctctgtaacactttgtacaagtgcctttccaaagttttggctaatcgacttaaactggttcttcactctattatcagccctaaccaaagtgccttcctctctggtaggcaaattactgataacattgtcattgctaatgaactcattcatgccattcattctagaaaacatggcaaagtaggctgggctgcgattaagctggatatggagaaggcttttgatcgagttgaatggtccttcatttctcattttcttcaccacattggagcccctcccacgtttacttgtcttattaataaatgcctttccactgtcacctaccaattgtctctcaatggtaaattatcaaatgtgttctcttcttcccgtggcattcgtcaaggtgatcccttatcaccttatcttttcttaattgtggctgaaggtttgtctgcagctattcgtgtccatgaggaagctgcccttctctctggtattaaaatttgtcgtggagcaccctctttttcccacctcctttttgctgacgacagtatggtttttgctcctgtttcaactcaatcctctgaggccataaacaatattttgcatctctatttccaagcctctggccaatcagtcaacagggataaatcttccattctcttttcccctaacacctctcccgattctcaatctaattttcgatcttctttactccttaatggtgaagggttcattagtaaatatcttggtgttcctcactgtataggcagggttaaaaattctgtttttcactatctcatccaaaaaacttcatctaagcttagctcttggaatgaaagactcttttctcgagctggcaaagaaattctaattaaatctgtcattcaagccatcccctctttttccatgtcttgcttcagacttccaaagtccacctgtgcttctattcaaagtttaacagctaaattctggtggggctcgtcttcgaataagcagaagattcactggaaaaattggtctgctctctctgcttccaaattttttggtggattggggtttcgttctcttacttctcataatcaggctcttctggccaagcaggcttggcggatttggtccaaccctgactccctgctccattctcttcttaaagctcgatattttaagcattctgatcttctccatgcccctaaaggtcataacccttctttcacctggagaagccttctttggggaactcaacttctcaatcagggtcttatttggaaagtctgctctggcaatgatatacctatttctgcccctaactggatccctaacatctctcacccaactatcctacatccaattgacccctccctgtccactgtctccttttttgttaaccctgatcgcacctggaatattgataagcttcaccattattttcctccttatcaagctgatgctatccttaatattcctttggatattggtccatctgattctctcatctggggattccatcactctggcattcttactgtcaactcagcctaccatttagcccagtccacgaccctgaattcctccccttccacttccaatcctaacccttataaggattggtggaaaattctttggaccttgaaaatccctcccaaaattaagcatttcacttggaaggctttcaaccatcttctcccgtgttctctaaacctttttcttaagcatgccatcccttctcctactttctcttattgtgggggcaatgcagagtcggtttctcatgctctccttcactgtaccagagttaaaccaatttggcatcactccaactttaagcagttttttgttgaccattataggctggacattaaagatttctatctgcttagcctttctttaattcccagaaatcatcttcccttatttcttggtctcatctggcaaacttggaacattagaaacgcccatctccttcaaaaaccttcccctctggctaatgttcaagatactgttgcaagttttttgcaggactaccaggatgcccaagcccattcctcaggctcacatccgactactaatcattgccctgttgttttggatcatattttgaccccctctactacggctctttttgttgatgctgctcttaacactaatacccctgccacag

SEQ ID NO: 220848 - DNA, 3774 bp, Cannabis indica
tagtttgtattagaataatctgaataagattgactcgtggactatgcagagttaactgcaaaagcacgtaaaaacttggtgttgtttttgctttattattctttcttagatttcaactaatttctctgctgatcctgtcacgaaataggcttattattgttaacaaaaatctacgttaacaatttggtgctttaattgagagccttcgtgaaaaaagctccgaaaatccctcctaaccaaaagaaaactattctccatggctaataatggtgaaaacgataatatccaacctgaagagactactcactgcattcaaaaagagctagcgggctcacggaggcctcccaactcacgaacaactcgatccacacagttaacacgttcgaggagaagccaacatgaaggtgaccaaaacacagaaactgggaatgaggaaactattgctaaagctagtgcttatgtacttagggaggaggatgcctatgaccccactaggtacgagccattggtggagttggaaaattgtcaacccaagcgacgtctggaggaggcaaaccaacgaaatgctgagttggaacaagaggtagctacagccagggcggctcaggaagacaatgctcgaaactaacctgatcctgaagtaaggaggccatgaggcagacctcgcgactcacaaaccaggaggcaggagatagctcagggggaccctcaaaatgcccaagaagaacaacatggggaaactgaggatgcccctgaagatgagcaacctaataactaggcacatcatcaagaggtgcctcggagaccctggggatctgcaacccaggggactggaaatcgtgatttaccaaaatcctctcgcaagaatacgagcaggaagaaacctcagactagggaataggaaatccctcgttgtaatgagagagatcttgggactcaacctagggcaggtgggttgccaccgagacactatcaacgtccttctcgaattgacagggaaggggtacatacaaatcccagcaaagggcatgtatcaacccgttctcaaaagagaaggccagtgcgtgacgaggcaagttctagctcatagtcgatctacacgaggaggggacagaactcgttgttgtactgattgagagagtacaaatacatatataactggaagcaactcaaggaggaggtctgtaagtaactataatcaacaactcaattagaaacaagaggatcctatccaattgtgaatcaacgagttggaggacatgttcaagaggtacaaagatggggaatttggaaaactacctggttacgactcgaacgaggaacccgagccttcccatccagacattatgagtgctgaattcccccagggatttaaaaaccctcatgtctcgtcatacgataggactacgaatccggtctcgcacttaaataatttcaatactatcatgcgagccacttaaggcagtgagcagttggttcaacaaatttacacatcattcaatcacatcttgggaacagctgtctaaagactttaagaagaagttctaggcagcaagagacaggcaaccaaaagcatcttctcttactaacataaagcagcagccgggcaagacatacttaagtcgtttcaatacagctgctgcgagggtgcgaaatttgaacgacagtatccagcttaccgctcttcaggcagggatcacgaatgatctctcaactgctaaaggcgagctgtgggatgacctgcagggtcgcttagtcaaaaacatcagtgagttcaatgagagggctcaggtatttgttcgaaaagaggaagcaaggaaagagatgaagttgttaaagactggctcgggaagtaaacccaacactgtctcgacaagtatcgtctcgataaaggctgacaatccaggagggtctaaaaggaaagatgactccaaggaatcaactaatgattagagaatgcataagaagcatgacaagtacgtaccaatctacactatttataccaagcttaatgaaagttaggaaaatatttatctcgcacatgagcacaaggtcgcattccgtatacctaagcccatgaggcacgcgagacataaaagagatgcaacaaaattttgtaagtatcacaaggacattgggcatacgacaaaagaatgtcgtcaactgaaagatgagataaaaagccttatctcgcgaggtcaaaagacaaggtgatggacataaccagcctaatttgcccaataacgcaggtaaccagggactacaacctcctcctcttgaaggagaggacattctggttatctcgggagggccacatctggctagagaaagtaacaatacccaaaagagatatgtaaaggaagttaagaatgagcactctctttttgctccaaaatcatctaagtaagataagactgaggaacttccaattctgttctcgtaggaggatgcaaagcatgtgagataccctcatgtcgacccactagtgattaccatccaactttccaacaaaaggataaaaagggtgttggtggacaacggaagttcagtgaatatcctttataaggatacactagagaaaatatggctggaaaaagaaaaattaaaaccttgcatgataaatctatgtggatttacaggcaacagtgtcgccaatcaaggaattatcaagctcacattaactgtgggtgaagcacctttatctaccactataatgcaatactttttagtagtcgacctgccatcagcctataacatactgctgggtcgaacagcgttaattggactagggggaattagttcaattaagcacctatccctaaagtttcaaacaccgacaggtgtaggagtggtgcgaggtgaccaatttttggctcgcgaatgctaccgcatgctgtagaatagaaaggccgatcaccaactaatggcagtcatcactgaagaaggcgagaagcaggatgaggatcttgatcctcggattcaagatgaatggaatttattgaaacaaattgaggaattaaaagaagttattttagatccaccaaatcccacaaagtgtgtattcattgggaaaaaactggatgaaaaaataaaatatcaactaataagttttttgaggccaaaccaggatcaattttcctggagccactcgggtataatagggattgaccctaagattataagtcaccacttgaatgtcgacccaaactacccaaccaagagacaaaagagacgacccttggattctgagagacaaggggaactcaagtaggaagtggataagttgttagtcaacgactttatacgtgaggtgttttattcctcgtgaatatccaatcctgttctcatcccaaaaccaaatgaaacttggagaacttgtatcgacttcttagacataaataaggagtgtccaaaggattactttccactatcaaggatcgaccagttagtggatgcaacaacttaacacaagcttatgtcattcatggatgcatatcctggatataactagataaatgtgcatgtccctgatcaaaaacatataagctttgtaaccaacatgggactttattgttataaagtcatgccgtttagtttgaaaaatgctggggcaacatatcagcaactagtgaatgaaatatttacgagacaaataggaagaaacatggaagtctacgttgatgatatgttggtgaagttgataaatagcgaaaatcacacaatagacctcgcggagtgctttgagatactgaaaaaagtacaatatgaagctta

SEQ ID NO: 220849 - DNA, 2206 bp, Cannabis indica
tgtactacaacttcaattctttatcatcctataatttaatttgtgtctcaaactaatattgtagttgaactcttattgtacaaaatgtaatcactagaaatgaatatcatatatgtaatcattagtccgcactttatgcacaaaattatttttttttaatttttttgtttatttatttattatttgtaattgttttgaaaacttaagagaaaatataattgtatttttaaaataaaataaaaattgaatagaatttttacttcttgaactttaacatataccaaattatgctcgtaaactttttaggtcgttaaaatttctttacaaactattgagattattgaatttaaaaacttgcatgtgtcgaatttcatgctcttttattttttataatccatactctttttacatttttctcaatgtaaataagattatatattagtaatttgtatgtctttagatatgtattttattttatttgtaccaaatatcattacatattaaattaattatatatttttgttgtctttttttttatttttctttcatatttttaagctttgttattatttttttctttatttctaatgagttaatacattataattaaaacatattattgatgaaaataatagagaaaaacgaatgtaacgaataggagagagaaagtatcgtaggtcaaggagagagaaagaatcgtagcgtctaggagagagaaagtatcgcgtagtcttcaggagcgtcgtcttctccacgtccttatgccgttgtcaggcatcgcctatcaacgacggccactgtctgtaagtcttgtcttttgtgacatggtgtgattgctttctgctctgaaatttgtttcttgtttgctggtttgagattgttcttgatttttgccatttattttctagttttgagagtttcagttctctagtttgagattgttcttgattttttccattgtttttctggtttgagagttttaagttctctagtttgagatttattcttgatttttgccatttgttttctggttttgagagttttaagttttttggtttgtcattgttgttgggtctcgtttgttttgggatggcttctagcagtaatcagaggatggatgaagagagtatggctgctgttatcattgaggaagaggatgtggtagtattatcctatgatgcgactgtcactattggtaatgattatgatgatcgctggtgtattgtcggtagattcttgactgagagatctatagatttcgacgtgatgcaacatatgctaggatctctttggcaaccgaggaagggcatgttcgttaaagaattggattctaacagatacttatttaaattctttcacgaattagatattcaaagtataatggatcgtagtccttggacttttaataagttcttgctgatttttaaaagattgaaaggggaagaccctagacagataatgctgaatgaagttgatatgtgggtccaactgcatgatcttcgatcagcatttaaaatggctatgattgaaaaagatatagccaattgtgctgggaagtttgtcgaatcagatgaaagaaattttatgtgattatggcgagattatttacgtgtccgagtaactattgatgtcaccaagccattgaagaggcggatgaaactgtgaaatatggatgggattgagttctgggttaacttcaaatatgagaatctacctacgttctgctttatttgtgggataatggggcactccgatgagttttgtcctcgttgatttgatgctccagagggaaagatagtcaagccttatggagaatggatgagagtgcggcctatgcgtaagaatcacaccataggagcaaagtggctgaaacaattcatggtggctacagaagaggtacctactgctcctgtaaacacgaccacgagtgaggtttgacgatcacagttagtcgacgttggtgcaggtacaattggttttttgaaatctcgtatgattgtggtagataacatgggtcaacgtgatatccctattaatgcggaggctaattttatagaggctgctactgatcaagaatttagtgagaatattgttaaacataatgattgtttaatggtggtggacacgaagagaaaaaggacggaatcgggcttgtctgtgttggaatgtcgaatcccatgttgtcactattgactgaaaataagct

SEQ ID NO: 220850 - DNA, 1463 bp, Cannabis indica
attcccttccctttatttatatgcattacaaattgtagttattaaatcctatccttaccacaatgtgtgaaacgtggacaatcctaatattttgtttatcctgtcttataggcgaaaaaatatatgaataattacccatattcgaattataggattgtggcagttacgtttggtcttatccaaaatatactacgttcgatcatgtttttttttggtgatggctttttagtcctcgggttgagctattttatttgtggcttccttcaaaggatggcttggctcgggaaatgaactatcctttatccttacaacgaggttttagataatttatttacaatcttactcaaattatatctcttgtgctatatgaatgtagaagtcatttaatcttgtagcaaaatattatgactcattctgttcagatctctaacctttgatcctttctgttgtagagtatgatcaagatctgaactcagatcttctcctccttcgattgtgttcatcacagtcttccacaaaggactgagtatcaacttgaatagtgcgggctgatactcaaatcacctttggaacatatttttcagacagaaaaacatagtaaattttgaactatagaagaaagaagagaagagagttgcctaacatagaattaggttttttattctcatcacttttttatataagcattcacttagggctaggtttagatgatatgggcttaaataaagactttggttgaagtgtaactctagggctgaatttctcatgggctttagagttagatttttgccactttatttcaactaatgaaactaaagcgtcttttctaattttaccacttatcttatctaattatttaaatattaattttattttaataattataaataattatcaaataaaatctaatttaaatatatttattaattagacccacaaagtgtactataaggtcatatatgtattaattgacttgatattcaacatatacacctcgggacatgctatgaacgaggtcatgctaggaatgaggacctgatgtccacatcttaaaaatactttttgcgcttggcaggttatttcttgatgttagttaacgaggaggctttaggtcttctgcttctagatgcttggaattgtttcttgaattcttgagacaattgctcccacgaggttatggaatgtcgagaaaacttatcagactaacttttagttgcccttgtgagagaattcaagaacaacatgcaccgtaggtttaatccgacattgcttgctcacatagtaatattgaaattactcaaatgttccactgggtcggtagttccatcatatggggcgacataaggatttttgaatccttttgggaaatatgtgtttgttatgttggcatgaaatggttcagatgttggaaatattttaccaggatctagatttactaccatgtatgtttcattaacatccta

SEQ ID NO: 220851 - DNA, 2811 bp, Cannabis indica
tttttttgtgtcagtttacaaatcaagtacatacttcctttgggacaaaacaatatcttgtttacttcgagtaattcaatacccaagaaatacttgagcactcttaaatctttcgcgtgaaatttggtatgaatgaaagacttaaggggtgagatgcattcaatatcattttcaatgataacgatgtcatcaacttacaccactaacaaaatgatatcagcaattgatcttttattgaacacagaatgatctgacttactttttaatagatcaaatttctcaacagtttgattaaatttaccaaactaagtacaaggactttgttgcgatccatataaagatttgcaaaaacgacaaatttgccctaactccccttgagcaacaaacccaggaggttgctccatatacacttcttccttaatatctccatgaagaaaaatattttaaatatcaagttgatgctaaggccaatgatgagtatctgccatggtaatgaacaattaaatagatgtgagtttagtaacaggagaaaaagtattacaatagtccactccataggtttgagcataacccttggcaacaagacatgcctttaagcgattaattattccatcttgattaaatttaaccgtaaacacccatttgcaccctatgactcgttttcctaaaggtaaattaaccagtctcaagtatcatttgcaactaaagcattcatctctgttatcattgcaacaagccaatcaggacaagacattgcttcacgaacagttttaggaatagtgatagaatcaagagaagcaataagcaaaaaaagaggagagatgattataaaaaacaaaaggagaaataaaaaaaagtacattgacgtttacctttacgtagtgcaatggaaagatcatttttgagttccggatttgatgacgaagatgcatatgcaggacatgaaacgggaggtggacgcatgatgtacactgtaggaggcctagaaaatggaggtggtggaggagtaagcattgtgggagttatgaccgaggcaggtgaagaaacaagagactcgtcagaacatgtatcaggcacagatgatgtaatagaatattccatcaaatcatcatcctcccccgacgagtaggagtaggtgaaaatgaaaaataaggtgtattttccacaaatgtaacatcaatagaaacaagatattttttgagattaggacaataacacatattccctttctgtagacgagaataactaagagagactcactttaaggccttagggtctaatttggtgacatgtggacggacatcgcgagcaaaataaatactgccaaatacccgatgagcaactggaaacaatgacttactaggaaaatgaatttttaataagatctaaccatcaagtatagaggatgacatgagattagtaagaaaacatgctgtggaaactgcatcggcttaaaaaggtttgggaattttcatttgaaacaagagggcacatgcagtttcatgaagatgtctgtttttacgttccgctacaccatttttaggtgcagtattaacacaagaagtttcatgaagcatgttattagaagtcatgtaaaattgaaattgtgcagatgtgtactctttggcattatcacttcgcaaagtacgaacagacatattaaactgcttttaaatcttagcacaaaaagcacaaaatatagaaaacaactcagaacattttttcagtaaatataaccaagttacacgagaataatcatctacaaaagtgacaaaacacctgaattcaggttgagacaaaataggagaacgccaaacatcaaaatgaactaacttaaaaggaacactagcatgtttattaactcgaagactcaaactaatacgatgatgttttgcaaactgacatgactcacaatctaatgaagatacattagtatactggacagagtttcttaagcagatgaagggatggatggcccaaacgacaatgagcctcaaaagcgaaagcaacactcagacaagcaatagaggctggtggaagtggatcaagaacatacaggctgccagattcatgtcctttaccaatattcttcttcgttgtaagatcctgaaacaaacaatgatcaggaaagaatgagattaaacaatttagattacgagtgagttgactaacaggaaacaaattaaaagacaaattacgtaaatgtaagactgatgacaaagtgaacaaatgtgtgagaccaacagtgccagatccaagcacagaagatggtgatccatcagctaaagtaacagtagaagtaagactatgagattgaaaagtggaaaagagactggaattacctgtcatatgatttgtggcatcagaatcaatgacccattttgaggatgtgaaaaaaaggcatgcattagagttacttgaattagctatcacagtgacaaaaggagacaaagacttaagtgattcctgataccttgagaacttggcaaattcattagcagaaataaggaccgatttgtcatatgaattactagtgctagcaatattagcagattgtttttgttgatttttgaactgtaacttcctacactcaaacttggtgtggcctagtttcttacaatagttgcacatgatgctcccgaaattcggtgttcgattattaggtccttgtgaaatacttcctttgtatccacttggagtagaattttttcatggtgcaaaattgttacgactcaccaaagcgctattaagatgagctgaagagttagttttttttttgcaaagaacacgagtaaacacatcttgtaaaga

SEQ ID NO: 220852 - DNA, 5666 bp, Cannabis indica
cacgacaccgatactggtgaagaactttcttagccagacaagctctttagcgtgtcctccgtattcatttttattattgacagaatgcctgatagcgtgtcctccgtattcatggttccaggtatgggtggtatcgtgggctttttttttgttttttttattaacttgttctttttccttggtcttctaactaccaaggagattcctgttttgagcagtgagtccctaagcgcactacaaaaatatttttacctttctgaggatgtgagggctgctaaagatctcttaacttcgtgacgcctgaaagagtctagtcttacatatgtcctgcttcctgcgggggctctcatttcgattacagagcctctccctcaaggggatcctacctactctcccaaccccgccctgggccctctacggatccacgaggcaagaatgacaatgttggggatgttgcagctccttcgtcggtcgcggcagactgacgtgagggaatggtctccaagagcggctcttgtgggaagcctcccactgcatcgaagaaaggtgcatcttcttctggcctccctaatgatcccactcccaaaatgagtcactcccttctttccaagctcaagaaggcccttgctacaaagagtatgcttggtagctatatgtgccgtcacaaagagattacaacctgcctgggggagtcgatcactccctccattgatattcctactaaggagcatgctcatcgtatgtcctgacgtgcctccttggagagccaagatgagggggagggaggtgtcgcggagctagtacctccatactcagtcagcatgctgggagatgtcaaaatgcgagaacctgacggggaccttccttcatcagatgttggccttaataatcaggacgctggaggagatgaacttgggaggctctggttatgcttccaatgtgatatttgatgctttcaatattaaacagcttttttagaaccccttcagctcttcggaaggtccttcacatccatcctacggacccaatgactttggcgtggtcacaatcccaaatgaaccaatgttcgagcgggtataaccagcacctgggtgagtttaccccctcagattggacttggctgcgcaactcctcgtcaaagggatgccaagaggcttctcttaagtgtaacatatgggttagtatatgctgtccttgtctttattttcatcacgtgctgctgtttgtatatattttgttttaactgtgtcatttgtttgtatgcatccgtcttgtagcaatacactcccagccctaaccctttggaggggagaatctgtcgcgcctccaacaggctctgagtgatttagaggagtctcactgccagtgccaggctctttaaggggaggtggaccgcctctaagttttgctgaccaacgagcagccctcaatggccagtctcatgtagtaacttggggagtatctctccattcactaaaggtgtctctcgcactcgcatgttttcacgaagagacttatagccaagattggcaagctgcaacatcacctcttcactattaaggcaaggaacaaggaagtgtcggaggacaagattgagcatctattatacacagtttggatacaaaatcctgacgtcgactacagtgtccttggttcatttacagtagagatggttgagtctttcagggctgagtatggagatgcagtcgcaacgtgctggggtaagcgtcgacgtgatgcgggtccctctagcaattgcaactagtaggcgttccttcttgtgatcatatccgcggagacttcaggaactttgttattattatttttttgtttatggatgactgtaaacctcctatttttacttcatgtatgcatgacatcaagactcaatcttggtcaagtggttccgaccccttggccgagtggtttaccttactttgttgaatgaatcatttgctttgtgttctcttttttgtggtattcaccaagtatctcttgggatcgatctttggccatgcatcgttgtggtcagcggattttactttgagggagttttggctctttgagctgcctccctcttattgtaaatctatccttttacttggatgggagggagcttatagcacttgaccgcgctaccctcttgattaaagaatgtttgcttactcttgagaggcgtccatcttgtttcggctttacgccatgagtgtccttgaggacctcttttggcttagctatgttttacgcaaagaagtgtgtttcctatcgttaatcaagggtatctagtccttgacgatttagggatacacactttttactcatctcctcaccccctaagtgtattgcgccatttatggggctgtacacttgagttacatgcttatttctaagggaaaggaattaacaaccttcgaaataccaatttgatgtaacattcattcattcataaaaaaagttttctgttacatgcatacaagtgaaatagaaatgaagaaaatgaaagaagttatactagtggagttaccccaagctcgctccttgattcttgtcatccatattaaaaaaggttacgtgatgcttctcgtggctgaccttctcctactttcccactgccttcgcatccccacccccgttcaaaccgttcggaactacctttgttactgggttcgtggtcttggtggcaaggcacagcgagacgttgtagcactccctggcctccttctgctctcctttaagtgtggtgactcccctaggggtcggaaacttcacagctagatgatacacagaggttactgccttcaatcgattgagggagggtcgtcaaatcactacattgaacgcagctggacagtccaccactaaaaatgttaccatcatcgtggcgtgtttggggctttctccaaccgtgagtgccaactctatcgttcccagcggttggactgagtctccggtaaactcataccactttcttgagggccaccaagtagaggatatctatggagctcccattgtccaccgcgtccgatgtacccttgtgttggcaatttggatcatgatgactaatgggtcattgtgagggaagtgcactcccagcgcatcttcctccgtgaatgttattgagtcgctctctcccctagaactttttggtcgcctttgttccagactctaaacttggggctcttgtctcgcctcacatgcatacttttctcatcccttgcgggtattgctcccaactcctagtcctctattgaaagtgcagatgtctcccagcacttctgaggcctcttcttgatcatctcgctggcgcggctcgtttggcctttgattctccttccagtactctcctagatatccacattgtatcagtccttcaattttgaccttaaagtgcttgcactcttctatgaggtatctcacgtctttgtggaagcagcagtacttgttggggtctctcctagctctttccctcttcaagggtggcagtctctttgaagggaacatgatgctcattggtgaggtagacatgttctcttgaatgggttagttctgtgtagtgggtgtattctcgaggtagtggatctaactccctcttggctttcttgtcttgtcggtcatccttatacatgaatccctactttttgtgtgacccctcagctcgggtctttccaggttgttcatattttcccactcctaaattttcatgtccatcctccactaagatatacctattggccctctcatagaagttctcaaggtcatccagctctctcttgagcatgttgttccgcagcttgcttcttggtctgactctggcagcgatagccattttatgatcctccttagagagtctccccactttagccgcttcggtgttgaagcactagatgtagctttttaagcttttagtttctccttgtttaatattcaccaaacttgtcctcaggacaacataatctcgggaagcatggtgttgggacaagagctcatcggtgaactgtttccacaaagttatagatccaggagccaacctcttataccacttgtaggttccgcctcaaagtgtcaccctactcgtgactcttttcattttcataatctcgttgaaagcgtccaagtgatacttcggatcagtgatcccttcataaggcgatatgtttggctctttgaaattagggggtaattgttcggattggatttctctagaaaaatgagattcatcgtcgaaatcttcttcatcccaacttccctcctctgaggcggctgaggatatccttctacggagatcttccatctccttgtcaagatgttgcctctttttattcagcttgtctcgaaggtcctgcggcgtgcgtcttggaccttctttgtggtggtgcattcttgatgacgacactttcttttcgacagttgttttttgattgagtttttccttaggtcctctgggcccacccttgagtcggttctcttttgttagagagagggctccaagtccatctggggcctcgcctttgatggcgatgcttccggtgtgttactggtggaacactttaatagtccttcgtcttccagattgtctttctcctttctaataacttcgagttctcttcactggaataaaggtgtatcaaaatgccccttcaggagctcgtccatcaccttctacatgtttgccacagtctcttctaacctcaacttgtttatctttaacttattcatctcgttgttatgcatgcgggtgcgggagcttgacgtgacggagtagactcgcttctccttccctgccctaggacgcgaggtccctggatcctttggggcagaggatgtctgatggaatgaaccctccgtccctgcgtcacaacttttctggcaatggttatggaggttgtctctccatcgcgctggtaaccgatgggggcctcttcacgtcggtgcccttcttgtgctgcttgaagtcccaagatatccccgcctccctcttgctgctgagacccgcgattgatggcggcctcttccttggcgactgggacaggttgatctctccttacggcaaccagctgatcgttgtcaaaatggatttcaatgtctcggaggcgacgtgagcgtctaggcattgctaaaatgattgatagtatggaaatgactatttctaagtttttgttctcacagacggcgccaaactgttgacagacagaactcgtcaaccaagttagtttgttagaaaatatgtaactattaaaagatgagataaagagaaaaagtgaaatgaatgaataattctctctattgcctttctttctgagttacaaataatgaacttccaacccccttcacatctcaaatgggggtacttataggcactagtggccaagggtacaacgtggttaaaaggtatcaatacatcgctttcgaattgtggcttgcaggtgcttggagtggccttgcatctcatactcttgtttggtatcagttggttccctactacaggagggtgatcctgagctgcaagtgtgtggtcctgaattgtagacaagtggttttgagctacaagtgcatggtcttcagttgcaggtttgagagtccccacatgcaagccttaggtgagtcgtcatggtgtacctttggtcaggtcctcaaaccatgcaggttcgttgtcgctgctacttgta

SEQ ID NO: 220853 - DNA, 3774 bp, Cannabis indica
gaaaagattacttgaaatagaattttatttagggcacaaagcccaacaatttgccccccctcaatattttattcatataaattttgtatataatttgttgagtattttatattttgaccccataaaaatattttttttcatcttgtccttatatatttttatatttatctccatgaaatttatatttttcacttttattctcacatatatttatttttattttcataaaatttgtatttttttcaataaaaattatatttttcattaatatttttttaaaaaaaaaatttgcccccactaaaatgttgggctggctcggccacttactccccaaaaataagtaaggccccatttggcaaaagctaagagttgctatgataaaaaaaaatgtttagtaaacaattcaaaaatatcttattgaataatttatggagaagttaaagttagtacaacccaatttttagaaagaaaaaaagtattttgattaaaagactctataataaatttatttatgctaaaaatatatttacttattattatatcttaagaaaataaaatatttaaaataaatcaattatattaaaataaataatattgaaatatcttattttttttatttttttcttaaaaaaatattttatattttatatttttaatattaacatttcacattaacctagagtttcttatttgagtttctaataatttattttaaatatgataaaaatattatttaaaaacactataatttatgtttatcaaatgtatataaattaatacttttaagagaaaataattaaagttatatataaaaaaaattatataacgtaagttttatatatttgtaattataatgaaatgaatataacattatcattattattataatagaatttaactttcttacattattataaaatttataatctattaaacactctgctcaacttttttctatagttctactgcagttttattttttctcataacacagctacagttgttttttcccacaacacaactctgtcaaactagctctaagccatgtgaaacaaatttatggttaccatataataattatgtaatatattttgacaataaaaatatttgatacaaaatttagctcttacaaaaaaataaatagacataatttagtgatttcacacatctcctcacaaagttcctaagttctaattctcctaacatataatatatatttaacaaaaaaaaaggaattaaagctgaaaataaagttttgaggaattggtatttttgaaaaccatttgcaaggccagcccggcccgttaagagttggcccagttgcactaaacgccacatggcactctcctattagccaaaaagaagtaagctcaccttggtccccgcacgctatttcttcccacgatatttaaaatgctttgcatgcaaaattttcaaaagtaacgtttgttaaaaaataaaataaataaacaatatatatttttttaaaagaaacgtttttctcaaaaaataactaaaatcaaacaaacaaaattaaaaaaaaaattacaattttcaagtccaataaggtggacctctctcccacatgcaatagcaacaaccaaaaaaacattaattaataataattattatattaatttttaccgaaaaaaataataataaattaataattattacatcaatattatctttgtaattttaaatttatttctatttattttcaatttaatttgataatctataataaataagagattattttcataactatacatttttttttctttaaggcagctcattattccataatttgaaatgtattttttaatagtagagaatgtactataacaaattttatgagaatgtgtaacataataattaagttaattaacattttttggaaatgttagggatgatcatctcttaattaatttttatttatatatctaacttttactaataatatataggttgtagttatattctttcatatcaacaaactcataattaaatagtataatatatagacttattagtctctatactttctatatatataaaaaattaaattattgaaaattattaaattatgttcaatctcttgtcatttttagatttttcaaaagattttaattgtactaaataattttattattcaaatatatttttgttaatgtaatttgctgtgatatttaatcttgataataaatgagactcatatagtcatatataccaaagaaaaaatacattatttattatttaactttttttttagaaaaaacaatttcatattaaaacctcatgagtaaatcaatttgggagaaacatcaaagagaaaaaatagtgacagacaaaaaaaatctatatgcaaagtagtagtaataattatactaatattaatatttaggggcagacccacatagaggcgcgagggaggtcttctgaaaaaaaaaaaaaaaattaaaaaaaaaaaatgtataaggtatctcatatatatatccacatatagagttaaaagttcaaatctcaatttgagcaatttttattatttttttttttttttgaaatttttaaaacttatttttttggaaagatagtcttagaatttgaacttttacttgtatttagtgctttaatttaactattaaaaccaacaattacttttttactttgaattatatttaatattataaaaatataagtttgtatcaatttttaatacggtatattgtgtaaaaaactaaattatgcccctcttaatttacgaagaaaaaaagtttgtcctccccaacttcaatcctagattcgcgactgttaatatttctcaatatatattaattattatcacaatgtatacaaatatatataaaaaaaaaatgctaaattaaagctatttttttctttattattgcagtaatataaaagctaaattaaacttaagaacttttttatttacacttttataattttataattgacttatgggattagaatataatattaatttattgtattaattaataaagttgtataatttaaagtgaaaaaaataaaatatatatataaagataggtatacgtatgcatggtctcatattaccaacttccaaaatcgatgtgttattttagtgtgttagttaggtacttatgattaatataattacaataaaattcataacataattataaatcattagaataaattcacctttatcttaattgttggatttggattgtattgctatagattctctgtttaatttagatagaattaaagcatttttctaacttattatatatttgtggttccctaaaaaataatatttaggatctttttggcatggtttttgtttttaaaattgtattttaaaaaaatcacacaaacttaattttgtaattttttgaacacaaaaaataattatttcatattttttaaaaataatttttagatttttttttttttgtaaaagtaaaagctttgataaatatatttataaaaagatataaatatttttttgaagaataaaagtaattatttttagtaatgtgttgtataaaatagtagagatatttatcgcgacaatatcaatttttttaaacattattaatttaatacattgttattgtttttatatagatattttttagtattttaatttgttttagtataactttattaagttataatctcttaattagaatacaatttgctataaatacttttcgggctaaagaatgcaggaacaacctaccaacgtattgatgacaagagaat

SEQ ID NO: 220854 - DNA, 1207 bp, Cannabis indica
ccaatctatttttttttttttttggaagctaaaatactcaatgtttccaaaatgtactacttttatacagaaaaacagtggaccttggtgaagaaaacaagcaaaaaaacaaaatgcaatcacctcaaaatcaagcaaaggaggaccactttcggacaacaaagtggcacttaagagactgtgaagactagatgtggcaagtagagcaatatcttggtcttttttgtacctgagaacacagaaaactgcaccgtaaatattaattccccatgcatgtagagcatgacatcaatgacgtatcaacgttagttaaagggtaagaccacctacataagctccaattcaaacaattatataaaatttaacagaaagacacacgaatagtacagcatgacaattgcatacagtttttgaggcattgtaataaaaatcactaacaattccaatattgtaggcacaagtctgggtaaagctgccttcaattgcgttctggtgatcaaacctaccatctggcccagagcatcaactgatgatagtcgaatctgaaataaatacaaatttaatcactacataccacaaaaatagggcatactgaaaattagttaacagtttgaaacatgaaactatgattgaacagggcattatgctaaaacataaaataagtctgtacatagttatcacttttcaaacattatttgtagattgtaaactcacaatcacaaaattttaagccattcaccataataaaataaatcatgttgtttccatcttaaacttcacatgaatttcatagaaaacatgatcatcacataacataatcaggaaaataaaaactcatatgcacttttgacacatttaaaacatggcagaattctagttttcgaaagggaatggaaagggcagcaaatgagtttcctgagggttataatatgagagtatgaagggttaagaatgaaagaaaacaaaaaacaaaaaagtgggggaggaagaaacaaatttaaaaccttcagatctcgtgaagatgcccaaactttcagtaaaagctcaaaagcagaattcaaaaatgacctgcagtaaaaaatagatagcatattaaacataatttggtctaaaattatatatccaaagagcatcaaaaaaaaacctacgactatcaatataaaataataactatgaaagtgccgtcaacaaatgattgatctcacat

SEQ ID NO: 220855 - DNA, 3386 bp, Cannabis indica
ctgtgtgcagagatcggtattctctcttactgacccatgtttatctttctgctgaatgaaacttgtttcttgataatacgaaagctatcctgaaccttcttagatacattaacaaactaccgaaacagcaaagacaaaaccagaaaaacttagaaatattacataattaacttactatatagattactcaaataagcctgtataggaaattatactaacctccaatttgagctcttcttttgttgcttgtgctctaaggtaaccaaactccgaaaaccttttcaaactccagctgctcacctgtaaatcaccttaactatcaaattagaagttgttgcttatgctattatttgaaatcatttgggataagagaaagagttacgtcgatagggaactggtctagagagaagccagccatgccgattactgcatgcactggtgcggtatagttgctatgatcgtatgtgtcaatcccactttgatcttttttaggcattgccaaacactcatttctgtaaacagaacaggtcctctcgtagttgtggacatgtccgaacagaaccaagtcgacctgttcaagtttttaaaagttacaaacaaatcaatcttaagaccagacaagtaatgatagagagaaagagaaaaagggcttttactttgttggccattaataatggttcaacttcattagtgaagttttgatcaaaactatagagtccagttgaggaagtatacatgggtctatgcctgaaaattagttcaatattattaggttgagcttagtattgaatgaagaaatattgattaaagaccaacttattaccctgtgaatatcagccaaggagttttcgatcgatcaacagaagccatatcgtttttcatccattcatactgcagacacatcaatccatacacatcaatccatatgagaacattatctttcttttctttctttctcttttgactaattacctgttcagaatccttttcccaaacatgctcggtggatatcacggtgaagtgaacacttccctgttcaatggaataccaaggcttatccttggctgaagttggcattggaaagtaggtttcgtaaggaaccccacattctcctcccgaatctggagtaccatacaccggcgataactctaaataatccctagaaatcaccataaaactttgtgatcaatataacattttataagcattggttagaatggtaatgttggggtacctacctctcatggtttccaatagcagtcatgtacgaaacccgagaagcaacaggggagatttgatgaaggaagaaatcccattcaacaagaaaaccagtggcatagcttatgtctccaatgtggaagattgagtcaacatttccagactcaacttctttggctatggcttctatcactgaaattgatcctggctatatgaattacagaccactatacaagtttagtttctaggaacccttttcgataatcgtaacaaagaatgattttttataagcattgaattgatgtatgtacctgaatataatgctcaatagaggcatctttaggagcttttcccatatcaccaaatgcaagaaatttgagttcatctgatcctcctgctggtggagtcttgaactgaatttgttcactccaacccactgaatcactgcattttaaattttatcaatttcccaatagagggaaattagtacactcacaaactcctttcagtgtattctttctaataaccaagaagtaattttttggatggattccaatgattcataatttttcaagtattttcaggctcataaattgtagtgtttggtatggggattagatttggtggaaatgagaatgtaaagaacaactcatgttcggtaaattgaactttaattgctcggggatttgtgtttcgagatgaattctactttttaacttgtaatcttgaattcctcaaacacttaagtttcatattctcttaatctaaacaccaccaaacttgactcccaccaaacccaaaccttcgtaccaaacacccctacatgatctacgagttcttcgcaagtacattaatggctattggtgacacaaaaaatttaatttttggtacataacgatacagtattaaatatatatgtacatattaccttccatatctataggtgaattcagttaaaggttgaagaccagtcatgattgctgaatgaatgaatccagggtcgtgccacccaaaatcctttgcagggctagctagaaattttgattctatttttttcacattataaaacacatcaactttatgttaaaacacaacaacaaagcctgacacgaaatataaaagcatggcaaataatatataataataataagacacaatgacacgttttgctgcttaccctttaaaatatcataggtacttaaataaaataaatataaaactcaccacacatatctttctgtgtaaatgttgcaacttctgatacttgtgtttttccatctccatattctaccttctgaggcaaactatccccactaacccatgtcactctcatctgcaatgcaaccaaccatataaatctaaatctaacatggtttgaaggtttcacgaaactttatgtaatgaaagttactaactgatgttgctgatgaatcgacacttgagatatgtccgtacaacggcatgttagggttgagaaaggttaaaggagcagtcctggcttgaatacagggcgtgtcgaagccacccccgaagagtatgaattcaatgtcggttcttatgtttataacatgaaacgacactgaagcactacatgtcgtaatctcgcatatgccttgcctttcgtatttcttgcattcttttttcttacaacttaggtagtctggatcttgagttaaataaattgactgcaatttgtattaccaatatagttaattacttaacataaaattaaaatgtcaattcataattaagttataatgatctcaaaatgtagcaacaaatatagtatatatggttacattgtttattagttaaatatttaaaaattaggattttgtattataataagtaacaaacaaattattaatgtaggcacatgaacacaacctaaactatgtggtactattaggaaaaggaacacactacaagaattataaatttgtataacacaagactatgtatatatacatatacataataaatttgtatatatatacatttttaaaaagttaagtactataacaagttaataaagttttgttattttttgaaaaaaaaattcctcacgatttattattgtgagtttgtttttggtaaggaattatttcataaatattcaaaaaatagcaaaaaaaaaattatacatattttacatatttaattttttt

SEQ ID NO: 220856 - DNA, 2947 bp, Cannabis indica
atcatatcgttgcaccgagtatgtatctctctttccttgaagtactttaagttcagttttgcaagccttgattctctgcttaaaattcccagtaatactcttcccccacacccgaagcttctcagcacaagcttctattttctgtttgaaattatgcccttcactattctcccagcagtctttaacaatttgaagacataatggttcctttagccaagcattctcaaatttaaaccggtgagagggaataaaagagtcttcaataatcggtttcaggaatagaggattatggtcagatgaggtgcactcaaggttgaaaagtttagcaaaggggaatacctgactccaagccgaattgaccagagctctgtcaagacgagcttcgatccatctctgtgtcccgcgccctttctcccacgtgaaacgatgccccaccaagtcgatatccattaaagaacattcagacaaagtttgttggaacccctcaatcaaccaacgggggtaagggttgccacccttcttctcttcattactcacaatattgttcaaatccccaatcacacaccaaggtaacgtatagtcgctagccagtgaacggagaagtgcccaagtatccctgcgatttgctctgtttggttccccatacactcctgtgagtctccaggtctcgttctcccccatacaaacttcaaaatctatgtggttttgggagtaacccaatactcggcccatatcactttctttccaaagtaaagctaaccctcccttgtccttgggcctctacaataaaattaccttcaaagcccaagtggcgacccacccatgtcattctttttttatcacattttgtttcacaaagaaaaataaaattgggtttcttttgagatataatctctttaaggaattgtacagtccatcggttcccaagcccacggcaattccagcttaacacattcataactcctggcgggtctgtccaacagaacccgccccattcaagttttttgggttgacaattttctcagcagacattgtctcattctggcccatagtctcctcattcaagtcttttgaattgtcattttcctcaattaccattgcttcaaattggcccacagcaggcccaataactttttccaaggtagttttcctcctcttcaaatctagtatcattaaacgattagtctttgccacctcatcaatagagattaccccatgagctgttgacttgtcatttaaaagaccttctatagttggcactccttgtccacaattaatactgatatcctttccatgattttttcctatacccccatatttcggctgttgactaggaaaacttgatatggtgtcattattattattaaccaaaatcgtgggagagatcacaggcgatatctcctccttgtccgtcgtagtggtggtgttcgacgtcgccgccgcaggtttcagagctactcccgacttcagccatttggatcctatagaataatcccgtcttctaggaaccgctttcaaatctaaatcgtagttctttgtcaagaggtgggctggtgtatcaaataacttatcacagaacttctcagagtgtcccaacactccacagataaagcaaaaagtgggcaaaccttcatatttgaattgtacatgacagaaaagcccatttttcctctcaagcttcatagttttctctaatggccaagtgatattaatctttcttcggacccgtaggtaatatctccatacaccaacaaagttatttagatccgattcaacaaactcccctatgtaatttgccacatcccgtacaaatatttccgatttaaaacccgatactatttcatgaagctgcacccaaaaagtcaagtgattaagttgtactcttcttggattttcccctggtttaacacgttcaaaaatgagtggcactctatcgaaagtccacgggctgccttccataactcgatcaatgtccacatcgtgataaaattgaaagagaaatagatttggttccaattcttttacatataatcctctgcccggttgccaaagggtggccatcttgtgttgcatagcttgaaaatcgatacttcttgacgtgagaaaacgacctactaacaaccatcggtcatctatttcagagagatcatcgtccttatcatcatcataaaatagtcctcccacagctctctcctcaaccattccttgatcatcttgatcttccaaatctaccacaaccttacctcgtgaatccatactctcttttcttaagaacagaacaaaagcagaacaacttagaacagatcaataccacgacagagaaaaatcataccatgtcataagacaagactcactcgtattattaaaacttaatacaaagttaaaaaaagaatatacaaacacattaacaaattttgcttatactttacaaacagtgtatatatattttattaaatatttgattagtattattaatatttataatgctattattaatcgagtatatttattatgataataaatataatttgtttattaaaaagtcataacaattttaaaaatgaaacatttaagtttatttatttatttgaataaaaacttttttgtttattaaaaggtcataaattattgtaaaatgtaacacttatgctcataatttataaaaatgtgtttaaaaaataaaattataattaaatgtgaccttatgtattaacactgaatttattattattgataatgttaattaattattaatctaatatatttgttatgataatgtttgtaatgatatatttttttggactaagtttgtgatgatatgtacatataaatataaatttataaataaaacatgtatgtttattattattttttgtataagtttatatgtttgttatttatttttatcatatatagtttgtatataaaatttagattatgtttctca

SEQ ID NO: 220857 - DNA, 2580 bp, Cannabis indica
tccatgcttggattggccatccaggctcgatacatggtacgaaggccgactcgattgcatcgctccttggtttcgacctctttctcctcgagcaccctcttaagttcattacattcatccattttggtcttttatgccttctcggcttcttcaagacttttctttgacttctcggcttccttagtgagacgattgattgactattgagcatcgttccattgcttgaccacggcctcacgttgggctagtgatttttgaacctcactctccatgtatttaagtctccttaggattcgtcggtgggaggcaaaagtgatgaaagaagtctggaaaattcacaagcaaaggcatataagagacgaaggggaaaatgagagaaatatatggactaagacagtaaacttaccatgagggtatgatacatgctcctcgtaagcatttcttccaaatccccacgattgattgaatcccaatcaaagggaggagagccttggcgccagtaggcagacccaaactcctgggcaaattttgaaccagttttcctcgtcgcggcagacaatgttttgatggcctggctcgagaaagtagaggtgtgagttgtgttgggaggaggcttgttggtacttagattaaccggaggaggagattgctcatgagtctcagttttagagacctcaaggtcgataggctcagagactttcttctttttatgagcagtagttttcttttgccttttcaaaggctccaccttagtgtctgaagggatccctgagtgggttgccctcttcttccctttccgttgtatgacgtcctcgaagtgcatatctacgagacaagataaaatgttacaattatttagaggcagatgaaaggggagtgtggagtataattttccacctaaaaagtttaccaaaaccactagaaggcgcttgtgatcttgaatatatcaaagggctcgattggtcctaaatcctagcttgtgcctaaatgacttgccctatctatcatggtgccatattgctcggctatgccataatacgactcattacaattaatctggacatggaatctagggtaccaactgtcaaacctatgagcaatacggtctacgaggagggaatgccaaatgtaaaaattaaggcagctatctcggaatgtaactagtgtgttacgctcaaccttaagtattgtgggtgaccaaccacattgattacctcgggatgctccttcaccgacttctcgaggggaaatgtctcgaaggtattgtgcttgagccatgcgatcccaagccttatccccctctagaacgagaacctgctgccaagaagaatacttggaaaatttgtaatcacaagtaaactccttgtcagtaaggaggtccacagatctcagattgacctagcttagaaggaagtcgcacgacctaaggccgtgaggaagagttaacaagagcctgcgctggttggccatctcgggagtagggacaagtctttttgagagggctgtaaaaaacaaaacctcagttagaaagcttataatgaaaagacatggattaatctaaccaaacctgataaaaacaatcacttatgaattttgcagaaggtggttgtgccgattgggaagaggccagttgtccaaaagaagttatctttgaaaggtattttgtttggtaagcccacaataatttacggctcgccagagtgagtaccaagataataaaagcctattgtggcattcttccttgctggaacagccttaacggagtagagatactcgatttccacaagcgtagggcactcccacttcagaattttatacaaaaccttcaaactggcaaggattttgtaggagatgggatttagttggaatggggcaagctcgaggtggtttacgtaatccttaaaattcacggaggggaattatggcccttgccctgatgtgttcaaaactccaagcacctataccagtcgagccactcgtactggtctctccattggctcccttagacgtctcgcctgtgagatgcgcaggcaagtaacaactaaattcaccagctcgtactgacctaactcagcatacttgcctataatcgattccacatgtcctcagtgaatcgcctgtgtagcctgagatagttcgcaccttcgattctattaacttggcctcaaaggtgatgttaggatcctgaggagtctttgatttacgtggcttaagagacattatttcaaagtccaagtcaattagttcaaaaacattcgtgacttcgggtaaaaacaaaggcttagccaaaggtatagaggacacactgtgggttcaggccaagttgcatctcgcaagaaacggtgtttgccttcagttatttcttgcaagaagtgaatgtgttgactagcattatcttcctggtggaccttcactaagtgttccctaaccctatcatcgtttaactctaatttggatgtgggttttgaaaggttgggtttataagggacgacaatttctattggaaactcaatttctatatcttctggacgataaacttctaaaccagattggaacattactgtaagaagaaggcaatcc

SEQ ID NO: 220858 - DNA, 5867 bp, Cannabis indica
agagagagagagagacgacaaagagagggtgctgggcgtcgctggagatgggacctttagtgcgcaaaaatagagagagggagagacgaccaagaaagagggtcggggtgttagggttctcgaactggaggaaggtgacggtcgctggggttcttagactggaggaaggtgacggttgccgaggtcctcagattggagggggctttggggttcgaactggaggagctttggggtccggactggagggggcctagggttctggttcgcacgaagtagagagggagagagaaagtgctgctatgttagattttatatggttttaatttggaagagatgaatttatactcatctaattttctttttttaactatttttttaatataatcatttctttatatttatttttatggaaattagcttgtttttagtagcacaattttttattcctatagtgacgcgcgaaatgtgtctgagtatatgtgtacctactctcatagcgcgtcactatatcttaatattaaatttaattatttttaataaatttaaaggtatgatatagtgacgcgctatgcaggttgggacatgcttttccaatctcttctggcgtgattctataggttagttttttttaatttttttttaattaatagaaaattaaaaaaaaatgtatggatattactttttagtgacatttcaaatttttagtgacccacattataggagactaacactgaaaatttagagtcaaattatgtgggtcactaaaaattactcctaaatattttgtgtcactaaaaggccaaattgtagtagtgaatataatattcaagaataaatagattagaaactctaattaaaatgaattaactataataataaaatatgattatgtaattagttatatgaaattatttgagaattattgtatttaagaccccatttattagttataggcattttcgtaattttgacattagaagggtaaaattataattttaatatttattgtgataatataatatattattatatagtatgtttatattgtctactgcatgtattttagacaagttagcacgatttgatcacaatcaagtattttggctcgaaccgagttcggggtacaaaattattttattgtgtgatagaaaaatttcactaaaaatgtctgaatttttttatggaaataaaatgtcagaattttccttagtttctttttatgtggatttgatgccttaagggcaaaatggtcaattgacctattttacaaagaaattgagttaagtcttttattgttgaaaaatgacttattatttttgtattagaacctcctcaccactgaccccccttctctctctctctctctctctcaccctttttatgcaaacttgaagctcttcaattgaattttctggttggtttatgcaaggaactttagttgattttcttaaagactatttaaggtagttatcaattctttaaccttgtttttgatctttgaaattaggagtgtttgacttctaaatgcttgttttagagtttatttgcatgttaagatttgagaaattttttgagaagagctttggttagtaaagctatgatttagtagttcagttttgaacttagtagttttgagtataaaattaatttcagatcatttctttgtatgttgttgttggtgtagctttaagtttgagtatgaaaaactattttatggttaggttgagttctaaagcatgagttggtgctaatattttagtgcttcgatttgtctctttgaagttgtaattttggtgggttgagcatgttgatttgatgtattaatgcctggaaatacattagtttagcataaattttgttgtttatgacttaggtgatgtttgaattgagtttgtgcatttttcggaactttaaaattggatttttaggtttttcgaacccaattgccgcaaccaaacttatggtcgccgtggccaaatcttgcagagagcatttccaattttctcgaatttgttttggccataacttttaacttctaactccatctatggagcagtcgtcactatcttccgcgactgcatctgaatccttcctgtggtgaagcagcttatccttcttatctctattgtaagatttgtcgaagccttgttgctccttgtacttcttgcaaaatctttacaagtgtccagactgtgtacagagtaacacttccttgtttccttctctctgtacttcaatcttgattgagagtgatggtgtttagtcttcgaacttacttttttgggttatcttcctcttgccaaatgcacttcttctttcttggattccttctccaactgtaatttaaaatctttcgacttgagtgcggcaagaacatcctccaatgcaattacgtctttgcaatacttgatggttgccttgacttcttaatatgaaattggaagcgatctcaataagatgatggcctagctttcttcatcaactttgtggtttatattaacaaatcctacaataatctcattatatctatcgatattatcatctaaacaaagtgaaaaaattattctaaaaccgtataacctttctagcaattgatagttttaagtatagttcttctaacttgttccaaaatgcttttgtcgtcttctctgcgatttattttctttgaacactgtttgatatatacatgatgatcgtgtagtacgccatctcctccatttctacttttttctctggtttcttttctgtcaataacatctcatctaagaaccttggagactttctggtgcactaggattcctttcagactttctctccatagagcaatgtccccagttccatcgaaattctccaatttgaatctcgccattgatgacattcaaagtttctttaggaattgcagtggaaagaatcttgattctacattcttaatcgattactaagctctaatttatgggaaaattacgactaacagtgcattatcaaatcaatgaatctttaaacaatcaaataagtagcgaagatacgaaagacaataattagataaaaacaaaggtaaatagagtacataaaaccaaaaataataaatatagaaaataagaaatcaacactaagatatatactggtttaagtctgatatatcgatgtgatttatggttctactccagttttgaaacaccactaaatcttctttattgattgagcaagaacaggtaaattaaagtcgagagagattctctgttgagttcactcaaagtttttcaaatctcacactcttacccaagaatcttcttcatctacaaaagattcttcaaaaacccaaatccattatctcttttttctctatacctctctctctactctcaatctttctctctctctctctcaatctttctctctctctctctctctctctcaagctcaagctcaatcgtgttattgtgttatttaaatgacaagtcaaggtggtatttataggtttgggattgagttcttaaagtcggtggctgcaagaattgaagttgttaagttagttagacaatgactaaccttaaccaactctcctgcaagtgagatttccacgtcagcataagtcttagtgcatatgggaacaacgtgctactgagaccacggaccaaaggcactcgctggagaggcttctgaataggatagaaccagctggagtcgactattcggaactgtcttccagggagaacaacctttactactacaaatatcagaattcgcgatggtcctagaaacaatttttttcggggacagtcgctaaaaaaattaagtaactatttaaaaccgtcgggaaaaatttagtattcctgacagtttaaaatcgtactaaacaaaatagacgatgttttttaataaaatgcgattttttaatggacccttataggagacgttctaaaaatcgtcacctacttctcgcccacatttgccacatgcccacctacttttttttcattatttcccacatgcccacctattttttctccatttcccacaccctaaaacaaaaatcttaactctccaaaaccccactcgcgcctccgcaccatcgccctcctctctcgccgtcctcctccctctctctcaatctccctttcttcttgtctctctcgtccatcgatctccacccaccctcctcccgtcggtctccctctactctccgtcgcatatgtcggaccaccaacacctctttttggtgtccctctcatctccgtctcatacgtcggaccaccaccacctcttgtccgtctccctctctctctttctctctctccgaggtcggtataaatacatttatttatttatattcttttttatttattatatatatttattttgttattgtataaatttaatgtgtgtttaaagttagttgttatcgtaacaaaattagttaggtaaatataaaactaacaggaaaaaatgggagaaaatacagatttctcattaatggcagaaaaatctgtatatttttttcttacattcccgacaatttataatcctgtcctatactataggcgacatctatcgaaccccagcagtctgtaatctgccagcaaccaaatcaggcagaaaaattacaacacctgcatatctaaaggattacaattgtgccccatccagcacaacctatcctataacaaactttctttcttacaagaaattctccccacaattctgagttgctgctcttgctatttccaaaatcactgaacctacttcctttgcacaagcttgcaaagaaaaagtatggaacacgactatggacacagaatttgatgctcttgaagcaaatgaaacatggatagttgttcctcttccccttggccaacacacaattagcaacaagtgggtctattgaatcaaactaaatccagatggttcggttgaaagatgcaaagcacgattagtagccaaaggctacactcaaaaacaaggtgtcgactattttgaaacttatgctcctgtagcaaaatttaacacactgaaattacttcttgctcttgctgcaatgaaacaatggcatctacaccatatggacatcaacaacgctttccttcatggtgatctctatgaagaaatctatatgaaattaccacaaggttacaaaccttaaggcccaattcctaaaaatgcaatctgcaaattgcaaaaaaatcatatacgggctcaaacaatcatcttggcaatggtatgccaagcaaagcaccactctactcaaccaaggcttcactcaatccaagaatgacaactctttattcataaaacaatcacatgacacattccttggattactcatatatgtggatgacattatcgtggcaaccaataacactactgccctacaacagttcatctcgaatctcaacaattcaaattaaaagaccttggccccctacaattcttcttaggcctcaaaattgctcattgtaaaaaaggcatctctgtcagtcaaagacaattcactttgcaactcttacaagatagtggcaaactcaacacaaaaccagtctccaccccaatggagcccaataacaatcttaataatgaaactggaccactgctcacaaatcctacacaatataaaagtctaatagggaagctcatatacctcactataacaagacccgatatctcatttactgtcaacaaacttagctaataccttcaagaaccacgggaacctcacctacaaatagccaacctcatcatccaatatgttaaaggcacaccaggccaaggattattcttccatgctacctcacctgcatgttgcgatatttttgcacacgcaagtgtacgtatcgtttaaagtagtagactcactaggagtgaggtcgatc

SEQ ID NO: 220859 - DNA, 2740 bp, Cannabis indica
actgggcgagttgtgttgatgatagacgttcaacgggggctacttggtgtttctaggagataattgataagctagtcagctaagaaacaacaagtcgttgctcggtcgagcacagaaattgagttttgtactttggcaaatgctgcaatcaaactaaagtgggttcgatctttgttaacagaactacaagtaactttagttcaatgtcttgttatttgggtcgaaaaccaaagtgctacagctttaatagcaaaccctgtgttccataccaaatctaaacatatataaatcgatttacactttgtccaagatcaaattatgacaaagcaagtctcagatcgatatatttctgcgctcgatcaagcagctgatatcttaactaaatctttaaccactgatcgatttgtgtacctaaagtccaaactaaaaatagtttctacaccatttagtttaagggggatgtaaataatatgttaagtagtaaaagtggttaagatagttaggctataaaactgtctactaactaattgtttgttagttagttttttctcttttagctcatttcttgatctatgtacctatataaatatcacttatatcgttaataaagttgagattttgatgaatcaagattgtatctcaaattctctttcttttttatttttctctgtttcaattacatgctacactatacctgtgactcatggtcacataagtatattattttaaaaaaatgagcataatgcaattaaatgaagatatttaaaacgatttgtatagttttataagaatttttgcaacatattaagaaagttcagacattaaaattttaaaagagtaataattcaggaaaaaaaatagtatttattctaaagataaagatctcggtattattaaaaatatgaatatataaataaatatttaaacaaactagagaagcctaaatgatcatattaaatatctcaataaaaaaatgatcatattaaagttttatttcccaactaccaagatgggtgagttcagtttcaacattgttggattaccctatttacaaactttttttttcaaaataccttatttacaaacatgtgcaccttatttcaagtatgtacaagtctgaatgagatcttttattaaggaataatgggaatgagattaataagaaaatatatattgtttacacaaatttggcgaatgagttaaatatttgtatatatattgctttcaacattaatattttaggttaaggaaaaaataaaaattgaagtaggacgatcactgacccaaaactgaaacatgtgttcgtgtccgaatcatagtgatgtccattaaaaagtcgtttgcatgcaacaacattgtaccctatttttctcaaaaaaaaaaaaaaacaaactttactataataactaattgttattgggtactaatttttattgttaccctataattaattagtgatatttattaaaatttattttcttaagttatataaattccgttaaggaagttgctagacactagtagtgtcatttaacaattctcatgatgaagaatgctaccgtcaacttcttattacaacctcttagtcaacttctatgctcgaaaatatatgtcagaatattttttttttaattttttttgcacttgggtgtttgttatacttacaacaccatccctgtaaatttttgaaatttttttgatagtttacagtgctgaaaatacgtttgaagttttctgaacgcgtatggtaaactggaatatcaaaaactctgttttcggtactgtaaactattcgaaatttttcaaaaatttacaaaaatgatactgtaactataacgaataccgttataaaaaaaactttttaaaatattttcgcatataatttcggacatgaaaattgattaaaaagttataataacaaattgtaatttctaattgataatgcttcgggttttgtgcagttattggttgcttgctttagtatctcatctctttttttgagaattagggagagattgacctataaagtgaagttaatttcccttgtcttctctaaatttttggcaattgaaaacaataacaaatacattaattattgtcaactttgtttgaccaagtaaaaagggacaatgaaaaaatagaataattaaaacatatatttcagcaaatcttgattaggaaccaaccatttggaaaccttttacagctcaaaattcttacttttttattttataaatgcaaaaaattattatttagtaaaaaacagacagcaacactcttctgtttgcaccaatcccatcttgccacgcaatcaagtaaaaataaaaaaaaaaaaaaaaaaaagtaggattaaatatttggtgttttacttgcaaaaacatttaaacattaaaataattagtagtatattaaacatgattattgtcggatataataactctacaagacaccattatcttatctaataattcaaacaacgatgtatcttcagtctgcttgaactctccattaagaaatttaatgaagagagagtgtctcattcacctacaattactcttttacccctcttcctttacataattttcagctttcattcatcatggtcataaaaattgcatttaatgctataatacttctggtagttgacaacatcttgtgttaattttttaattgggtttatggtattgttatcacttatcagtgagtgagtatatatttggagccaaacgtgtccaaattt

SEQ ID NO: 220860 - DNA, 1442 bp, Cannabis indica
tatacatcaaacaatttgtaaggggtgtagtgtacaatataatttctcatatataggcagaggtcaacaacaacaacaaaatagtactagtttctattctttcgggctacaataaattttattgttgcctcattttgtccctattccatcccacaacacaagaattaaatcatcttactttaatgaagaaagaaactcaattattaatatttcaaattatataaatagtataaatataattaatctgtccatatattaatatatcaccttttataattaatttgtctgatcttctacctttaattcccttcaaaataataacaataatagtaataaaacaatcttaaggatataagttgtgagacccgctatagatttataagtgtctatgtgtgtggtcctatttgcatttacttcaactactaactcctctagttagcctttcctagctagggatggaaattagatgacaatgacatttttttttgtatatgatgaagataattaacaataaactttttttacaaggtaaagaaaatatgcatgaatatatagattaatcataagaagataattttaatatagcacaattaattattagtacataagtatatcaagtcgtttgcaataatcagagagaaaattcttatagaaactttaatttaaggctaataaagcataagcaatcaaccgattgtccccattaccctttcttattagtatggaatacctaactagactgttatctaagaatctctaaaagatttgagtttaattaaattgttagaaaaattaataataatccctaaatacaaattttatataatttataacacaataataatatataataattcagtatgcgtacctagttgatctataacaattatctcaatttgatagtgcaatactataacctaagtcttccttcctaggtctctaaatcagatcagttttatttatttaattatcaaaagtataaaattatgatgagacagtatatgtttatagagttaaggaggagacttacctacaaaccctagcttgctcatcaaaggctttagttaactagaaaagctcacactcttgtttcaactaaactttacacacacaaatgctaagcccaccaactattgatcactagcaatatgggctaacacaacaaataactatccaatcaacccaaattttaataaaattaataaaagttaatgtaagcccaaataaaaagttaaaatctaacattctctcacttggactacattaatttaattatatatatattatattaaaataattttatttaaaaacgaatcatgagttgaacaataggaaaatatttgtggtcactttaaaaaataatagttttttgatagtatctcaacataccaatcgaatttaacatttgatgctgaactgtgacaatcatattgtttttaaat

SEQ ID NO: 220861 - DNA, 3445 bp, Cannabis indica
agagagagagagagaagaagttttttatctgaaaattccttatttaacaagaaccaaaatttcatgtgattaaggcttcatattcggcttcattgttagaagctagaaatgtgaaccgtagagcgtcctggagtcgtaacccattcgatgagatcgttgctatgctagcaccagacccactttcattgaatgccccatcaacatatactttccatgttggcattttctgggctggcgtatgttaggctatttttagcctatgttttgggctacaaatagagtcgtttttcgatgttttaggacagaattatgcttgttttctatgtttttcaggtttcccatagctgtggacgttcagggtttcaaaagtacgataaaagataagttgagccaagaaaaattgaaaaattaggatttggttcacttctggccacggcagatttattaacggccgcagccaagatctggtagaaaggagttttcgaggttggcccactagccgcggcaagctactccatcaccgcggccaaagcgacactcgccgcggcgaggtaatccatggctgcagcgaggtttcgtgcagctggagacaaatttcgttttttaaaatctgggatgaaaaataaaaaggacactgcaagaaagagaatatgggaagcaaattttagacctaaaagcagtcaagaacggcagaagaagcagagtggcggcctggattcattccaccaacagtttctttctttcttccttccttttttatttcttttatgttaaattctgttttagtacattcttgatctacgacatgcattttaattttattgtaccccgaataggcataaggatagcaacttgaaatctgaggtggcgtccaccatttggtcaattcgggcaatgggaagcagtcctttgggaaagccttattaagatcggtgaagtctatgcagacccgccatgtcccatttggtttaggtaccaagaccagattggccaaccacgctgggtaatacacgtcccggataaggttgttggacagtaacttatccacctccttctccaaggcgtcagcctttactgggtcaagcgggcgtctcttttgttgtaccacaggcaaatctgggttgatgttcaagacatgggtcatcatatgggagcttattccagtcatatccccctagcaccatgctaagacatccgtagcggccttaaacatgtctatgatcttactctgctgctccggctctagaatttttcctagtcagataattatcttccttgacatcctccataggttctaaaattatcttggccccaattcgtcctgttctactgccaccgactcttcgccccctcgcaccaccaaaaatgacaaatgtattgcagcgttgtaacattgtcttgcttctccttggctccccctcattgttcatactcctgcctcccgagtagggaatttaaggcacaagtgtcgaacggaggtaattgctccaaagtcaactagggtcggcctgccaaggatggcgttgtaggcggtggggtagtccaccaccacaaaggtgcaatatttgaaggttctttgtggggtgacggggagtctcacttttcccattgggatgagagtgttgtctcgttgaacctcatgagctgtgaaccgatgggcgaaaggtccctgtcagtgagcccgatggtcgtaaaagcatctttaaaaagaaaattcacggagcttccattatccattaacacctgagcaacaactttattggcaataggagtctctatgactagggggtcatggtgagggaaacgtattggcttcgtgtcttcctccgcgaaagtaatgggttgatccatgagcctaagcctctaagttgggacttgagtgacctctcatacctctttgtcatgctttagagctccaacgtagcgcttcaactcgttcctagtggttcctccaatatgaggcccgccaaagatcatggcaactttcccatttggccggggtggcatttcaggcatctactgagggggcatctctccgggatgtacctgacccttgagcatacccccagttcctccttaaggtaaagggcctcccgcctgggctagatttaaatgtggtaacctatttttgatccactcgtacaagtgacctaatcagattagattttcaatctcatcctttaggtttttacacttgtttgtggtgtaatcgatgtcattgtgatagtcgcatcttttgttggagtctctccaagagcgatccctatacaaatgtggaggcttctgataatgcgtattttgccgggtggaaaagtacacacactcttgagaattcgtgacctcagtgtacagtgtgtattgtgggtatacccccttcgttgccttttgttctcagtccgcgtgctacctttagaagatctcttgctccgggagctttgctgagctcctgccttactggtggctggtgcggattgggacagaagttggacgctcaccctagaggggttgcttacaggtgccccaaaatgcgacagtgctagagttaaggtgaggctctggttgtaccctggggtagcggagaactgtattctgcttgtttgaggagtggcaggacgtggacctcctagaagttgtgctcctagtgtatatctcgatactccggtcgggtaataccctccgtaagccactatcttggcttcttccaaattaatgtatttttggactctcttctaaaagtcctagaggctagcggctccttcttgccgtaattcgttccaaaaaggggttcttgtatggatcccggcctgaagcagggccagcagttgtccgtcgtccaccttcttggttttcgaggcctcctccttgaatctctttatgtatttcggtagcgtatccacgggaaatttttttatattggttatggcactaacatcgaggttaatctttcttaccgtaacaaacttccgccggaaactcacttgtaacttgttccaacagtccaccgatcctggctccattttttgaaccattcttcggcaaacccactcagtgtcagtgaaaatcatagacactttgcgtcattactgaccctcatgacggtcatcaccctgttaaatcgggatagatggtcactagggtttgagtctcctgtgtaggttgccatttcgagcattttgaaattttaggggagttccgcctctaagatattttgggtgcaagggtcccggtcctcacaatcaaaatctgagtcatccccattttgtctctgggagactctagcaatgtctttgcggaggatcaccaattctgctaagattccctcattcaaggcgtcccatgacactggtatcgcgtgctatttctcttcgaggtggtttctcaagtcaccatgtttctcgttaattttttatcttaaatcaaaagggggatgccttcgacctttcct

SEQ ID NO: 220862 - DNA, 3870 bp, Cannabis indica
caacaacaattaacaaagaatatctacaaattcacctcatttcgtaaaattgggtttctaattcataaaatttcagcaaccaaacacatttaattaaaactcaatattatcatagtttgaaaaataattctatcttcaaattatttaatctaatatacatttaaagaatcaaaataccaaagaaaaataatcatattttcaccaagaagaatacttaataaacataataatcagagaactcacctcattatgatgatgaaagaagttaacgaagaggatagcagtgaccaacctaatatttttgttttgtggagagacttattgttataaaaaaaagacatatttatatgggctattttcaaaaatatgggaaaaattattaaggttataattaatatggcataaaaagtaaatgtcttgtctcgtgacatggtttgagtttgtttcgttgtcgtagtctgattgtttgttagctttggtattgttctattggatcagcgagtgtttatggcttcagggagtcatctgaatatggatgtggtagggaggcatgaaggggaagaagatgaagatatgttgctgctggacgatgacgagggggatctttcagggattgatgatcggtggtgcctggttggacggtttctcacgaagcggagcatcgattttcaggcaatgcaacacaaaataacttctctatggcaaccgggaagaggtatgtatgtgaaaaagcttaatccaaactactttttgtttcaattttaccatgaaattgatattacaagggttatagatggtagcccatggaccttcgaccgggctccattaattttcgaacgattaaagacaggggagaaccctcgattggtgtctctgaaccgcctagagttttggattcgactccataatatgaaatcgggtttcatgacagaaaatacagtctgtaatgtggccaactatatcagaacgtttgtgaaatctgaccccaataactttgttggtgtttggagggactttctgcgagtccgggtttcattgaatattgacaagccattgaagaagaaaatgaagctcgaaaaaaagaatggtcagtcatgcacagtcatctttaaatacgaagacctacccacattctgcttttatctgtggtgttctgggccactcggagcgattttgtgataggctatttgatactccgcctgagcaaatcgtcaagtcgtttgatctatccctgaaggcggctccacggcgtagacaacacactataggagctcaatggctccggtcgggtgtagccatgaaagccccaggtacggcgatgccaggaagctcggtggcgattaggaatgctggaaatctggagattactgttggaaattaggggattgattctcgggtatcctcatatattacgaaggtgaatgcaactgattttgtgggactagaatcggcaaggggaagatttatgagcaatgatgtggaagagatgattatggaagctccagggaataatttaaatggcaagtcaatggttcaaaaagagaaagtcacggctggtggaaacgaaaatattgactctctccttgtattggactctaagagaaggaggacatttaatatgttagagtcttgtggtgataatgggccggcccaattgaatagtgctgaaactatttcaaaggattttgacaattatacaattgagagtacacattatgaaataagggatgctgatgtggtaatggaaaatcataaggaagttagcccaaaaaacttgtctggggcgggttctgatttctaggcctgccaagcattatgaatgtcttgagctggaattgccgcgggcttgggaaccaacagacatttcaattccttaaagagttagttactcaaaagaaacccaattttgtgtttttatgtgaaacaaagtgcaataaaaaaagggctgagtgggtgggcaatcagttgggctttgaaggatctttttgtgtggaggcccaagacttgagtagtggattggctttgtattggaaagagaaagatgagggtgtcttgttgggcttctctaataatcatattgatgttagggtggataaggttgggtgtacaagttggagattcaccgagttttatggagagccaaacagaaatcccaggaatcaatcgtggaaccttctctttactctattcttgtcttcatctctcccgtggtgcttaattggtgatgttaacaatattcttagccaggaagacaaaaaaggtggtcaaccataccctgttggtttattggagggctttcaaaaagccattttcgactgtcagttggtggatatggagcttacaggatactagttcacctgggaaaagtgcagaggttcgaatttgtgggtggaaatccgattggacagagctttcttcaacgaagcgtggtctcagttattccaaggtgcaaagctttataaccttgaaacttctacttctgatcactctcctatttttcttgaacccgtagctattgatcaaatgttgaagaagcatcagtttaggtttgagaacgcctggttaaaggaacctatgtgttaccgaattgttgaagattgttggcataaagctggtacaagaggtatttttggtaaattgaattcatgtgctgaatctttatcgcagtgggggaaatagataattgggaattttcgaagaaggattcgtgaatgcaatttgagctgaagttgttgaaaaataaaagggatgatatatctgttgctcggtacaatgaggttagaaagcaactcttcacagttctcgatcaaagggaaattttctggaaacaaagagcaaagcaattttggttgaaagagggagatcaaaatagcaagtacttccacaaagcagcaagcaatagaaggcgtaataatcacatcttgaagctcaaaaattctcagggccaattcgtggactgggacaatggtttggcggatgttgtggttaactattttgctgaccttttctcagcttcggatactgagtgcatggaggtgattgacagcattgatcaagtggttccgaatttagctaatatggaatttgccaagccagtcacggaggaagaagtgcaggtagcagtcttgcaaatgcaccctgacaagagtccaggaccagatggaatgactccggccttctatcaaaggtgttggaatattgtgaaacatgatgtggtgatggtggttcagaggttcttttctaaaggggtcttcgatgagaattgtagtgaagctagtgtggttttgattccaaagaagaaaggtcccaagactatgaaagatttgcggcctatagccatgtgtaatgtgctttacaagaatgttacgaaggttatgacaaatcgaatgaagccttccatggattctattgtcgcggactctcaaagtgcctttattccgggctgccttatctcagacaacataatgttctcctttgaggttctgcactacttaaaacgaaagtggcaaggaaagaccggttgtatggccttaaaacttgacatgagcaaggcatatgatcgcattgaatggagattcttggaatctgtcctgaggaaactgggttttgttgaaagttgggtgcgccttattatgcaatgtgtttcaacggctcattacaagattttacatggatggcatgagatgggccctattgttccaactaggggaattcgacaaggtgatccactctctccctatttgtttattctctgtgctgaaggcctctctgccttgttgagaaagtacgaacgactggggtggattcatggatgtaaggttgctaatggtgcaccgcgagtctctcccatgctatttgcggatgacagct

SEQ ID NO: 220863 - DNA, 1242 bp, Cannabis indica
aaaaaaaaaggaaacaaaggcctggactggacttttattttttgtttttccaatttattcctaacatttttgtcattatgtgacagtacacataataatgtttagtgaatctagtgacgaatgcaccaaaatgttacaaaaatgaaacacgatgcttcaaacaatatttgccaaaaataatagcaaacaaaatctgaattattatgtaaaactttattaaattataaagtgtagctcaatttgtaaaactatcttccttccttagctatgaagtacttcacagaagaagctacttatttaaaaacattatttattggaattatataaaataaagtctgtttgcatcattgtttacccaatatttgaaatgggtccctttttccctctcgggaatattagtgatcataataagttggtattattaagtcccatttgtttgatctgcaaatacagatagaattataaatatatttgtacatatgtatatattatcttgtgaggggggggcagtactatttgcagactagatccttggaaggattaatagcctaataatacatttgtttattgttccactagatcgttggatttggttttacttacaatatatatattattggttctacttttgtatggggcaactacaattaattatgacataaactatactttttgtttgtatattttttgttttgtttctgtaataatattcctctttatagtgtgagataactttttcattaattcgatattctaaagagaaaattatacaagtcattcatttacttgcactgagactttaaattttgggtggattattctttttcatttattctctttagtattttaaacttctaatctaatagttaaaatagaatcagcaattaattagcttggaacataattaatcttccgacatttaaaaaagatgtgtctgataaaactatagtgtgttaaaaaatgatataatttgatttaacggcgcagacagttacttgtaaaatgaacaaaaaatcgtcagtagaactataacgtactattcactggtgtgagagcacatggggagttcttttatgcaacatacttactggcgttactggcaaaaccctaatctcttctcaccaaaattattattacaatattctttcttcagcagaaattattattattatattaattttcttcatattatttttagagaaaattacgattctcaagtaagataaaaaacaaccgcaattt

SEQ ID NO: 220864 - DNA, 2889 bp, Cannabis indica
tcaaccctaactcgacccgtaaagaatcgtgtttgtgttcgtctcaacttattgcgacccgttttgccattattgaagctggagtcataaagaaaaattatagatttaaattccattaaaaaaattatatacaattatatattatataatttgttatatataataaaaattaaaaattttaaaatattttcaatttcatgttaaaaaaataaatttaattttttttaacttaacattaaattactaaatatatatttttatataattatattattattaataattttttattttattatattttaaaaaatcgtgtcaaacgtgtcaaattcgtattaagtaggtcatgttgtgtttgatccgtttttcatttcgtgtcaagtcatgttgacccgtatctaattttttcgactctaatccgtaaaattcatgctgtgttcatgtgatctgtcgaaactcattttgccacctctatttataagtagtagtgtggaaatatttttgatattagaaaaagcattggtaccagaatctttatgttaaatggatctttgtgtaattttctcttcagtacgagaaagattttgttatcattgataaatacacttttgtttcctctacattaacaactcatacactagctagctaagactatattccgttattgacagatggagaatgtgcaaggacaggtggaatctggaggcataaatgttgaaaacgtggggaatagacagatggagattttgaatgttgagaatgggcctaattatttggagttgcctaatccggatttctctttaggcccagatggagaagaaaggatcccggatattgggccgactatagcccaaagtcttgaaattccccattcttggctttgtagatctcaaaggccccatgattttcctgagcctatcccacttaaatggcccaatgatgaccctaaagcccaagaaaactttttcaatttgtatggtcctgatttaactgatatgtacaaggcccaagcctctttgatatgtaatcctcctgatctttctatgatgatcgtgcaactgctgggaacaaaaaaacgcaagcctcatacctggtatcacccgtggcctgctgtcactagttttgaaattcctcggtgtccgtctgcggaggaagaggaggggaatgataagtcacagaatgaagttgttgtcaccccaaagttcagccttgggtctaatgaaggtggagagaagccaagacgaaagagttcccgtcgaattgagcaaggatcgatcatgtttaatagaggctctggcgttaaaacctgacgtgggaggaagaaggctgagttgcaacaatgcgagattaaggagtttgcaggtaacttagaagttgttttggaaaattgtattgataattctcttcaattggattttggcaatggcgaggaggcggcctcaagcatgcccccaccgtccttatgaggtgcctatcgtggaattgtcgtgggattcgtagacccacgacggagagaactcttcggagtttaatccatgaaaacaatgtggatgtgatttttttatcggagacaaaggtaggagaagaggacgtgaggatggttctgaaccgtttgggatttcctaatgtggttggcatcccttcggtgggcatcggtggaggattttgtttggcgtggaggcaagttggattgattgaaataaaggaagtttttgctgttgggtttcatgcttatgttcctgcagttcatggaaatgtgggctggcacttgttgtgtttatatgggactccttatgctgaggagaaagctgagttttggaagtgggttactgaattgatatcaggtttgagggagtcgtgggttgttttgggggatctaaatgtaattttggaaggttcggagaaaactgggggaagggaatttcatagtcgggagggggcttttctaagggagtttttggatgaaactggaggtgttgatttgggctttcatggggtccggtgtacctggcacaatgctagaaagggaatgaaaaatgttcggaagcgtcttgaccggggcttggcggaggcatcttggtgtactcattttcctaatgctaaagtgacaaatttgccaattctagcttcggatcactctcctattgtgctatcgaccaacgaagaacaccgaaggcttaactatccctttcggtttttggaagtttggacttcgagtcctggttgtgagaaggtggttgattgggcttggaaatgtgaatttaaggggaggaaggatgaagtccttttaaagaaatagggcaagacaaaaagtgatctgaaaaagtggaatcaagactcattcggcttttgtgatcagaaattgagaaactttaaaatggagctagtggaaatccaaaataaggcaccgactaaggaaaatttggaaagggaggcttcggtgcagttgagtatcttggaagtggaagcaaatttagaaagagtttggaaacaaaagtcgcgggagctttggatccggaaaggggatggtaacacaaaattttttcacgcctcgacggtaattaggagacgtagaaacttgattgaaagtgtggagaatgatggcacttggttacatggtcgtgaagacattggaaattttatgagaaaccggtttatacaagtctttgaatctcagaatactgttatcgatgatgaatttgattctttattttctgagatggtttcggaggaggaaaacgacagcatttgtagaacgccttctgaggatgaaattaagcaggttgtgtttgctcttcacccgttgaaatcgccggggcccgatggtttcccgggtattttttacaggaaatactggaggatagtggggggtaaagtgtgtgagatggt

SEQ ID NO: 220865 - DNA, 1660 bp, Cannabis indica
ttctttgccacttccaggggctacagctggcaacagcgaaagtgactcctccttcggcgtgccctctgttctggtgaacacagtaaacaaagaggaggtacccgcttcagtatcggttgcagcattgcagcaagacagtagccacacggaaaaatgacttcctcttctaggcaagaccaatctgagaatacttcaacaacggctaactgcattcccaaactgctaaatgagccaaattctaatggccctcagtctagtatgggcccgacccaatctttactggacccatcaaatttcaacccatatacaagcttactgggcagtcaagcccaaaccatgtcgtggccttcacaacacttatgggaaatgggcttcaaaactctaactgggctaggtacggtagacaagttcatgcgtgaaccctcaattttcaaccccctctttgagataactgacttccgttccatggaattcgagaatggcccgaaaaaatgcaaagctatggaagggattattattgggcctagcccattgaaaaccaatgaacaggattcccaattgggagattcaagccaggcgagcgggagccctgccccgagttcgaaaaaaccagaagactcgtcttctattatcggggatgacatgcgattttcccctggtttagtggacgaaacaaaatcgacaaggaaacgaggccgtccggtgtctgctaaggtggaacagcctgcaaatggtgaagtgacccagaggcgaagagggagaccttcaaaatccaaccccgcagtgaatgttaaacccaattctttcaaaagaaattacaaaagaagtgcatcgaaaaagaagcaaacaatcaaagctcattgggataatgagttgtttgatctcacggttgacttggacaaccacttcgtgctcgtggactgcagttcaaatcagaagccatcgtgtatcattcgagaaattgatggggagacagacgaaactactaaggttgttaaccaggattttcattttggggctgtggagacttgcccaaaaatgtctcccaatacatcatgaaaatattggcttggaactgtcgcgggctcgggaatgccgcgacagttcgtcaactgaaggagctcatctggaagtcgaatcccgaagttttgatcctttctgaagtaagactaaaagaagaaaagtgtgtccgcctcttgaggaaactccaattcccaggtatttgctatgttcctcctatggaaaccgggggtggcctagctttatgttggcgattgggagtggactgtaacattcaaaatgctgataaaaatttgatttctggtatcatttcttctgaccctttagaccgtccttggatgataatgggcatctacggacctcctatttatggggagaagaaggagttctggaggaatttgggggatattgtggatcaatgcaatctgcctatgcttttaatgggtgatctgaatggaagcttaaaagacagggaaagcttgaattatgttaaagcttccagtacatcaagatactcatttgatctaagaaggatggttctccgcactgggttaattgatttgggttacactggggttaaatatacctggttcaagcataacatggatcccttggcgggagtttctctgaaaagggcacg

SEQ ID NO: 220866 - DNA, 1883 bp, Cannabis indica
tatttccctagcataatatcggggaacaaagttagtcgtggtgcataagggttgctccacattgagaaaaccttctggtcaaggtgccaatggtagatctaccctaggcagcagagactgttcattaggttcagccaggttagtagggtcgaccagacttgttgtattggtcgagtttgttgggcctgccgggttggcaggattggctatatctgatgggttcgtggaaactctagttgtggctagaacacgaacattaggatcaacatcatggggtcttgaggaagacccgatgaagtaaaagttgtagccaaagttctccttgtcacatccatggtgattgatcgaattcataagcaacgctctcaatgaaagcaccaaaatgttgacctcaaatttggtcaaccaacagtaaagccttatttacaattataatcacaacccgtgaacaattagaataagtaaataaatagacacaataattttatagaggttcaaccccttggttagagagtaataatgacctactctccttttagttgtattgatatgagaaataataccactcagataataagttttgtgagttctaaagtggctcttaatgaattacaatagtgagaatgtaaggcatatctcaagtaggcgagatgagaaagggtagtctctcattcactacaattggcgtataggaggaagaggctagggtttcgagtgcttgaactcaagagcttaggaatgagaacttagaacttaggtttagcctagtcctctttataaaggagagaacttacaaaagatctaagccaaagtaggttgatatccttataattagatatcaccttttttttacacattaaatatataagaaaataactcattaattattccttaaaaataggtaaatatctgaagttgaacccctactttcgtaggttgttggagcgaattcgtacctgagagtgatgtttgcctaggttgaaaattgcagagacactaattgtgtgtgccagaagggaagctggtcggcctaccatttgttggaggctggtcggcctatgcttcactatggcaggccaatggttgtccgaccagaccccccctggttggccatatgttgtctctttgccctgcttgatcatttgaattcttcatcaactggtacgttgtgcatggtgacttgatcctctccctaacaggctgtactctacgtggcatcaatcttgcatgtgtagacatgccacgtcatgtgggtaaaaattgagataactgacctcattgtttaaaaaatggacgaattattctttaccagactaaactagttaaaactttagtagaatacattcccaaattattctggactcaaaagaatagatgaaagagagagagagagaataacaatattgaaggaaattatgtaattaaacttacataattttttatttggttagattaatcaggggtaaagaactctaaattataaaataaatttattgtcgagctaatttctaacatcaatacataatgaattggactaataacgagatataatattaccttatgatatttgccaccttaaattatcgttgttctcataaataaaatatttgtcaataggtgccttatgcagataaaatagactcatttgtgaattctctttgagaagtgttatcttcatttcccattattttccttcagcatctgtctagacaagggaacacaacagcacataatttggcacaaatggcgattgggttagatagcacttagttttgaaatggcaatgacccctactcgtacccgttgttgggttgtttccactcaaaacaaataaaattgtcaataggtgaactgtgaagaagaaaaataaattaaaaaaaaaa

SEQ ID NO: 220867 - DNA, 1303 bp, Cannabis indica
tgcaggtaagaagattagcagttttgttcggccatgagtcagaggtctcccagcaatgtacatatcagtcgtggggtcttggcttgtgggaagcaggatcgaattcccatccatgtttgaaaatgtaacctactgtaaaagatttttttttataaacaggggatccctatattacgactcagtagatggacgagacaacctcttttttaaaatgaaagtctttattttgaatttaattaaagatttaaattaaaccacacttttctaaaatttatagattagtgataataagtttataaaagcacacacgtggcgtcactgagggtcagggcgttacaatgccagtctatgctatgtctacaaacaaaatccccttatcctattgtcgccaacaagatgccttaatgaggaaatattggtggcttagaaatgttgagaaggatagattcttggctcttaaggcttgggatcagatctgtactccgaaagctttggggggcttgggcctgcgaaggtgcgaggatatgaataaggcattgttgacaaagttggcctggtaccaggcaacaaacaaagagaagccttggattgcttgcttgctgaataaatactgcaaatatgatagcttctgggttgtaagtcctaaaagcagcgactctcgtcaatggaagggtattctggagtcaagggatattcttttcaaaggttcgatgtctatagctgcctcggggatatccatcaatttttggaggcagccgtggataccttagatggaataccaggaattctcatacctaatgcaacagattcggtcaagaaggtacacgatttctactattattgccgatgtttctttaggtaatgattagaatgatgagattatattccagatttttggccatgatttggggaatcgtatacttcagatttctagaattccctatcctttttcggatcaggtttattggaaacataatcataagggtaaattttctgttaaatcttcctacttcattgaccaatcttggaggtttgctctagaaagactcatttggaagtggatttgggatggagggatccatccaaaaatctctgtgttattatggagaattctcaacgtagctattcccacaaagaatagacttcccttcgtcggagataaagaatgtagcttgtgtggatggggagggaaaagtgctattcatttattttgtgattgtagttttacaaaagctgtgtggctaggagggtactatccattgaagatcgattgcattccaggagataacatgattagtttttt

SEQ ID NO: 220868 - DNA, 1717 bp, Cannabis indica
tttcctttctgataaaggcaaagaacttgtagcagaaggggataaaagacaagagaatccacctgaaccccctcagaatgtgaggaccgtgaatgtgatctcaagaggattagaagttagtggaattacgtattcagtagctaaacgccatgcacgagaaccaatcaacagtcaaggaatggcgagaaagccagaaatagtcgttggacagaccatcagctttctcaatgacaaagcaacagatttgttccaccttcaccatgatgccttagtcatttcattatatattgcaaactattttattaaacatgtattgatcgatactgggagttctgctaacattttatttctcaatgctctcagggatatgaaagttgacaagtcaacaatcacccgtaaatccacattcttaatagggttcagtggtgagcaaaagcactcgattggagaggtaagattgcatgtttgggcagaaggagtaaacctccaaaccaagttcatcattgttaactgtccttcttcataaaatgccatccttggctgaccatggatccatgagatgaaagttgtgccatccacataccaccaggttaacaaatttcctacaccatggggaataaagcaaatatcatgggaacaaggagaagcgcgagagtgttatcacagcaccctaaaagaaaaacagtcaaccttataggaactacaacaatcaaatgcaatgattgatctagatgagcctaacatggaggaactagacgaagtgagcattagcaaggaattcccgtagcacgaagtaccaattggggccaagcacacaccgaaacttcgagcaaagttgatcgaatttctcattaggcatcatgacagctttgcttggtctcacaaagatatgacaggtatagaccctaacattgttatgcataagttgtagatagaccccaatttccctcaagtcaagaagaaaagaagaaaatttacttccgaacgcaacaaagtgatcaatgaagaaattcaaaagctcatcaacattggatcagccagagaggtcaactatccagaatggctagccaatgtagttgttgtcccaaaaaagaatggaaagtggaggatttgtatcgatttcacaaaccgcaacaaggcgtgccccaagattcattctcactccctcacatagatatgcttgttgatgctacagctgggcaggagctccttagcttcatggatgcattttctgggtacaaccagatgcttatgcacccagatgatcaagataagacatcaatcatcacagaacaagggaccttctgttacagggtaatgcagtttggactaaagaatgctcgtgcaacatattagagattggtaaattagatgtttgcagacatgctagggaagtcaatggaagtatatatcaatgacatgctcgtcaaattgttagcagcagcagaccacctcaatcatctcgaacagtcattccaggtacttgaaaaacataatatgaaactcaaccctgccaagtgttcttttggtttttcctcaggtaaatttctaggatacttggtgacaaagcgaggagttgaagcaaacccaaattaaatacgctccatacaaaacgttcaatcaccaaaatcaatcaaggacgtccaacgccttacctagaggatagcagcactcagtcgttttatttcaaaatcttctaaatgttgtcacttgtttt

SEQ ID NO: 220869 - DNA, 5203 bp, Cannabis indica
agtatattttctttctattttttttgctgaaccaaaaacttcaataaaccaaggaaaaaaaaccagaaagtcagtcaagtgtagcaacaaggggtgctacatccacaacacaaagagacacaacaatgttatgggacgtagcccaagcagccacattgtgggccagtgaattgtccttacgaggaatccaaaacacacaacatttagcatcaacattcagacaagaaaataaatgcagaaacaaattagtgagcttccaagaggggatggtagagccatggacagcagagacaagggagaggcaatccgagaagaagttggcgtccacacaattcatccgcaaacacagagagaaagcatggcacaaggcccagcactcggccttaaaaggagatgcacacttgaccttgacagtcaccgcatcaacaaagtccccctccccattcagagcaaccaccacaatgaatgcaagatcaccttgaacagccgcatccacaaaaaaaattcaccattttaggcgcaggttgggcctttctcgaagactccaatagagggtctccatcagaggcccaacttctctcaaactccctgttatagtcaataatagcagccaaaaccttctcaataatagccgaaggagagtgggcaataccttaacttggtggaagagttggtttctagcatgccaaagagagaagcacagataagccgcaaagtgggggaattcggtgttgctcgaagtcggaatgggaagtcggaattcgtggagaaaatccaaggaacaatctcaaagtcagagccgaagcagagtaagtcactacgaagagcatagtgactagagaaccaacaagctctcgccaaagagcaatgaaagaatagatgcgtcaaggaatcattgttacctttgcaaaagacacacatggaattgttcccgaacacagagcgaaggcgatcaccacacggaaggatgttcttactcgttttctttctattgtttctatatattgattgtttttaagtgagttagtgaacgaattttctattgaagtataattcttacatcaaaaaataaataaacaaacataactttataaattccaagaattgtctaataattagaaaaaataaacatgacacaataaacaaaaaaagataaagataatatatattatttattttctaaaaaaattactaaaaaataaacataacacacatagagtgataaaataaaccaattgccgaatgttttgggaatgcctattgccgaatgtcatgaacgttaccttggccttccagcttatgtgggtcgcgacaaaaaagagatgtttagtgaggttaaagagagaatatggcaaaaactccatgcttggaatgagaagctattttcaattggaggaaaagaggtgctcttgaaggcagttgtccaatcaatacccacatatgctatgagttgtttccgattaccgattactttttgcaaccaattggagtctatgatggcaaacttttggtggggagcaaataaggatggttcaaggattcattggaaagatagaaattgctttgtaaatcgaagtttgaaggtgacatgggctttcgttcttttgtccatttcaatcaggcactacttgctaaacaggcatggagaatttatgagatgcctaactcgttactaagcaggttgttgaagcatcgttacttctccaataattcttttttagaagctagccttggacactcaccttccatgacttggcaaggtatacattggggtagagagctactgcttaaagggcttcgatttaaaattagaaatggccacaatgttctagctggtatagataaatggattattggccattatagcttcaagccaatatcatataatggaccccatcactctcggttgcaggtctcatcacagaaacaagggagtggaatctcacacttctacatcagtatttcaagtctattgatattgagaaaatagtttcaattcctctgaggtttttttcaactcgagaccgactgatctggcaccatacagctaccggcatttatactgtaaattctggtttccatttagcatgtaatattgaggaaagcatgacaacatcagtctctaacacacactcagcttggtggaaaaaaatttggcaactcaacttgccatccaagatcaaaattttcgcatggaaagtgatgcaaaatgcattaccagtggttgttgcactgcataagaggaaagtgacaacttcagcttcttgttctatgtgtactaatgcttgggaatctattggacatgctttgtttacgtgccgtagagtatcacaatgcccaaaacatgtataatggtgactaccttatccacttatccaatctatatcctaaactagattttgagttgataatttgcataatgtgggccatttggagtgaaagaaataaggtcctacatggtggaaaaaaaaagagatggtctactaactctaacatttgccagcaactacctggacaaatacaagcgagctacagatggtaacaagcatccttctcttcaaatcagttcatccaatgcaaataatcagcacactgcaaatgcttcactgcctgcacaacataattttggtgcaacatggagaccaccagacctattaggaatgaaattgaatgttgatgcagctgtaaattcagtgaataaagtattgggaataggtgcaattgtgcgaaatcatcaaggaaaagttatagctgctttatcaaagccggttcaaggatgttttcgatcagatgaaatggaggctaaaacactttttcacagcattaattgggctatacaactacagctaattccaatcacacatattgaaaccgatgctcttagagtttcttcagctctaaactctacatctatagatttatcaagttttagtgacttaattatagatgttcgttgtcttttatccccttttatcctctttctccagagttattgtttctcatgtcaagagaaatgctaaccatgctgctcatggcttggcaaaatatgctttggagttggatgaagatgtctgttggacgagtgttattcccagtctcattttctctgttgttataaacgattataatctataatagcagtgaaaatttcaaaaaaaaaattaatagaaaataaaataaacgcatatataaaatattttatattattggtatgtttattataattgtaaacataaaaataaacatagccaatatcactatatataataatcaataattattatcatatacattataaaaaaaattgaaaaaaaattaattatatataaaaatgtatgagaaaatagtaataagttacatttccttgtaaaaaaaaataaaaaaacaaaaacaaaaacaattgcaacacgactgttcggtcaaacattggttgatttcttcatctcttatttatatttggcacacttaatcggtcctcccatatagatatcatatatataatcaaagactggttttggttcttcattgtaggattttggcaaagatcaaagagaggagagcagctgagggacaggcggcgactatggaggcggagtacgataataataatattaacacaacaaatcctaatttgtatgccaaagttatcgaaccaatctggttgtttttatccggcaccttcatcaacagacagcgcaaagtcaaccagaccttagagtcaacgccggagcaacaacaaaacgttgttcattataatgattgtaatccagcagatgatcaggtaattgccattcatgagctcggagtaattccctcctctgtccaatcaactacttctccaccgccgccgccggagaccgagccagccaccaaatcctcatcgtcaaggtctttcttaaggtctttatcaaattatataccctacttccgtcctttctccaacaggttaaagatctttgatggcgaatcgagtgtttcttcggtagactccgaaatgggccaaccttcaacttcttcctcttcttcttctccttgtatttcaggtacaacaggtataaagaactttaattgtgatcatcacagttgcacaatggcaaaagatttagatggaaatggaaagaaggaggaagaagaagcagcaactagggcaagttttataaatcaagaatggcctaagtttatgttaggcattgctgttacacttttgattggtcttatgatgttacattttagtcatcctgaaatctatgacttgaaaaaaacaaagcctcttattatgtttataggcatgtctttcgcagctctttggattgcgattcttcttgagagcctcccattatcgtattctcttttgataattcggaatattggtcattcttttatttttggagccttttatggtatcattgctatttttctatggcatgatcctaatctttttatagctcctgttgtgacctttgtggtttcagttgcacacgatacttttaaatttttcaaattttaactactctactccctagctagctagtatctgtcctatataggtatatatatgaataatttatatgtgatgaggaattgtatgaaagcattctagctagtgttattgtgcgttaaattaatttcgtctctttcattttttgtaatatatgatattgtgaataagtgtagggtaagtgaagaaagacaatggcagatactactcagctcaattagaacaaagggcagacatttcatttataggacagagaagcataacggctccaaatccaatgattgcagtagaaaacaaagcactacaccacgataacagaaaaatggaaaaagaaagataggaataactaaggataaactagcataacaacataaagaaggagccaaattaattacctgtcccagccaatgaaattttgccacctcaactaaaatttcacttatacatttaatgaggcattaaggcaagattacaattacaacaaatacgggtttcaggcacgacagcaacaagaacaacaaaaatttcgttcttgatagtaatagtatcaggtacgatttatcaaagtcgttccggacaaaatttattttatcttaaaaataattaaataattatttagaatgtctatactctaatctggcgcgaaatttaaccgtttgaagagagagatttttcaatatttgttccagatactgtcgtgcctaa

SEQ ID NO: 220870 - DNA, 2513 bp, Cannabis indica
tttagtgtagtactcatccagctttttcatccaacaccaaatgagaaatttgtagggaaaaagaaaagtaattcaaagagaaagtacttgtggtaatcagctttttctttttatttttgtattttacaagaaaaaaagaaattaaaaaatatatctatatgaaaacagaggaagcaatggaatatccagtaaatattagccggttgaagagggtctttttctgatgtcaaaagatggtaaaacaaatggatgaaaagactttaataataaaaaaagaaagaaaaaaagtgcgcgagaccagtaaccgggaaaaccggaaacagtaagcccgatcattagggggattttctttttcttttttgtttataatttacataattataaatttttgtatccgtgtaatttgaagttctccagcttttaagtaagtgattcggcaaaatttgtgtaaagcagtgcctctaaacaaatatttaaattataattatttttccactcttgaccggcaaggaccaatactagccagtaaatctgtcaacctactatttgtccattatttatttattttttttactttttaactacaagttaaaaatttgtttttatatccgggtcttgtattccataaatcttgcttttgttcctaggttcgagcttagaagtggtagtgcctcctctcatctcatcttgtcccttaatttgttttttcaattaaataatatttatcgttaggtccttaaattatgcagttatgtatcatgtgcttttactatgtttatttattattttatttatttgaaatggaattactatatttatttggtgcactaaaaaacaacatagaatatgttgcttttttcattttattttttccttatgaaaaaactaataaggtcaaattaatcgacttgctaacaactccaagcttaaatctacttaaatgttagacatagtagggttgttgtatcatgagtcatgacctataccattaatagacttaaaaccaatattatataaaaaaaagtgaagaatttattattaagtacaagatatcactataaaaaatggtacttcataataaaatttgtgactaaaaaaaataaaatatattgtgactaattataaaattattattccttatttttgtgactaaaagatagatcggtgaaaaaaagtaagtcactaacaaaaatttacaatttgttgtgaataaatatattttgagtcacaatacttattgcaactacaactaaattaataacaaattatattgtgactaaaaaattgtcactaaatataacaaccttttgtagtgtatcataaataaaagttggactaacattcactcttttttattattatttaatcagatcaaaataacatttatccgattatcaagtaatggcttaatagctacttggtgtaatataagttccacaaattatttacacatgaacaatgtagaacaaacacacatactttttttaaaaaaaagatttaatcatactgaaataatatttattcaattaccaaaaccctcatagaaatatggtaaattaacattcaattattggagagaaatgttgaagaaattcttttatgtttttttttcaaaagacttataatgttttgataagtataaatatatattgtcgccagctgtgctaggcaaatccttggggtctcagtcgagaggatgaagttgacatggcttgactaaagtgtgtgtaattagggtcgtctcaaggtgttaagtggcttaaggcaaaatttgaaacaagacctttttcttttacaaaaatttaaaataaatattgtttaaattttgacacaatatcaatttaactcttttatccccatataacaaatagttttctcaccacgtaagctaattcaaagtaatatttgattataataacatctctattgaagtgttatatattttaacacttttgtaaaaattgaaagaaaaaaaaataatactatgtcaagaatttcatcaattctttttttaatctatgttaacagttatataaatttaagaagacatatagtaattaatatatatatttttatttatatataatattttatttctatatatataatataaattttaattttttggggcacctccaaaattgtagggcctgggcctaggcccctgctagctaccccgccctctggccaaccgtgtgtgtaatgactacatatttaaacatgaaaattagcattttaatattaatttaattattatttataattatatgtgcattagtagaaataatccgtattgtcagaattaagtatttgtgatataatttctcaattataaagattttattgaattctaagtttgtcatgcatgttatttatgaattatgatattttcatgttttatgtttggtaacagtcgaactcgacgatttggccattaaagtcacttagatacggtttagaatctaagaattagtggggtaagatttatgaacacttatagtatcgggattatg

SEQ ID NO: 220871 - DNA, 2054 bp, Cannabis indica
attcttagtaggataaccttgacttttatcttgtatacaatctaacttaaccattaaaaaccaaactaacattatttctataaatattatcttttattatatatgttgtaactaattaaaatacactcgttttttatgtgagtacgctctatatgtgttaaaaccgcataaacggataccaattttttaataaaatattaaggtaaatccaaaattaaaatcttacaatctggtgtagtgaaaaaattaaaattttgaatcttatctttcacatatttattagaatcttttttttttttttttatttttcacttaaagaatattaaaggttcatatcttagagaactatggagaactctctcattgtatttaaaatttcctccgctggaacaaaatgccacatgtatatatatataagattattacttcatatatatatatatatatatttatacatttgaaacgatgtatgtataaagtttaaacttattacaagtagtcttaagtaagaggcaacctggtatgccctcccttgggcgatgctcatagcgacggggacaaggaagggccacatgaacatggctctcattgatgtatatatataaattaattaatgaatgtacagtgcctcatccttatttacacactattcccataccaaaaaaacaatttcaagagtatatatatatatatatatatatatcatatataatattattatatacaaattaaaagtgtgggctcctctattcttagaggctccacacatagattggtgttgttttgtgatttcttctgttgaatgattaagcaattagggttttgtcttcatttacaggtcatgatgatatatgaaacaattttgtattttttattttagaaaaataaaatgagtaattattaattgttatttttccggccggcaaatatttccaacccatgcttttatttctggtattttcagaattcagtcaactaccccttatgacgaaagaacaatgttttgggagatggatccttaggtccgacgtcttattaatttgttgttacaaatagaaatatatttatatatttccccattatgtaagtagtgtttatattatatatttttttgcgacatacataaataatttagatgtacaagattgattgagaatctgacttattagataaaatcaaatttaatatttaggatctaactctattatcaggcacaaaatcgaaactgaacattaatttattactgaataatatgttcaacatgattagatatatacgaaatttgtgtgggactttgtctatataaatatatatatatatataaatatatatataattagattatattaaacaatgaatacaatcatctcatcggatatatttcaaagtagtgggaaaagggatagtattttaattattgcaatatttgttgggtgtgatcagctttttctccttctttctttccaccgaatcctctaataagccaatatttaaaattgaatatcattataaattattgtttacctaatagctagggatatgcatgcaaattgcaatataatttaattgttcgtttagaatatagtatatgcataaatatatggttcttagtttagaaactcattaaaaatcaataatatatatgtctatcatttatataaagatgatagtattatgtggtttttattttggttcatctattttgttatttagtataatcaagttattttgttgtaatatattatatatataattactataaatgttattaattagtgtaatgtttatttgtacaattattagattgattttcataaaatatatgtaaatataatatattttacttacgattgtttagtctttcaaagggctttagtaaattttttcaataacattcatataaagatgagtatgttgtaaaatattatataatacatttatatagatgaccataataatagagaattaatagttaccactacaagaaaatcatcttttgccggcgcattgttgcgccggcaaaagtaccctaactgcgtcggcaaagcttatct

SEQ ID NO: 220872 - DNA, 2267 bp, Cannabis indica
ataactatcagattgtaaaaggttttttgggtacaaaacccaacaagaatatggtagctttattggttgggcagacatgactccctttgcctgtggggaaccttatagtcgctcactgaatggttgcaccgacatgctcaccattttaggagtatttggtttgaatattactcatacttttgaatttgttattctaaaattcgtttgctaacctatgcttgttgtttttgaagagactattgaggcaaaatagcaaaaagctttgaacgacaagctggctgagtaattggctaagattagggaataaagggaacaagaaaggttaagtccacggcttcccagatctgtaagccaaggcctctttctacttcctcttattgagatgtcttggtgatctctccacccaagaaggcaagaactttagcccccacccctactgcttctatgtttacagacaaagtgcttgtcatgacaggagggtcatctaagatctggtcgcctgcaagagtggcgtgaatctagcaggccatcccatacaataggtcccaacaaatgctccataagtggaagaattagcccatgaagagttagagaaccctaacgtttcataggatagcatggataggcttgtgtatccctaaaagggtgtttttgggactccaatgtgcaagactccacccccactgactggtagggataccaaaaggcttatgtccaaccaaactagaaagatatctcccaggggaagttgtgatgtcaagggatctactactccaatagtatctagtccaccaagcaaacatcgacaacaacaagaagaccagcaacaaggaaagaaaatccaaccacaacaacagtagtaatacatccaacaatagcacctgtagcagcaacgacaaccaccaacaccactacaacaacaatagcaacacatccaacaactatagccataccagcagcaataactaatccaaccacaacaatagcagcaacagatccaacaacaataacctcaataaagaaaacatcagcaacaatagcaacactaacagcattagtaaaaaaaaataatcaagtgcaatcttttttgcgaagggcagaaatcctaccccgagccaaaaatttggcaaaccactagccaccgttcttccctgggttcctcacctaaacattatatttcctctgaagcctaaggtccctaggttgaagcttttaaactaaatttagtctacaaagagcctattgagaaggaaacacgacaaggaaaggattgcccttcagaaaagggatgacaatctttcaggtgtcaagagagcagagatcactaagggaattcacacttctactcccattgattcttagattgacattgaggctttgagcaaatgactaacaccaaaagtaggaagagaagttgttgtctttgccaacgagctactggaccaagcagttgttagtgcaagtgagctgacctcgaataaatgggcatcctccagcagttgtaacccatttgctttggcccatgcaataaagcagcatgctataggagtaagttccacattttttccttctctttttcttcttagtccattacattggtgcattgtaggcttatgtttttgtgtttctagttgtccttgatggctaaaaagacctcaaaaaaggtggtgcaatgatcgttgatcttgagaaggcgcaagctaagaatcagtctctgtaattcaagaataaggcactacttgctgaagttgcggagaccaactcctactgtctcgatgctataaaccatgtcaaggcagatgctaagtggattaagcactccacaatcatgtggtaggcgaagatcgatgccatagagaaagaggctagtgcaaatacaaggcactttatgggaagtacaaagttgagttagatgagaagactaagttggagctcaaacaaactaaagtcccaataaaccaggtggcctttcacaaagaaaagtctgcgaggatctagggcttattgggtcaagttgaggatttgaacaaacaagttgaggacttgacaagagaaaaagacacttggtgtgttaaacatgagttgcaagttatagtcacgcatggcgtccgcatagtcaacaatgattgttgaacactatcctatagctatagaggaaaatttcccataaactagccaacaggattaaagcttttatgccttggagccatgcaaggggccagagagactgctaaatagtcaatccatgatgctatcgacctagcaac

SEQ ID NO: 220873 - DNA, 2453 bp, Cannabis indica
atcaacacgagcctcttctcttaacaaaccatcaacactcaccattttcatgtcgttcccaacgttgtcacattcaaaaaccttgtcccatctctgctcaagtctcatctcataaaacgtggaatacttcacctgctctttgagttttccctctaattccttgacaaacataaaagggcagtaccattttcccacgaccacaattacattgagttccggaagctgtgatcttagagaggagttgaccccaggtgcttcatctaggtggtaatggcgaggtgtctgcatatgtagctgccaatattttctcctcaaaaacgtaggaggaaagccattttcggccacggatgctgctgtgaagcttccgcgacgctttcggatgatctcaacttgttgaaaggtgtctaaaggatccaacggcctcggcttgacgtctctaatatatgtgcagcaacaacatgttcccatgtcatcttctgttgagcttgcgctagcttcactgcacaaataaacaagaaagagaacaagtgtcatatatgagacaaaccttgtaattaattaatttctatgatatcaagctaagaggagaaattaaaaagtgaattcaaaacataccctttatgttttccttggcggcgaattacatagtaccgattggaagagaggggttgatctagcactggaacgaacactacatcatcgtaataggtcgtagtgttctctccagtgcttactgtataagtaacacttagatccttgttctgaggaaatggcagggctttgattgacctttccttacacaatccaaaacaggtcgttgtttcagattcttcgtctaagataaccaaataaccagaatttggaccctcttggggtgctgaattcagtagctcaggggaccttctaagcaaagacagaggccttgtcacgtacatgattctctcttgggttaatgctaaagtactcttttttttttcctgctatttctgcttttggcttactttttttaatttctctctgtatcatgttatgatacgtttttcatatatgtaggataaaaaaaatatcctgtagacttgtggaatgtgaatgttttgaaaaccagtaggaaggttcataagtcagtctaaatttgggataaatgttacgtgtcttaccttaaaccatacgaaattataaatatatgttttgcggtacgaattttgttctttccgcgttgaaccatttgatctaagcgaaacaagtgaagaaatcgaattgaaacaatctaattaatttggaaagattaggaagctgagtagtgagtagctaataaactgactttacatataggtggggaattgggataacgtttgtttgtatattggagaatgtgtgagtgaaatccttttgtatattatttctctgatatggaaaacgattcaaaaacaacatatagtcccaattatacaattatttgacattggaccgctatacgtacctgttgactaaagaaattaataaagatgaaacataatttaaacaaggctaattaagatttttgtcccctgaactttgacatgtactaaattatgtcccctgaacttctaaagttattgaaaatgttcctgaattattgagattattggatttaaggacttttgtctaattttattcaattttactattttaatgattgtttatgtactaaaccatgttccccagactttgatatctaccaaatcatgcccttcaaactttgacatgtactaaattatgccttctgaactttcatccatgttagacttttttactaaaattagaaaaaagtccttaaatccaacaatctcaatagttcagacgtattttcaataaccttaaaagttcaggggcataatttggtacatgtcaaaattccagggacaaaaattctaattatccttcaaataatagagctaactaattaatactataccggggaacctgttatgtaatgaccgcgagatctaactctttctcttatatatatattgcatcgcttttttttgaaaaaaaaaaaaaaaaatcaggtggaactgggaaggttcataatgttatttatattatataatatattgatttgttttgtcatattgaaaatattagtaataacatataattccgtcatgaccaaattataatcattatataactttgcatagaagtttcgtaccaaaatatacatagacaattaaaaagaattgttaccgcacaccaagttgcttattagttattattgccaggggtgtttatcaaacccctcaaatcgtcgtattgcaactagcgccgcaaccattttagaaatccaaaccgtaaatttgaaaagaaaagaaaagttaaaaaaacagtgtatgaagtaattcccctttaaattattggtatgcattgtgtgttgttttgattatatttatgattaatatatatttttttttttt

SEQ ID NO: 220874 - DNA, 1785 bp, Cannabis indica
tgacaaaaagtggtcctccctatccaattatctaacccaataacaaaatcaacaacaaaacgataaatcggcctaaagaccaaacttatgagtttaatatttcatcatttagtcagaaaattcatgaatgaaaatttgtaaaaataaattaaggtatttgatcaacactcaaacaatcgggacgcactcaaacaatttcagtttatatatatatctatatctaaaattgtaagcaaataatagtcagtacattagaaatacttaaagagattcaaactgtattgatgatatcaaaggatcaagaaaaggcttttcaagtgaattaggattggattgtttttaagaacaaaaggaaaatattaattttctctctcataatttgaatctgatttgacttgtaaatcagagactttaatgcattagcaaagtggataacattacagttatttagtgtggccaaccaaaatttttgagcctctagttaagatttattgtataatgcaaaattccaaatagttaatataaaaacctaatcaagaacacgtgaaattttgtaaattatgaagccagattttaagaatacatagaccataaacaaaaggaaagacatgattttgaattaacaaataataaaaaaagaacaaatctgataaagggtaacaattgcaatagttttaagtttaaaagaaatgaaaccaaattattgaaagagaggaagaaactccatttctaattcaagcatataagaaagacccatgaaaatacgaattgaaatgcagttgaattaatcgttagaagttaaaaaaaaaacaaaggtacctgcaatggcgattggggttgtgggttgacccatctttattggaagcgacctgattatcaggtgtggtggtagaggtggacatggcggccgcaataggaataggtccttgtgttttagaaggacacccaattcttctctttacttgcttcgacaacgttagaaataagaaataagaaatcgaagacgtcacaattatcagtttttggttgtcaatttttgttaatggtagtaaataagaaatcaaaaatccaacaaaaaagaaacagatagaaaaatggaaccaacagatgcacaatatacatttatataattaggaaaaaataatttagcatgactaacctcaatcaccacatagaagataagagtgttttacagagggagggtagagatcgtagtctacggtgtgtgggtatgactgtgaatggttttttgttcgtgcttgtgaggacttggaggccgagagaacagtgatagggtaagggaactgggggattcgtaaggccgggggaattataggagacggtcagagccgggggcagagggcctgaggaagacaatcagaatcggagcttgagggagagtgatcggatcggccaacctctcgaaacgaccccatctttccacgacgcctatgctcgcctagctgacgcacataacagaacagtttcccatctctctatcagagattctctctctctaaaagaagaagaagaagaagaatacgaagaagaaagagcaatgggtaagggtttggtttcgaagaggatggaggagccgcctctgaattcgccagagaaattcgaagagctaagggtgagaaaattcacgcgtgaacagtaggaaactaattaggctttaaggattttactttttttttgtcgtcgattactatctctcattattgtattttgcgttcattttttaaaacctcgctaacacaatattcgagtgttaataacagacgc

SEQ ID NO: 220875 - DNA, 5844 bp, Cannabis indica
cttttcaaggttgcacaaggtttagactgcatgttcatgtaacgcatctaatttttcttcgtaacttattaaagaaaatgaaaacatgtgtcaatcacactcgaacttttttggaaagactgatccaattgcaattggaagcaaatgttgcattaacgcatgacaatcatgtgattttatactcattactttcaattcaaccatattaccaagttcgtgatgttaaatgagtatccatcaggtactttcatctctgaaaatactttgcaaacttttttgtctttttgggacaaagggaaacaagtaagaggcaaatataatcattcacctttcttttcaggtaccagagattgtctgatacccattttaatgagatctaaacgactagataaaccttatttagttttgcaaggaatatcaagtaaggtattgataatactctcacacacattgacatccaaacattgtcgaaccattaaatttttctaatatgaaaaggaaaaaaagattgactttctttgaaaataactatttgttttcttatttatttatatattattatttttccatctttccatacataaaatctacgagttctacttcttggagaatttgttcccctaatagtggcaaaggagccatatctccatctttagtaccatcgaatattttcttctttcgtctaggaggatgatctttaggcaagtatcgtctatgacccatataacacatcttgtgtccatttgggaagcaacaagcccatgtgttagtgcaataaatcaaacaaccttggtaaccttttgtgcttaagcatgataaattactgtaagctagaaaatcgctaatagtcaacaataacactaccttcagattaaagaattctttcttaaaaccatcataggcctgaacaacattctcatacaattatatcaaatcgttaattaatagttctaaatatatatcgatattatatccagtttgttgtgggcctagctaatatcattaaagaaagtatattaattttttttcatcactaaccatggaggaagattgtacataacaaggaagacagtccacgaactatgagttttaatcatcattgcatttgccattaatatttttgttagatttttatgagtcaagtgtgttcatggaatgttattttttattgagatattttatggtaatttttaaaatttatttgacgttttattcatccttaggttttctaaactattatttcaatataatttttgagggttacgcctcaaggcttacttgcattattttaaacattgtaactaattattaactaatcttactctaaattactaactagtaactaattatagtatactaaattattaagtagtaactagtccttaattttaccaaaattttagaagcataacgactatagttgaacgttcccaaaaatttaaagctattaataacaatcaaacacaatccaaaactttataaaacaatcacaataacatttaacaatacaaaaatttgtcacccatctgaccgcgttatacattcactacggatgaatatttaagatattcaaactcatctaacatgcatattattctaccatccgactgtagtacaatatattgcagaacatacttcactataaataaatattaaatgtatttaaactcatctaacaggcatattattctacccatccgaccgcaatataatatatcacagaacttaattactatggataaatatttaagatattctaactcttctaagcattgataattaattaataataaaagttagtaaatgtatatatatagctagctaaaagccaataaacaccaaacaatttagaactttgtaattacctcataacctgcaatataaagaaatactataaaataaaaatttaattatttaactacttactagttatataatttatgagtacttagttactaactgttatacccgaacttcagctattcaccagaagctgacatgtgtactataaaaggaatatgaatcaactcaaatattataataattaaattgcattattagatgcagtttaagtaacttgttttaattaattaaagttgatagaaatattcaagctcgctgccacataagcatgagtgagataagaatataactattacaaatgtaattgatgagacactacgtctatctcaggataaacagagtatataataagagtgtataagacaagacatcaaggagcttacaactcattgacccacatacttaggagtaaaagtttgcaactcattgactcacatatttgtacatggaggaaataactacatttatccatctcaccttttatgcgacagagtaaccacctcacaaatatctttacgatatgaagaagactatgaggagaagtatatctatacttagtattttttcctataaagacggaaaagaaggaaaaatcacatttagcgagaaataaccttcttagtcagtataaccatttaaggataaagacaaagagtggttgggtagttattagatattattccatgtgcataaaaataaaatgtggggaatgtccacatttcatgaacaactataaatgaatagatcccaataaaaataactgacatcctatgcacctataaatagggcagaatccagggaaaaagaggatggaaaacttgcgagaaaaactattattacgtttattgagaattgtactctatatccaaagaaatatcccgaaaggaaggactcgtgcagtatatagattttaaactacaaaatcacgttaaatatcttgtgttcatttattactattattaaattctatggtatatttttatgtaaaaggctatatatttagttaacacaagtctgcgttaacagtttgatgctttcattgagagccttagtaatagaaactcaggaaaaatccctcctttgagacacaattacaaacatatacctatggcagataacatcacccacaacggaagccatccagagaaactaaccatcgccctagaaaagaacctcagggattgcagagaaccaacacaattgaaacaccacgttctgggaagaacgatggaaatttcaatcctacttgtgaacagatcccagggagaagaagtaaagatgcttatgatcctaccagatatgtcccactagtggaactagaaaacatgcaacttcgataatgcctggctgaattaaaccgacgaaatgctaagttagagcgagaagccacggctgccagggcaacacagggaaccattcctcaaactcaacctgatccatctgtaaggagaccacaaggaagacctcgaggttccacgaccaggagggaagagaataaccaagggaatcccacaaatgctcaggaagaacaacttaggaatgcgagggatgtcccaatggatagagaaaatccacccagcacaagtaatgctagaaatcaggagcatcaacgtggtgctccaagaacttcccacagttttgcaaaccagggaaatgaacaaattgatgtacctgagtcatcttgcatgaatgtggatgcaagacaattgcgaccaagaaaccaagaaatccttcataatgatggaagaaatcctaaaaataaacctgggtctggtcgacccccaaggcatccacaaaataggggatgtgtgtcaaatctcttttggagaagaagaccaatgcgagatgagacacatgaagcaagtttgagtacaggagagtcacgatcctacgagcataggttgtcaactaaaactaacagacaaacgcaagacgagaatatatctcgacattattttactgaccaagaaagtatgagtaacttgggtagttaccagtctgaaagttattcagggactagatctgtgagtaattatgagcggaggcatcgtgaacctgatctctgcaagcaattagatcgaaggcaaccagaccttcgtgagcacttgaatcacaatgcaccttatttacgtaaccaacttaatcaaaatgcaaatcaacaaccagtggatcgcattcagttgcgagtaatacaattggaggacaaatttaggaaatatcaagatggagaatatgacaaactgctaggatatgattcagatgaagaaactgaaccattccatcctaacatcctaaactcacaattttcttaaggatttaaaaatttgcatgtctcgtaatatgacagatgaactgatctagttgcccacttaaacaattttaacactataatgcaagcaagcaatatttcaaacaacttgcgatgcatatgtttctgaattccttaataggagccgcaagtagtttgtttgacaaattcgcaaccattctataacttcttgggagtagttgtcaaaggatttcaaaaagcaattttagcctacaagagatcgtcgaccaaaggcatccttattgactaacatcaagcagcaactaggagagtcccttaaagcatacttaagtcacttcaatacagttgaagctaaagttagaaatttgaatgatagcattattaatagccctttaggctataattagaactgatttatctactgcatggggacaattatgggatgatttgcaatggtgtcctataaggaatatcaatgaatttaatgaaggagaatagatttttgtgcaaaaagaagaagcacaaaatgagatgaagctgttaaagtcaggcccgagagattatcccagcactagcacagcaacagcgagcaccgtgactacgaaggtagaaaatcccaatggatcaaataccaagaggaaggatgagtcaggagacttatccaaggataagaaaaaacaaaagaagcatgagaagtatgtacctatattattcagtgtatactgaatttaatgagattcatgagaacatctacctcaccaatgaaaattaggtcacattttgctgaccagaaccgatgaggcatgcgaggaataagcaattcaactaagtattgtcattttcacaaagatattgggcatacaatcgaagaatttcatcaattgaaacatgaaattgaaagactaatttcgtgaggatattttaggcaatatatgaagacatagggaaatgagcctaatcagtccaacaacccgaataacctaagattgcaacctcccccgtagagggcgaggatatcttagttatttctggaaggccacacctcgtaggaaatagcaatggtacacaaaagaggtacattaatgtggtaaagaatgagttgtctgcattcgctccaaaatccttgaagaaaacaaaatcagatgaaccagccatcatcttttctaaagaagcttcaaagcatgttcgatatccacatgcagatcctctcgtgataacaactcaacttgccgacaaaagaataaataggattctcgtggataatgaaaactttgtcaacatcctttataaggaaacattaaagaagatgggattagaagaggcaaaactaagaccttgcatggtaaatttgtgtgggttcacaagcgacaatgtcgccagcctaagcatagttgaacttctcttaactatgggggaaccacactgtttgcgacccaaacgcaagaatttttagtcatcaacatcctctctgtctataatgtattgatgggtcaaccagatttaattggattgggggcaataagctcaataaagcacttgtcacagttagaggcgaccagctgttagccagagaatgctacagagtggaacttaaaaatagaagagctagtcatcgattgatggtaattctaaccgaagaaactaagaaggaaacagaagacttggatcctaggatccatgatgataataac

SEQ ID NO: 220876 - DNA, 1969 bp, Cannabis indica
atttcaacatgaagatgtatcaactgactagtacacatgatgatactaatgttgaaaagaagcggattcgaagcaatgattattctccgtcctttatgccaagctgattttgatgtgcaacaccaccctaagaacattctttggtataagtctccaagttttggaggcttaaccctcatctcgagaagatcaacaagaccagcttttgaattgcaataaattgcttaacagtcacttatttttgttggttgttgattccctggacgttccagcaaatgattctatccatttgcaagagagggtcctccgccctctcttgtattaatctcttgcattccatctgttgtgcttccttctgctgccttgtcctcctgtccttctcctacttgctcaagtgccttgaaagaattaactatcacggtctgctttggtggagccttttccttgactttccaacctttgatgactggctggaaatcctctattttctctttgccaattttagcagcctcagctagtttccttacatctctttcgatcacccattcttgcggtctcccttctttctttgtcaaccaattgtctcatggcccattcctttacaattcctgcaaagaattcgtttccaatcatgagagactgtaaccaacacattttctccatgtgatcatttcactactacaatttacactatttatgtcggtcaacgctactattcatagcgttgaatgacatgaatagtactcaaataattgactcgtctctttaaaaatgacactaatagtatgttatttgcgtcttttattaaatgacgttaaaacataaaccgacgggaataaaataaaaaatttaaaaattacttctcattttgcgtctgttattaacactcgagtattgtgtttagcgaggttttaaaaacgacgcaaaatataatagtgagagatagtaaccgacgcaacaaaaagtaaaattcttaaaacctaattatgtgcctactgtttaggcgtgaattttctcatccttaccctcaactcttcgaatttctctggcgaattcagagtcggctcctccgtcctcttcaaaaccaaaaccttatccattgctcgttcttcttcgtcttcttcttttagagagagagaatctctgatagagagattagaaactgttctattacgtgcgtcagctaggcgagcataggcgtcgtggagagatagaaccctttcaccagttattggttggaataacaggtcgtttcgagaggttgaccgagcaaggtctccacttcttcaaccctttcactggagaatgcctcactgtcgttctatctataagggtctactctcttgatgtccgcatcaaaactaaaaccaaggtttatttgtgagttttattatttgtaagttttttttaatcccaaatcagtttaatatgctttttctactcttattatagccaaagttagaattgtgaggtaggaagaagatggcattttgatgcaaaattgggaaatcaaaaatggttagtggtcttcttattttctggtttttactttgtggataagcttctcatacttattttgtttactttatttacatgttgaactgatgagtaagaattctagtaaatcttaagtgtgcatttccttccttatgtcaaggtcaaggttcggtttagaagtggaacaatcttggcatgtccccgtctccatgataatattttttttgctcgtgttggctcttaaattggtctgtgtctcttaccttttcttcttgctagatgctgtgaaattgatttattgtttaacccaaccacgtgaacagcgattcccatttttattgacatgaatctcagctttgcatggttgcatcaaataaaaagaaaaataggtccctcccattcctcacaattacaaagataatagattatgcaaaaaaaaaaaaagatgtaaactatagcttcttctttgttt

SEQ ID NO: 220877 - DNA, 4954 bp, Cannabis indica
tttgtatcatggccaaagtcattatgaaattagcagaacttggatgtgtccctcttgttgatatccttcttgattggaggaggcttcttgtatagaacaacaacttgagttgccatgtaaatggtctcaggagtttcagttaggagggtgaagcacatgtgcttctctcctccttttccctttagttttgtggtgtaggggaagtgttgaaacttcccttttctgccactattctgaccagaaatgttgttgttacgtttgcctccattattcttactgctagaggcctgtccgacactacttgtactagcttgtatgttgggtaggtcttgaggttgcatggcatcttgagtctgtctacaactgacctgccttcctatctaggcttgtcagacatattcctccaactttatgaagtcatcagctcgcttgaggaactctttcatattgttagttaagattcttttgatatctttctaaaagtcactcaatggaaggacgcctcccactacgattgtataaagaccttctgttgttaggcctttgaccttaggggccttgaccataaacctttgaatgtaatctttcaaaggttcaccttggctttgctttatctcgacaaggtcttcaagttgtgaaggtatctaactcgaggatgagaattgtgtatagaattatcgagagaattcattctaagaattgaatctctctgaggctagcttgaaataccattattgggttatttttagataaagttgttaggaagatccgacatcatacatccccaataaccttttggagatatgtctgcatcaaaaagtactttatgtgggctaggagatctactctcccggtgtacatcttccactctggaatcttgaacataggcaggggtaatgcattaatgtatgctgagaatggacccccttgactagtctagttctagatttgacagctttgggctagacagccttttatcatgtctctaatttgatccaaatgtgcctgcataaatggatctgatgcggttgacacttgtctgaatggcttttcttagccaggttgatgccttgggccagccagcgcttggctaaaacctttgactgagtaattaatcttggctgaccagcccttggctaggcagctggctttggtcggccagcccttggttaggtagctggccttggctgaccaatcctaggttgggcacttggctatggccaactagccctaagctggttgttctcccttggctggccagaccggctagacttccctggccggccaggctgatttgtgggttaatgggaggttgatcgtaccaattatttaggtttggtggatccacctgcctgaaattattattcagtggtggaacaaagtcacttcaaacttctgcttatcctaggacctagtctattaaaaataggtcttagaacgacttgttctcaaatatttctaaggggagcatcactgtgctagccggccaaagtctggtcaagtggtaatgtctcctctcttgagttatttgtttgccctccaaggcctccagatgcgaggaactggctgtttttgccatacggtctatttggcaagatttgaccatcttcaggcagaagaaggtctatcctcgtgctcgagggacctggctggacagtttgcccattgtcaaggtgctcatagaccctgcctgaactgttgatgagccttccttataaatgatctcttattagatcatggcctctttcgatagttctcttattaaactgccttatcaagtcaccgacctccatgttacggtggttcaactttgccagatgggcctggaggatggccgcctggtcatccatccaccttaggacttcacgtctctgttgggtgaaagcgtcacaaccaacaacacgtggttcttctatctgggtgagttggcctacagcttctctgagcctggacaactcaatatcctctcccaggtccatatgaggttcgctaattcatggtcctatttctcctacataatattggggaacaatcctagttgttgttcatggaggttgttccgtgttaacaggaccttgagtttgaggtgttgtcgatggatttattctaggtggcaagggttgattgttaagattcagcgggttggcaggatcaacaggattcgtggtattggctgaatttgcaaggtcgtcagggttagtgggattgacggtgttagtcatattagtaggacctttcgtggtgggaggaacatgaacattgggatcagccctcataggatcttgaggaaggcccgaggaagtagaggttgttgttctcctagttacgtccataatgattgatcagaatgataaacaatgctctcaatgaaagcaccaaaatattaacctcaaatttggtcaactgacagcagttgcttatttattactgacaatcaccatgtgtaaattgtaaaagcaaataaaaaaattaacacaacgatttatagaggttcaaccctcttgtttagcgggtaatgacctactcccctttttgttgtgaaatggtgaaaactggtgtatgacagattctaaactggtgagatgagaaaatagactaagtgtaaatgaagaggaagtggcatgcgagggagtgaaagggtgagaatgctctagggctcaagagattagagtttaggcccttttcactttgtctaatgctctttatatagtttaaggtttacaaaagatcaatattcaaataagttaatctccctcaaaaatagagaaaactactcttttatcatgtattaaagttataaaaataactaattgatatccctagaagatatgaagataatttgacgttgaatccttatctttatgggttgttggagttgccccgtaactaaaaccaagctatgactcatatagaaagattgtcgtggacccacctttcaatcaaatcccttttgaggaactttgtttgtgctggtcagcctacccttttcttaggggctggccgacacataaacttcattggctggccagggtgtggtctggccaaaccctactagttggccattttcttgtaacttgatcttgctcgagtatttggaacccttgttgattgacgtgttgtgcaaggtgacttttcttatctattgatgtgatgtactccacgtggtctcagttttgcctacgtagacatgccacgtcacgtgagcaaaaattaggataacataagtacttattcattctcgttaatctagcgagcgggtgtggcttagaagtatagtctagatttctgaatcaacaagagaagttttacttttaatgcataattttacaccaaaataaaaagatagacaaacctttttgtaccatctaaaaaaatgtgcacctattttcctaacccaaaattagcactcccatttgaaaagtccctccctccaactctctctctctctcttactcacacattctcacctacctttcaccattgaaacccaccaaaaactcaggcagaagacccaacccaggcagacgacccaacccaaatggaaggtcgatcacgacgctagtgacgacccaacccaaaccaaaggccaaccgcgatgccggtgatgacccaacccaggcgcaccactaggaacagacaccctagaaccaccgcaatgtttatggtgacttcttttgtgatttttccatttttatgtttaggttagtgtttattttagttaaatcttattcagtgtttagattcagtgttatttttttggttgacttggataaaaaaaatttgaatctttatggttaaattggataataaactttcaaatattttgagtttttgcactgttgttcaatagtattcgattgtgttcgattgacaagagtaattattttagctagtggttgaagatgactatttgattgtgttcgattattgtttgactactccactcgatgattttaattgtgtgtaataaatatgttaatttgatattgttcgagtattgtttgattatgatacttggttgttaatggttttttttatatgttgtggttgtttgatattgttcgagtatgctactcgattgttaatggctcaacataaaaaccaattaattagaaacaagagtaaagtgaccaaagagaaaatcattaattcaaaaaattaaactaattcttgtgtatcacgagtttcagaattgataataaataattaaacataattgttgcaaaactgagtctaaatctaaatctaaatcttatatactaccttaacttgcaatagtccaattttgaaatgctatataactacccaaacacctactcaattagcatgggttatttgaatagaaaatgacaatttaaatgagttaattcttatttgatgttgttcaattgttgatcgattacgctacttgactgctaatggcgttttatatatatataaaattaatacataaaaatatatatagtcaattaggtcgtattgtacctcgtcgacctccatttctgaatactgaagctcaactaatttcgaataagttatatttgattccaacttgaatattttactttcagtgccattaaaaatccaatctcttaccatgcgctcctgaatataattgtacatcaaatagctgaacaacgttcaccctatcaatttaaaacataataaaataaataccacaataaatatctacaaaatgtataaatcaaagacacatcatcgaaaatatatcaagtaccatcgaacaagtatcacgaagcagttaaacaaaccatgtaacttcctatgtatcgaacatgcaccgtgtaacaatcgaataggtactataactaatctatatcaagcagatatccaatactaatcgaaatattatccctaacttctaaaaaatactaattatcgagtaagcatgaaatataccaaattttacgccaaaaaaaaaaaaagaaaaact

SEQ ID NO: 220878 - DNA, 4028 bp, Cannabis indica
aagtttggatccatttttttattgctatgacaagacaattctcataagtgtaactctcatagtccgcttttcttatctcgtaaaataagataattatcacttataattctcaaaagatgtaacttttaaaaagtcacaatttattatctcaaataaatcactattggaaatgaattccaacttctctttattcaaaatataaatgataataatcttcacatcaatagtaataaacaacattatattactgttatcttatttttacactatgatgtggcaatgagctggatgacacgtgtcttatattttcctaccagggcggaaggaagtactcctagcaacccctgatggttgatataaatgtttgtcgtcaacatatgtcaggatgtctaagcagagtaatcaagggacatccgactaaaggacaattgcatgatcaactcacatgcaccgggcagaatatgtgagttggcaatttcagagacaagcctcgttgcttccaagacacgaagataatccctacattcgtgggatcaggtcagagaataaaggcaatatgccttggtttcccattctttacattgtaattatagaattaatatagtttcctattttatttattatagattaagggaaaccattcttcatgtaataagctcctataaatagtggcataaatttaccattagggggtcaaaatttagttcagaagaatactcaagagagaaaagagcaatctaagagagaattactcagagattaattgtaagagctttagacagaaagaacatttcattcttgttctcaagtcaatacaagaaaaaggggagtaggctatcaccattctcacggggtcgaacctctaaaaattttggtgttatttttaccttattgttttttctttctattatttattttatctaatcgctttatcttgactcactgtcgttggcttgaagcgaggccaatattttggtgctttcattgagagcaaaaacacaagcttttgtcttaaagtcttaacagtcaataggatggttgtacaaacttgaagggaagatctgactgatcaaggcgacccagtggtgagagatccaagtgtacaaactcctagaaatataagagatccaccaaggacaaaccgcagacaaattaatacacaccactaacggttggccacgaagtcacttcccctctgactggtttcacaccaggcgtataggaaactgggaacactagtacgacagttgaacaaatttctcctggcactaagatcccgtccaccaataacactcaaaggcctgttggagatgatattgaacttcaaaatatgtgacatgcacttgggcttatgcaaggccataacaacgctttgcaccatgattaggaagatctccgggcagctgctaaccttgcttttgatgagcaaagatgttaattcatagaatggagggatcgggaggtggaagtcatgagagctcaacaagcaaccaatgacgtcggttaaaggcaggccaccgtgttgatcagaagggcctatcaggttaccagttatcaaacaacgactgattctagtatcctcctaagcgggtcagaagggtatgcagctgatcatactgcacagactcataatggtcagccgtccaatccaaggccacaagtccaaactgtggaccaaacggtagacggttagatcttgccagagtgcccctttggaggaggtactcatttgaacaactatactcagatagaggtatcaggccaacctctcaaccaagtaggtcaaacgctgagaacaactagcgcatcggtgtttgattagctgggtatcttgcatgacctcagaagcgacctaaactgtagaaggggactagacaggcaaagcattccaccaaccgtccagccaaataattatgtccaaaatccagtgcaaagagatctcaatgtgacataggtcggttagtaggctggccagctgttggaagttatctagatttacttacatgtatgttgattatattctataatctaacaccctaaacatgaattcctaaaataatgaaaataaatacatataaagttaagaaaaccttacattggtggcggcggaataatatgtctccttccactcagatctctaacccttgttcctttctgtcgcagagtaataacaagatctgagcctagatctcctttaggtgttggattcttcacaatcttccatactatgattgagtacttgacttgatatgagtgggaatgtactctcactatagggtttgaaatttacgaagagaatgagaatgagaatgagagtcatctaatttcttatataggatttctcctagggttagatttaaattatatggaatcaaaaaagataaaaaaaaatggctaaaaatactccttaagtggccgaccttataataggtcgcactagttttctttcacaaatgccatattttccaatttcaatcctttaaatgtcaaaactatttatttaacagttctgattaattatcaaataaaatttccatttaacttatttattaactagaccttataataaagtctcttaacaaataaactctaaaacctcttttcttcacaataaagcccttacttagtgaaaattcataaataagacagtctaattttagaatcataattgattaattaaaaccaattaactgagtctacaaacagtattatctcaactagtatggggaccatgggcctatataatcaagcttccaataagcaaatctagaatttactatgtaaattttataacttattaattcctccttatgccactatagattcagaattgcactcttaattatatagaacgctctatatgttccaagatatagatacactattaattatctattattataatccaaataataaaagatcctctatagatgatttacatcgagtaaggacaaatttaccgctctacccctcaatgtatttatccttaaaatacttagcttcttataaatgatattccagtaaactaatataattactgaaataagagctcttccatttatttctattaagctaaactcaaaggaaatcatcattttgcttctatgtctagatagaggctatagattctgtatctatgattagtgctcccactcaattgtactatcatgttcccaagatgtaagtattggcccggacaaattggtagctttaacgaacaactctgagaacataaataacacacttgataacaattaagattatattgaaataaattttatttagggcataaaatcccaacaaactcccacttgcactaacataaaactagaagtgcatttcaatcaatccattatcttcatatccttatcaagtgtagtgggtttgactaaacccaaataacaggaactgtaatgctgttatgtaacatcatttttctatatgtattactcttctaagagatactgaatactttactgcttgattagtggatatgaatatatagaagacacatctctaattctatccaaaaatgaaatagagattataacagttaagaactttcttcagtttgaataattttttggtacttttagaaagtaactaagttatttagcttcactggtagaactaaattattatatatagtttttttttacccttttctagaataattcctccacccctagagtaatcactgtctctaatattaagttctgacttagtatagatgtaagaattctaatatacacccatatcatttaacatataagtcacttttagagattttttcttgattgtcttccaatgtttcttgtttgattacatcttagatggctccaactaaatagtacaagtctggtttaatgcatacacaagtgtgcatttaacctcttactattggtacttagggatatcttgttgtgacattttatattagtctgaaacaataagttccttctatactaagtcatcaacatagcattctagtattaacattaatgtaaaatacttacttaagattaagt

SEQ ID NO: 220879 - DNA, 3373 bp, Cannabis indica
ggggtcttaccctctggttcaaaagtcaccatcttcctcttacaatctatggtagtattgtacttagtcaaccaatccatccccaagattgcatcaaaatcttttaagtctaattcaatcagatccactgacaattctctcctttctactaacactgggagagaccttacccacctcctggagattatcacttttctagtaggtagtaggtaatagggtaccaagcctactagacatgacatcacactgtctactcaatttctcaataattctattagaaatatatgaatgtgtggcaccagaatcaatcaaaatagtaaacataataccatcaatagatatctcacctgtaacagtggaagggccagctttagcatcttcttgggttaaagaaaataccctaccaggaaccataaggctctctttcttagtctcgggcttctatagctgtgcgcagttattcttgaaatgacctactactccacattggtagcaaactttagactggcattcacccaagtggtgtctcttgtattttgggcattcagcataaggctgccaaacttcatttctacctcaacaaaaaccctagctagttaccttaaaactttctatttggacccacaaccggtggtccatctggtttcctctttcggtcattggggctaaagcttttactcactccaataccagacaaggtcttccacatgtccttcctctgagttctctttttacgaattaggctttcaacccattcagcagtgaaagttaagtccacaatctgaggataagtcttcacgacgcttgattgtttggctgccataatcacatctctagcaatatattcttcaaggcctttgataaacttaccctttcttgcagcatcactggccacttcattagaagcaaacttggtcagcctgtcaaacttggtagcatattcaatcacagtcatgctaccctgaactaatcgtgcaaactcttcagcttgagcgaaacgaatggattcattatcttatcatttcttagctactaagaaatctatatttttagggcgctaagtcaaatctcacatactcttaattacccaaaaacttatgctatcaacttatcataatattcccattaattcaatcaattaagtgtgttgtgatatttctggcctccgatcgagtttctaaagtcgctaaatctaaaaatatttttattatactagtaactcatattacattcacatatgctatgtaaatctccgtaatttataaattacgcttatttaaccacttatagcaaatttaaaatttatgttgaactagattagtaggatcataatctcacttattgcatgattaatacattaattataaactctaattatttactattaagcttatcggaatattacaattatttttcggccatgattaattttttggtgagaaaattgtatcgtatcataatacgatcttttaggtcatacctataatgatatatacagccaatatttaacccaataaaataaagataaataattatttatttaaacttaaaatttaaataaataactaaataatcaaattcagtttatctttattttagttaatcattcaataataaatatcttatcatataaaatatttaattaattaattaattaattttgattaatctatttaataaaataatcaaaacaaataatgtggcaattatatgtcacctacacgtgtggccatattttaatgccaaaaattaatttctcaattttatcttaaataaaatttattatttattttacaataaataataattgactaattctcattaatctattatttaattttgaattaaataaatattattttttaataaaataatatatttctctctcataatattatttaaccaataatattaactaatatattattttatgcgaacaaaactaaatagctaaatcaatataagaattcaattcataattaaataattatacaaaataacaatttatacaaaattactatttgccctcaaaaataatttctcaatgaaattgattctttctcaaataatcaatcttcagattaaatcttcccctttatagtatggtatagaggtgatttggggatgatgaacctatatttcgaagctccaataagctctaatttactattgatctcattaataaaataatctgatatattaattttattattactccactataaatatggaattgtatttataaaattttttctagtagtctattgatataattaagataagtagttcgtcctccaatttattagttcataattagagctagtcaaaattatcgttttacccttctaattatctcttgaatttcttaagtaccattaattcaatgtggacaattaatatataattccaatcatagatttgagcccaactataatcactcctagtattaacactttaaaggaactaatattcgatcctttcgaaaatcttagattccacatattgtataacatgttcccagccattcatgttattaagttcccaaaatagaaattgtaagaatcatcttctctgagaaattttaacgagtgaatcaaagaacttaatgaacacaaacatgagttcatgaatactcaagatttagactaatctactaatgatcatcattgtgatatgaataactcttctatgataaatgacatgttgataaaagatgttaattcatatcggtccagtcatgcataatcaaattatacaccgtacatttgctaaatgtctatccacatatgtgatccgaatcaaaatcacacgcactagagtataatgcttagtgtaaagtcctttttttttggcaagttagatgccaaaatattttttattttatggtaagatttatttgcattcataatcgattttcttaccttgtttattcagtttttattgctcttttctatgttaggaaagatgcatttttcagctgaacttttcttgtatggaaacttcttgtaagagaagcaattctcttatggaaagttggttttaaaaggaaactttgatgattgcctttttccttattaaattcgattgtgtcttgatacaatcagaatatacaaactgtttatggcaagaatcaagactcaatacaagatcgtctcgtttatggcaagtttccctttctggtctgatttgctgcgtcagaatccggttctaatgctgcagatcatgtttattttaagaaaattttgtacagttgtagattcaaccttgttgctgtctctagggtttttatgttctataaatagagcctagagagtagccattcgaatcaactcttctagtattaattcattttttgcatttttcttatttgtga

SEQ ID NO: 220880 - DNA, 2956 bp, Cannabis indica
taaaacacaccaattttattttaaaaatgcaacattttataataaatgaaaaatgttaaagaatagacataaataaatagagaaacttatataaattgaggtaacatttcatttcttctttttttcctgttttttatcgagttcttcggaaactaaatatagttaaagcttagaaaagataaaagataataaataataaacagatagatttttacgtgatacaggcgctaaagatcattagtccacgagtttattgtattggcctctttgggcaaatgtttatgaaattataagatggttacagtaaagactactctgcttatcttcggagagagtttacttggattttttgcatagtgattgtaagtaagaagttgttctctctcttcttgaagaaacatatgactatttataggcacacatggggtaaagggcataccctttacccacctaggatttcgtactccatatgccaccaaggtcagtactactaaaggacgatctgaccattggctggtaagaaccttcttcatcgtgtggtgtatagctacttgtgaggacttttgtacgcgcactacaatgatctagcacgggggacaaaatttgatcctgtgttagaaaaaggcgtaaccgtctatggagagatttttgcaagatcctgacgtggccaacatctacaagacctttatcgtgctcctggtcctttcctaaaggaagttactcctggaggtcatcgcctctcattaccttccaagttcgggagacgttccttttcttagctacctcaaataattattgtcgtggctatattcttcccctcgatcacgggagcttgctattatttccggtgttgaccattgacacgtgctaaagatttaggtcatggatacacccccacatgagttgtattctactgagggtacatacgatatttacttcctgttgcgtggtaaccacgcgacattttaagaagtatttcttgccccttttcgcacgtggcaaggtgcatttagcaaaaaaggtggactgcaactggcaactaaatgacgtgcagaaaggaacctcgacatttttgtgggtcccaggctgatcgtacgggacttctcatctccctagctgttagatctattgcaagaattttgaaccgttgatctttcataggcgtgttctctttttgaaatgtaaaccgcctttggtggtgttccttttactccatttactcgaagctctattttttctttgcaacttctttttcttttctagacatcttttgcatgcaagaagcattagatgatttgatccagcaattactcgtcatttgaacaaaacttttcctagacatcgcacccctttgattggactatcgaagttcttccttagaggaaacatttgatttttaggttaattgcgaccgctacatcgactggcttctgaccttctacgcaggcttttttaacacgccagttaaccctcctaatttgacaagtaagtgcactaacccctgtttgaatttttggcataacacatttagagcaaaaggttttttcttaggttagggctaggactgttcgcgtgctgaataacaggatagtctatacgaaagaaaccccatccttgcatccgttagtcgcttcaaaaggtttgctttttttccttcgtagcaatggacttgaatcaagaccttctcgtaagcacgaccgtatctatcaaaggtgaatctattccatccgtcgaaagttcttcagtgggacatgatcaaactgaggctcccatggtaacatttcaacttgaggaggccttggaaaccattctagaaaatgaacccatcgctgagagagacctccctatggaaactaggagagccgaaggggtcgaaactcctccagcggcgcaggcccatccagagtccatttgggaaatggatcagaaacccaacttctttcaatcttatgggatgttgtaagtttattctgaagttgttggcctccgtaacgtccttggactaatgtggcacaggctttccatcgttggggaatctgcttccattagtgttgatgggtttagtgcatggagttcgtcccacatttccaatggcgctcacctttccctgatgagaacttattttacgaatctgattgcaaaaattgatattgcaccatttcagctgatcctttcatcatacaggctcttggctgggtggtatgtgttctgtaaaatcaacaaactggaggttcctttcctaaggagatcctttactttcatagtgtcaaggctaatcccatgaggacaaatagaacaaagctgggattcttttgagtagataagtgcccaaattcttactgtcatgtatgttaaatagatcacacccatgaccttcgagaatatttgctcttttcttctggatttcctaagcaaggtgccatctcttcagttaagctttcaacttctaggtatcccgatgatttaccttgagtttaatctactttttaactttcactaatttctgtattctgactaacatatttgatttgtaggaaagcttccccttcagagtattaggactgaggaaataatcatgaaagaagcccaatatagggccttctaggaagagaaattgaaggttggagacctggtgacaactgaactcctccgtagatctcgtttaattacaaagttccaaagtattaatacagtcagccttcgaggacagcgccaagcccctagggaagtgaaagaggtgattgccacttatctggccattttaatcaccaatccggccaaaaatgataatgccttaagctctgattgggggtcatgccatcctgatcctctatttgaggaagaagagatctcggagaggtttgtcactacttatcctaatgtggggacactgggtgctagtacttcaagaagaggtaattgacccttccgcatccttcgtacccccagcctgagt

SEQ ID NO: 220881 - DNA, 1783 bp, Cannabis indica
ataagtagtcttaaaaacgtacaggatatatataaaaaaaaattaaagaaaaactctcattgatggcgaaattttctataatatttatttaattactaaaattttatcgtaggattaggattagatagttatgaatgtaatataaatttcacaaattacccacacaaacaatatggaacaaaatacacacacacaaatttatttttcgataatttaaatcacaaacataatatttatctaactattaaaactttatcataggattatgacttaatagttagaagtgtttggacaaaaatttatatactagaaacattatttttgataatgaatcaacatattaatttgagtattactatttgtcattagtaattttttttttataatttattaaattaaaatatataagctctgttgttctaaataatatatcataataaaattcattaataatagtatattatctcttgtaatgttgtttcacatagattatgaggctttgcagcaaggttccccttgaaatttaatggattataaaaaaaaaaaaattagcttttatttagcataaaatatgatattttctaaaatcagtaaaacacgtgtaatttaaaaaaaaaaattagcccttaagctaagtgaaccctaattaaacacagggctaacctatctatgcccaagatcaagcctgagcatttagtatggggttaattaacttggtagaaataaaaactaatttaaatttcaattaaccaatgaatttatgttccaaataggccctacttaagtttcgtattctcttaatctaagtaccttataattctactctctccaagttcaaacttacataaccataaaagggacagaagaactcagttcgatttgaaccattattattaattataatcacaaaatattaaataaaaatgaactagaattattcaagtacattgaaacatgtacgtatgcaagggttatatatatatatgaacttatgatttaatttttttaaaaaataaatatgaacttatgattgagtttcaatattatattattttatcaatcttgggaagctattttattattattattattatccatcaagaattaaaaactaatttgtttttgcaaactgtatatgaacaaaaatgacagaaggtttgatatgatcatatatatatatatatatgtatattaatatatttatgtagggtttctttttttggagttgagaaatgatgaagtgtgtgtatatatacagatcatgagtttatatattgacattttgagtatggaacatacatgtggcctcaacacaaatttggtggcacagaatggtggcagaagctaacaaatcacaaaatttgtaatagtgaaattattattgcaaagtcatattgggaatgttttagaaggtccattatataattatttgacattaatatttgacaaaggtatagtattgtctattgttgtggggtgttgtgtgtcttgtctataacctctataatataattgatatgtttctttgtagggcaaccctaaagaaaattgagcctcaaaataaggctagggtttttgcctaagaaaaagtaataacacatccctaaatttaaggcaatttagggactcaattaatccctactcttgttgtcttgctttgctttattggcttcacaaataagttttactttcatttgaaaattttcaagttgccatctagattgatcgcctatggtggctgaccgacgtaattgcatctctcatgttcatctggtggtgtgta

SEQ ID NO: 220882 - DNA, 1882 bp, Cannabis indica
cttttctgaatcactgtcttctacattcttggactttcctttttttgttctgttattctactatgtgtgagttgcctttggccattgtatttaaaatctatctgaatagcacaacatttaaaagttctcaaagaaatttattaatactccttttaggcaattttctttttaaaaaagactagtcagatttagatttagttcaatgtcctctgtgaagctaaaacacatttatagaagaagcataaggtgttatttaacttgaaaatacctaaattcatcataagaaaacctctgctagagaataccacaaaatagacagagagatgatagttttagtactttcatctccttcacattgttcttactacaaagtttggatactttaaacccacaatgccctttgtaattattaggaaaaaagggatgatattttaagctgccaaagtggttggttcacaaccgtcatgaacacaggccaatacgtccttgtactccctgtaaatggtaaaagaatcatagacttcaccatcacgacttttcttgtattcgaagaggagtgatgagtggttaaaggctgtgagtttgacaaatccccaatcataatctctgaatacactccaagttggggtcaagctgctgaatttggccaagctttttcctcctcctccagttaccacatgaatagttccatttacaacaccactataatgtgatttttcatcattcacacattggttctgcattatcatcaaacaacgaagcaagattagaatacatattggtaaaattttagaaccttatatggatgaactgtagttatggattttcaatagtgtttgtgcacaactgggaaaccaatgctatacctggtaaatggggcatatcctttcgtagttatggacatggccaaaaaaggcaatgtcgaccttgtatctttgccaaagcttttgtaggtcgtcccttccttcaggctccgcaaatgagccctgctgggcgtaccaagcatttgatgaatagccaagaacacggtgagctataaagatcaaccaaggctgcttccttctatctgctgatgcaaagcatttctcaatccacttgtattgttctgatcctgctctccagtcatgttcactatcggctacacagaatttaaacattccataatctgctgagtacctacatatgttgcattacatttacattactttattttcatcctcttgtgacatctagtatagatcaggaaaatattatcttctcttaagtgagtatttatataaactaaaaagctgtgaagttttaccaaaacttggctcgattctcagctggaacatagtagagagtttcagcaggtacaccacattcaccccctgaatcagatgtgtcccaaaaagaccccgaatttggccaatcacgttcgtgattaccactgcatttacatgataaaaaacattagcccaatgtggcaaaactataaaaatagaagatattagatagaaatgaacaaaccttgcaaccatgtatggaacagctgaagcaatgggtgagacttgtgctataaactggtcccactcagataggtatccatcggcatatgccatatcgccgatgtggaaaactatgtcatagttcttcaagtccttaacgagttgatctgtggtgttgagtgaacctggttgtgtgttaccatagtcattcgaaccatctctctctgcctgaaataaaaaaaatgataattactgatcataaatttaagaataaaacttaattgtggtaccataaccatttagtaatatatagtaattaagctataaactacctttcccatgtcgccaaatacaataataacgttgtaaagagtcttgtccaggatatggtgagg

SEQ ID NO: 220883 - DNA, 2058 bp, Cannabis indica
gcagtttgatgaacacccctagctacaacaggaaatatgacaagatgccttcttgagtagaattatttcacatttgcaacaagggtgtacatgtgatgttgggtttgccatggagcacggacagttgaggtacaaggggtggttgatgctacaaaaagtgtgctcccttatacctatgatcctacgtgaatatactaactcacctattggggccatttaggtgaggagaagaccttcaaatgaatggcatctaacttttattggttgggaatgcaacattcggtggctgattggatttgtaattgtgaggtgtgccaaaaacataagtctgtggctacttctccagctggcttattgctttacccactttagtttgagacgaattaaccatgaatttcattgaaggtattcctcattctcatggtatggatactatcttggttgtggtggattgattgagtaattatttcaatttcatcatgttgaaacatctttatactgctcgagtggtggctaaagtgtttgtgaaagagattgttcaactacatggggttcctcgaagcattatttatgatcatgataatattttcatgagtaatttttggcgaaaactatttaagcttcaagtttttgagttacgacatagtaatatttaccatccccaaaaagatggccaatcagaggatgtgaatcggtgtttggagacttatttacgttgttatgcttttgaaaaaccacacacttggctggttctcttgggtagattattagtacaatactttctcattcaacatctaagtacactccattcaaaatcttatatggtcgtgacccaccttctcttatttgatacaaatgtggtacaactttggtttcgtcaatggaagaaatgttggaggaacgagacgctcagttagatgacctaaagatgcatctcttatgagctcaacaaaagatgaagttctccagtgataagaattggagggatgagaattttgtggtgggatagaaggtcttcatgatgctcaaaccctttcgccataaatcacttgctaccagtcataatgagaagatttctctacaattttatggtccttttaaggtgatgtctcgtttttgtgaggtatcttataagttggatttaccacttacatacttagtgcaccttatttttcatacttcgcagcatcgtcgcacttggtaacaacaattcttctcctttgatgcccccacatttgacttcagatttagagcttttggttgaacctgtagaattattgggtattcgtagtacccattcagatggtcgcaaggaaatggaagtgctcatcaaatggaaggacttgccactcttttaagccacttgggagaattacaacaacattctacatcaatttccttctttttaagtttgggcgggggtaatgatagacctcaaatcagatacacctatgataggcgtatgcaatagggtaaggaaggatttatatggatttatatggcctattttagaattaataagattataatttcgtatctattttatttggaatgttttggagaatatattgtacgagagtaaaggttaagggtatgcttattctaattttgaatgagctttggcttttgggagaggaacaagaactctcaaattttctagaattatcaataaagatcattctcttttcttctatttctatatcttcttactgtggtgtatcacttatctagagttgaactagcctcaagagagggatttgatcatcgatgcgagtctcatattcagtgagcattaatataagtaaataaataaattgttaaaatttgagtagtgaaataaagagtaagaaaaagcaaagattactattacaaaatgagagtggaagtaatgaaatgaattccctatattgaatcaatgattgtataataaaagagcttatatagctcgatcaagtagagatacaactcatgacttagttacaaactagtaactaactctgtaattaactgtctaaatcttaacagactcaactaacagtaaaatagctactagccctc

SEQ ID NO: 220884 - DNA, 2976 bp, Cannabis indica
aacctcacatttcttttcattggtacagattgtcaaaatcttctcaaactaatcaccaaatttaaatgttgaagttaaaattctataagacttcgctgctagcactcaacaaccaatgaaaaagaaaccaaagcatgaaaaatagtttctcctcccttgaataagtaggacaataaatttgaactgagacaaacttagaagatagttgaaccattgtagaaaaagaatttgaggaagcttgccataactaattaagtactttaagatggaggaacttttaaatttcaaagtttacgccaaaaatttgagctattagtcacatgccaatttcctttttgctcctgaattaacttgtaagcacttcaacttgaataaaaacctaaactttcattttaccaataacactgattagctgctgaataagagccattaggaatactcaaaatgaaatgctttgagtaataactcaacatcccaattgcatgcaatactatatttgacattgacatgtattaatagttttgataaaattatactattttttagtgtgtaatagaaatctaaagtaaaattataccacggccccggccaactatggccctggatcccaaacatcgaacctcaacgcaaatcgcgaaccctaaagcccaacacaacacggacaccaaatcatagcttgactcaaacctcaaactctaacccaaacctcgaatctctctccgaccccaaacttaacttcgatcccgactctcactagctttaccacagtacaacttaagtttataaatattacattgtattaaattttatgatcgtaataattaatacaatataaaattctatccaaattcttatttaatataatacaatgccttatgtagtatgtcaaacgaaaccgattaatataatttaaaatccaaacattaatatacatatttatattcaataaataatataaaataattaattattttataagacattacttgatattgttggtgttgaatagtgacccacatcagctcgctagattagcgtgatgattaataaatttaagtaaataatttagagagacacacaaaatttatagaagttcactcctcatgttgtgatggtaatggagctatgtctacttcgagaatttattttttacgagcattacagaaaaagcctaagtatttaagttctagtttctagagagagatactctggccttgtgggtagttttctgtatgtgaaaaatgagttaagggagtcatccttttataggtgaaggaggtccaaaaaattaggaaaaaatacaaattagacattttttaccgtaaatgatggtctaactatgaaaattagcttctagtagtgatagccattttttggtgcctgacgagtcccgctgtgcgtagcccagagcttattttcgtaactcccttgggggtaaaatttgatgatgatagctttagaattacaattgaagtgtaatacatgacttaaattgcgtcaattggatcaatattgagtgagttatgactattttacttaaggtaattcatgaaccagtgcctaggttgacatccagcgcccaggttgacatcccagagcccaggttgatatatgacgtcaacatggacgctgggtaagtgtaaaaacatcttagggatgtactttaagatgctcaagtaatattttaacatcatttagtctgtttctgtgttctagcaaagcaggtcaccagttcttagagatgttgctgttttgcaaaaatgagacactcaaaactcttcattttcgagtgagtttctcatgttagaaatgaaaaatgtgaagttgtgaatttaacttctttgacttcatggatcttggttattgtgaaacactagacggatgatcaaactagaattggaatcagataagcaaaatccagcgcaccatgtcatttgtcaactttggcactggataccttattctcgggatctcgttttgatacttctaaggtttctaaatttgaggacgaggtctcatatcctatttttgagcattctggattcattggtcgaatcaaatttggcatttgagaaattgaaggcagcgtcccagggtgattctcaacctaggcgttgaggcccagcactaggtcaacctaggcgttgggccctatttataggcgctcgagtttgtgattttctccctaagtttgcttgaatcttcattattcctgatgatgaacaaaaaatctgaacactttttggtgaacttgatcagaaacagtccatgttgataaagtgtcaacatgggcgttgggcccagtgccaagtgccaacctgggtgttgggtcctagttatggccttccaaaaattctatttgatccccaaaaatagttgaatctaaatattttctattttggagaagatgctcaaaagaaatctttgaaaacaccattaaaaatggcctaggttgacaaaatgtcaacctgggtgtagggccagccctaggtgtaaacatgggcactgggccctgcttatggcacccaagtaatgttgtttcttctctaaaaaggacttatttccccattttttatgaagacaaagaaatgcaaaagtcggatctccaatctgatacttggaaggtgccaaaattgataaattttcaacctgggcattgggggtgctcgagtcctcgcgaccttaggtactcaaaaataacttactctaattctaattatgatgtcttaaatatgtttgtggtatgtgttggaattattttaccaggatcttagatctactcacaagtatgttgtttaacatcctaaatatgaacttctaaaacgataataaacacatataaagtttagggaaccttacattggttgcagcggaataatatgtctcattccactcaaatctctaacccttgtatcctttctgtcacagagtatcaccaagatttgagtccgaatgtccttctcttcaatttggatt

SEQ ID NO: 220885 - DNA, 5452 bp, Cannabis indica
ttcaaagctatggtagaaactcaatttgggaggaaaataaaaacactgagaagtgattcacgtggggaatatcaggctttttcaagtatagtagcacaaaatggcatattgtttgaccattcctgcccaaatactttagctcaaaatggtcgagccgaacgaaaacatcaccacattgttgaaacaggacttacactccttacacatgcagcaatgcctcaaaaatattggtctcatgcatttcagactgctgtctatttaactaatagacttccaacctctgttcttaatcacaaaactcctatgaggttttgtactcaaacaacatgattataagttgttgagggtattcagttcagcttgttttccctgccttcgaacttaacaaactcataaatttcagtatcactccactaagtgtgtaaacttagggtatagtgatgttcataaaggttacaagtgtctcagctcgcatggtcatatatatctcaagacatgtcatttttaatgaaaaagagtttccttgtcaacacggtttttttaataattatcagccagaaaaagaagtgacactctctatccctcactcgtggattgatttaccattcaatacaatgtcatctcagtcccatgcagcataaccttcccaggattctatctcacaagatcaggtaacaccctcttttgatcatggttgacctatctttgctgtaccatttcatactttagatttgttttcccaagaatcacctagttcagctactgctagccctgtcactactacacatcagccacctgatcatgcaacttcacccattcaacatccacctcctcgagatatatcacccgtgacacaacctgctcctctcatctcttaacaccctatgattacctgtggcaaagcaggcattttaagccacgggtccttgtgtcacaggctgcttcatctcctcctacacctggtgtacctcttactgttcaagaggcactccaccatgaggggtggaattctgctatgaacactgaaatggcagcgttacgacgcaacagaacatgggtgcttgtgcctccttcacctcacttaaatgtttttggaaataagtgggtttacacggaaaaatttgatgcaaatggggtacttcagaggcttaaggcacggttggtgctaaaggatttcatcaaaggcctggggtagattttggtgagactttcagtcccgtcatcaaataatccacagttcgtgttgtcttgactattgtagttgcacacaattgggacataaggcaattagacattaataacgccttcttaaatggtacattggatgaagatgtatatatggtacaacctcaaggatttgaagacccaaacaagccacattatgtctgcaaattgcagaaatctatctacggcttgaaacaagcccctagggtctggtatgagcaactgaaaaacacactattgtagtggcaattcgtgaactcgaagccctcttcattctttatgctgaaacattctgagtatgtcattatggtcttgatttatgtcgatgatattatcgtgacatggagcaaatcaagggagttagaaagcttcatatcacggctaaacaagaccttttcactaaaggatctagggggctacattacttcctaggcattgaggtttttcgagatgatacggggttgtatttgtcacaggaaaaatatgtatctgaacttctacaaagagtgaatatcgtcaacctaaagccaagtccaacacctatgacagcaggcaaacctatgtccattcatgatggtgaaccaatggtcgatccctctcactacagaagtgtcataggtgcactacaatatttaagccacaccagacccgacatttcctttgtggtcaacaagcttagtcagtttctcaagtgtcctaccagtgttcattggaatgtcacaaaatgtgtactacgatatcttaaaggaaccctgcaacatggaatccatataacacctagcgacagactcacactcacgggtttttctgatgctgattgggcttgttgccctgacgaccgaagatctattgcttgttactatgtttttcttggagactctctgatatcatggtcttccaagaagcaaacagttgttgcatgttcgagtaccgaatcggagtatagagcattagctcaattggctgcagaacttacatggcttcaagaattactcaaggaaatggaattcaaacttccagcagcccctataatatggtgtgataatatgagtgctagcgctcttgctgccaatcccgtttaccatgctagaaccaagctcatcgaacttgatgtgcactttatcagagacaaagtacttcagaagcaattggagattagatacataccatcacatgatcagattgcagactgtttgacaaaagggctttcacactccagattccagtttcttgttgataagctcggaatgacttcatcaccctctcgcttgaggggtggtgttacagagtaaaaatatgcaaggtacttttgtcatttttgcaatgaggtgtactcccaggttgttggaacttttccaatccagaagcaatcattacaattgtcctttattttcgttagaatagaatctttcgattcattctctatgtaatgattgtaacaatttactccacgtgtaaggttgagattgtatcatcctcatctttgtaatctctctaatttctataaatggaattgccctgcatcagtctcattcgagctgatcattttactgctgcattctctttgaaatttaacttttctcttatcccacatgagaaggtggcttttcattaagctgtttgacatacactcacggtcccaaaacatagattcattgtttgccaatcgttgaacggtaatttacttactcgtgatttacttggctgcatgttggcttgcaatcggattctcttaattgtccagtttgtacatgagtctcatgctgatttattatttgaattaatgcaccttctccaaaatgatcattcaggaggttcttggttggcttggtcatttcgattggcctatggtgttttcgatttggaaggattggtgtaccgaaggactcatggattgggttttcaacgtagtacgaaggactcatgggttgggttttcaacgtagtacgcagtggctgctactatttacttcatcagtctatttgtggttcgctaaggttattagtgatcaaattaaattttctctcaaagcctagaattaagagttgtaatatgaaatcattttagcaagaaagatctcaaagtaattgctagaatcgaaaacatgtaaggtgttgggatagctgctttggcagtgtgttttggttggtgattgtttgaataaaaagttttctttctttaaaaatatataaatatattttcttttaagattagtctaaatatttagagattgatataagatttgtctttgccttacaatctcgtttgtcttttttggtttacaaaagcacaaacaaaatataaaaccgaataaattaatgtactaacaaaattcactaaattcgctttattgattgatacaactaaaattgaggatttaggctactcaaatttgatgcgacatatatgcacaactaccacatatatttctaatcatatatagaaatagataaacataataattttttttttaaaaaaaaaaatagagagagacgtgttattttatatattcatcattaatttattttaaagcaataaaaaaagttattgattttacttggaaaaaaagtcctttgatcatactatatatgtgttcacaattactataaaaaaaaaaaaaaactgctaaaatatcgaatattttagtcgaaatttcatttataaaaggaattttatttataatttatttatttttatacttttgtttcacaaaatatcacatatatatatatatgagtggttctacaattattacaaaaaaactattatggctataacttttagtcacaatataatttattttactaaatgtgatttttagtcacaacgaaatgttacttgtgactaaaacagaatatttagatacaagttgtcagtaatttagttttagtcacaacaagtattgtgactaatacctttagtaacgaacattttagtcataacatagaaatgataatttataattattcacatttttttttcacgtttagtcacaagttttgttgtgactaaaagtaagatttttagagtgaatacgctccataaaaagtgcatcaatacatcccttactgtttcatcatccaaaaaaaaattaatctaattcttttatgattgtgtacattattattatttaaaatatcatgcaaaattttgaaaaatttagaatagtttataatataaaaaataacgtttaactttcaacaatctattttacatgtatataaaataaaagaattacacggtgtaactaattgtttgaatctgttttcgatgtgtttatatttttaaatagatgtcataaattactgcaacgtacatagtcataaactgactaaacatgttttttcaaataacgaaacaaataaagcgagctcggtagaattttcttaaactttttcacatgtggtacttatttatgattttagttaagataaattttgggcgagatttttataataatatgtacgctgaatttataaagatataatataattttttgaaaggaggcgatttcaacgattatatcaaatatgtaactatcatggttacatttatttttaaccaaagtatcattgttgaatggttatgattaatttagaaaataaaagaaaaataaataataaataacttgtaacttaagactttatttccttataaaaacttaattattaattgattttctgtaatttgttaataagtaattaaagatcttttaacaatttatttttttaaacttaaataattaaaataattgcaacaaaactccttataatttaaagttattacacatataaccttaattaataaaaaatagtatgaatgacctctaattagagttaattttactctcaatcttatttttaacacttttaagtgccaaattagtgtgtaagtccaaaattggttcaagttaaaaaaaatgaaaaattaagtaaaaaatataataaaaattaaaaaattaatgattgttaattattttcgctattcgttgaaatcatctatatcaatctaaagattgtaaaaaggaattatcaacgtagattactaattaattgaaattgttacttctttttcacaaataaacataacagtagaaaaatcactactacaaaaacaccctttagaggcggtttttaagccctttaggcgtcggttttcgcgaaattcgctaccgacgcctatcagggcgacgctaaagggtttatttgaaccgacgccatatataccc

SEQ ID NO: 220886 - DNA, 2781 bp, Cannabis indica
taaattgtcgttttgcatttaaaggaagacgtttagaaaactcacaagagtaatgactggtaccaaatcccatggagttggacttggagccatctcgatctctcatcctttcattttacttcttctttttcttattattaacactattatctcatcgccattctccactccacacgttccttttcttctgagttctttcattaccaatcaacaccatggcagccacgctcacccttctcaacctccccgttcttcctcaaaagccaaacccatctatctctatctctaataatcccaccaaacttctgatcccccaatcccaatctcataccaaactctcctctactaactcacaaatattcatcaatgaagcttttgcccacctacagtctgcttctcttccccttacagcactcacattacccttcttctttgaccctcaggtaactcctcttctaaatcttcacttgggttgtgattttttgatctgggttatttcatatttcgcattcggatccaaaattttcacttggggtagtgggctttgtttattggtaaatccaattgacatttgcatgtgattgggcagaatgcagcagctgcaggtgggcaattcggaatattggagggaaggtcatttgctctggttcaccccattgtgatgggtggtttgttcgtgtacacgctatgggcaggctacttgggttggcaatggaggcgagttaggaccattcagaatgaaattaatgagctgaagaagcaagttaagcctgtaccagttactccagaagggaaacctgtggaagcaccaccatctcccgttgaccttaaaattcagcaactaacagaggtaggctttaatataatgttatatattatatgttactgtattgaggaaagccccacattgttttgtggaaactgatttgaagtcttaattttgcattccatcaggatccctagctcagggacaaaaaaaatgaattttcttgatttataatatttgatgggtcatgggtactttagaaatgaggggtcattgggatatttctaagcaaacatataataagaagttcatttttgaattatgtctgttgaaccaaaaaggttattattattatattttcataaattaaaatgggtgcttttaccgtgcacctttttaaaagcggatgcattgatgaactttctatttatttcttacactttttaaatttttctgaatattttaaaattttgcaacatgtcttaataactatagcgtacataattatgagaaaaaaaaattgactaaaaattatttcgaatgccaaaacaactaaaaaatgttaagaaatgcatcgtaaaattattcaatatttcctccatttcaccactttcccttaagaatggattttaaacataataaaaaagagtgaaaaacaacaaatagtgaaacaatcattttctctattgttccaacttccaatccaccaccttttatctttctctttgattgactttaaaagtataagtcaatgtgaaatgcattattaaagaagagaatagaaaccttaataaaaaaaaatagtttttaacggccaaattcttcataaatgtttttatgttcctctttgattcattaggtttcagaaaataaattaatacatgatacataaataaattaggtttcttctttgatttattagactttgaaaaataagtaaatgtatgatacataatcaaataaaaatcttatataagagagatgttatactgtcaacaattttttttaataattaagttgatctcagagcatacatacatatgttagatttacaaaagaaaaaaaagacaatacacacatattagaaaaaggaaaatattcagatttcgtaggcttctgatatggttatacatatgtaaaactgcatttgaagttttctaacacaaaagataagtgtttggtttatgcatacaaaagaaaatgtgatcacatttggtttaaaaataaaataaacccttgaaaatccttaactgatcaccattactatgcctctagagcctcttagaaaagcctgttgatgatgaggtcataactactctgaaagtgtataggatggtaatataaatgaatgtatagaattggacattgttcattctctctaatactttcataattatatactatacgaaccaaaggtggcctaatccaccttcaatagccactatgcccgaattcatttgacatgtaagtaaatgtctaacaatcattcatatatacaatcatggcactgaagtcaatttcttacaagttgctcatcatataatgtatcaattatatacatatatgtagtcaggccaaatcattaaacattatattggacactgttcaaagatatataatgtaaaggagtcgaatacagattcaatgagagcaaattagaatttaaagctgtaagaaatattcccataaaattctgataatgactaaaaattataagtcattctgctttgcccaaaatattctctcaaattttgttgggtccaactttagaatataagattataaattatttgacacaaagtttagagtaattttgaattttattttcacagttgttttgaattataactctggtatctaaagtcattcaagtgagattataaatatgagtttcaatttaacataaactcaatgtatctaaagaatacaagattaccagaaaaaattgatgaactatgttcgacatgattcgtaagcaacctaattggtaaaattagatacagacttacaatcac

SEQ ID NO: 220887 - DNA, 1553 bp, Cannabis indica
aattgcaaataaatatctaagtttaatttttggcggtaataatacttaagttatatttatagaatctctatagatacttggtcgttaaatgtcaagtcagatcaatcatacctaaaaatctaataatttagatcaatcagaaattgtcacgtgacaatttacttaacatttaacaaccaagtataaagttaaagttaaatatttatactacaaattactcaataatataaccttcaaacaaagatgagaatcaaataaaagaaagaaaaaaacatattcaccttatccctactaatttgaacatataagttcacaatattccaaaaggaagtaagattggaaagaaattccattgtataagtaaaccaatatatgttgtaattacaatcattaaacattaccaccttaataattggacttattttgaatatgcgatcatcataacaaaattctgttaattctggagctgattcaactacgccacatcttatatataatagatcttgaattttcaatcttttcaagtgtaaacttgaaatttttaaacattctaatgcccacctacatcatctgaaagacaaattctcaagaagaagaatatcaaaaataaatgcttcaaatgtgtgttgatttgcatctggccaaagcaatgagagattctttattttcttgcaagaagggatgtttattgtgcctggatcaacataacgtagaaccaaagattcgagattaatggcttcaatatgaactcgaggattctcgttctcataatcaaatctaagttcaatgatcttgacacttgaattttgtaataaaaaattctcatcaataattcagtaaatatattgatgtatatgcaatttctcatgagaagtgcaacgcgaaataagtttagatagccaaccgtcgtttgttgacgatgaaaatcgacatgacaccaatgatagagtttttaaatgtggaaaattaaatgaacaagaagtatccaattctacttctttcaactccaacagggtcaaatattttgccttctctactattttaggtaagcaatagtagtagcattcataaccatagaactctccacatatgagaagacttattttcttaacctttttgtcaacaacgaaagttaaccatttatctaagaggtcggccttacttcttggataagaaaccgtcatcttaagattaaatcttgttatggttgaatcgaccctaagatgcataccctttttgcagtgatccacgcaatttttaaaaagattgaaggattttttcccttgtattaaaaatttaaatgcggggaatggatgccaataacgctttgaaagagcgcatgtttgaatcacatctttagtatagagaaacgaaaggatgttaaagattactccttcaggaagttccgaaattctatcatcaattgttgtcgtttcaaccatttttttcccaaataatgttttatccacaagttgatcaaaaagattctaagtaataaattctgaaacgtgaacaataaaagaaacaattatccaaataaaatatcagtgttt

SEQ ID NO: 220888 - DNA, 1300 bp, Cannabis indica
atacttgtgagtagatctaagttcctggtaaaataacttccaacgtaatgcacatctccagtgaccttctaggggtcaagctgcatctcgaagtttttgatttgagccagggagtcctcccgtgcgatatacatcttccatactgacattttgaactttgacagaggtagggcatttggatatgccgagaatggtgatcccctcactcatcaaatttgaggtctgaaggctttgggccagctgtgccctggatcgtgtctctaagttggtccagctgtgcttgcacataaggatctgttactgtaggagcttgattgactagccctcctttgggttgctggatattctaaaaagataggggctagatagccataccgtgggagagtgtatggtgaagatcatccatgccccacaaacctcggctggcattcccagatacaggacttggcataggctggctaggcttacaccttgttattgtgcttggccgactagacctgcattgggtagggtctggccgtctaaggcttttccatggtcgtaatgcctccttggccggctagacctacattggacagggtttggtagcccgtgaatcctcgatcgactagtgtcagttgtgtgttgattaggggtagatcacaccaattgttggagtttggtggatctagatgcctgaagtgatcggtctcacttcttgagtcgccatttaggtgtttccacccactttcggtcctcgtcgatcgaagattgatctctgtgtacctcgttcccctaggggaggaagtgttgtaccctggctgactataggtgctcctattgatggctggtcggtcggccagtggttacataatgggggtttctattgagccagagatccctggctgacccccaaactgctggttgtcgggatctggctattctcactgtttaacctccgagtaaaggtctgtcttccctctaggggaagatccgtcctagttcctgaggaacatggcgccaatcgtccttgtagtagatccctaagaagatcctgtcagttctatgattgaaccatcttattagatcactggcgtcagggttacaacaatctaattctagttcgtgagatcaaacgatgtaccctggtcatccatcaatattaggaattcgcgtctctactgagcaaatacatcacaatttgtagcgcatggttctttagttaggcttgcacggcctacagcttccctgagtctggctaactcaatgtcttctcctaagtccaagtgaggctcgccaattgctggctcacccactcccg

SEQ ID NO: 220889 - DNA, 2684 bp, Cannabis indica
aatctgattattttgaaatgagttttatttagggcataaaacccaacaatttgctgcattgttttcagtaaggacattcagtagtttgatctttcctccagagattatatctcgaataaaatgcatcctttcatcaatctgctttgttctctcatggaacacttgatttctactaagatggatagcattttggctatcacattgagcaagtatctctcttttattgatgccaagttctgttgtaattccagtaagccaaagtgcttctttaacaacttctgtgcaagctatatactctgcctcagttgtagacaatgccactatagattttacattggatttccaactgattgtgcatccattaaattgaaatacataccagattgggatctcctagtgtcaatatctcttgcatagtcagaatctgaaaagccccttacttcttctccattatagttggcaccatagatgagccctgtagttggggtaccttttagatatctcatgatccacttcaccattgtccagtgatccttccctggctgtcctataaatctgcttaccatactaacaaagtagcaaaggtttggtctggtgcataccattaagtacatgatagttcctactacacttgtatatggtatgttatccatgtatgtgtgatcttcatctgttactggagattttgatttggacagcttaaattattgtgtatagggtttgcaaactggtttgacatcctaaaaaccaaatctgcttaagatcttagtaatgtaaccactttgtgtcaggattagcctccttgttgatttttccctagtgatttctattcctagaatctttcttgctggcccaaggtctttcatttcgaattcttggttcagcatcttcttaactttgtttatttctgcaatgctcctgctggcaatgggcatgtcgtcaacatataggagaagataaacaattccctttgtgcttttgacatatacacaattgtccataggcacttctcttaaaccctgttcttagtacaaagtcatcaaacctcttgtaccattacctcgggatttatttgagtccatatagagatctcttgagcaggcaaacatggtcttcttttcctttgatttcatatcctctactttacttcatgagaatatgttcatccaattacccatgtaagaaggctatttttacatcaaactgttccagttcaagatcttcagttgccataatgctcaaaagtaacttgattgaagtgtgtttcacagtaggggagaaaattttattgtagttatcccctccctttgtgagaaacctttggcaactagtcttaccttgaaccttgctctttcaacacttggaatcccctccttatgtttgtaaacccacttacagcctatgaccctttgtccagcatgtctcttaatacaatccatgtttattcttactcaagaatccatttcctgatccatagcattatcccactctttcttatcttcagattgcatagcttcttcataaaaagcaggttcttcaccttcaatgccatctatgctgagagcaaaatgcacaacatctgcatagccaaacctttcagggattttactgctcttctgtttctttctcttaccaattaataatcaagagtgtcttattcatgatctgaagcctcttccacatcttcttaatggccagagtcttctactacattttcatttctctctgtagcttcttgatctggttccatctccacctaaaactaagatttctcttcattctcctttgctgcagcattcccagcttttgctacaacatcaccattttgtgaattgaccaggtctttgtacatatttttctcatcaaacaccacactgctgcttacaaaattattctgatgattgccatcttcaatgctccaaactttgtaccctttcaccccttctaggtacccaaggaagatacatttcctagctttgggttcaagtttgccttgtttgatgtgagcatatgccaaacaaccaaagttcatcgggtgatcagacttccagtggagttttgaactcaatggcagatgaaggacttctattgattagaagcattctgttacaacaacttttgcccaaaatttcttagaaagagctgcatatatcagcatacatctaactctttcaaggattgttctattcattctctcagcaagtccattttattgagagtttcttggaacggttagatgcttcccaatgccattttctttgcaaaactaattgaattgtctgttctcagcttcttaatcttcctctcagtttaagtttcaagcataacttttagttcttcaaacttgttaagtgattcatatttatttctgaagataaaaagccatacatgtcttgaaaaataataaataaaggtcaagaaataccttgctcctcctcttgatggctcccaaagatctgagtgaagatagtccacaatgcttatggttttgtgctttcccaactcaaaactttgctttggtagcctttcccatgatgcattgttcacatagatctagttccttgataaaagctttactaaatacccctttcttactcaaaactttcagaccacaatgacttatatgtccaagtctcatgtgccacttgagagtgacactatctgaggttttcatgactgaattg

SEQ ID NO: 220890 - DNA, 2381 bp, Cannabis indica
tggctgagccgcataagaggatcgaaaattctctagccgaggtagagagaggaaaggacaagcgtgagtcacatgtgccgcgatcacgatctcgcaatcccagaggaaaaaagttccagaggaagaagttctcaaagactcagtcctcaaagacaacgaagtccgaagttggccaaatcccctccgaagaaagagtcatctccaaaaagaaaaggaggtccccactttgtgaactataaagaattggctatcccgcgacaccatatctacgcgattgaagaaaagaatggagttttcaaaaagcctctcccaatcaggggaaatcgagacaaggatattggctataccacattggaatgttggttcttacaggacgagatcgaggaattaattagatgaggaaagtttggaaagtataagatgaatgaggaaggtcatccccaagcagatgacaaggaagaaaccaataatgcgagtggttcgagaactcctcgcaatattttgacaatcattggaggagctcacatcgccagagacttcaggaagtcgcaagaacgatatgccaaggaggaaaaagagaggccactcactaatgtgaatattttgactgaacggctagaaaaactattcaagaaggagtgcgatgacataactttcatggaaagcgacgccagatgggtttaccacccacacgcagacgcactagtcatcgttgccaatattggaggagataatgtccaccgcatattagtggacaatggaagttcagtgaatctcattaactttcaagctttcaagcatatagggttacaggagaaagatctgcaaccagtagttttgaatatctacggttttaccggagatgagattgcattaaagggaatgattaaactaccaatcaccctaggaaccgcacctgtcgctgccaagttgatggctgactttgcggttatcgatcagtatccaacatataatccggttattggccgtcctatcttgaaagaaatgaagattgtgacctctatctatcatctcaccatgaaattccctaccctcgctggagtaggatccatgcgaggagtccagtcagactcgcgagagtcctacaacacagcactgaaactcgtagataagaagtcagtaaacatgatatacatgttgaaagcaccacctcctcgagaagaagtatgttgaatcaatgagataccgcatgaagaaaaaccagaattggatccgagaatcctcgattataccaacaccacacaagccgcggaggatacaattgaggtaccaatcgatccttctgataataataaagttttgaaaattggttctaaactaacttttcaacaacgagaaaaacttgttacttttctcaagaaaaacctggaagttttcacatggaaacattcggatatgtttgggatatcactgcgggtcatatatcatcgattgaacgttgaccccgaagtgcgaggtgtccgacaaaagcgtcgtaaaatcaaaactttggtggaaatacgatctccaacaaaaccaaaagaagtttaaagccttacaggtaaattcgttgctttgaatcactttatatcacgttcctctgacaaatgcaaagagttttctcaaattttgaaaggaaataaaaagttccaatggaccaaaaaatgtgaagaggctttttaggccctcaaaacgcatttggggcagcccccaattctttccaagccgatgcctggggaaatcttatccatttacctctcagtgtccgaatacgcgattagtttggtactaattcgcgaagaccagggtaggcagtacccggtgtattatgtcagcaagcgtcttttagatgccgaaactcgttatccacagatggagaaattggcgtttgcattggtaattgcatcgagaaagttacgaccttaattccaagcacatagcattgaggccttaacaaactaccctttgaggcaagttttagcaaaaccagaggcctcaggcaaattattgaaatggacagtggagttaagccagttcgacattaggtataaacccaagtttgtaatcaaaggacaagcccttgcagatttcatactcgaatttccaagcgacgaagtggccattatcgcaaaagagggaattgatcctaacgtaccaaataatgaagggtggactttgtatgttgacgggcatcgaacagtgaaggatcagggggtggtataatcctcataagtccaagtaaattcaaggtacatgctgccctcaaatttgaatatcccgcatctaacaatgaagccgaatatgaggctctaatcgtaggattaagactcgctcttgagatgaaaatcgagtatttacaagctttcagcgattcccaaatc

SEQ ID NO: 220891 - DNA, 2307 bp, Cannabis indica
caaaatcagattattttgactaaaaaaaaaaaaatcagattatattggttgtactcttcttccaacagcacagagtattaatttaagtggaacaacaggaagagtttttagtaactggctggccatgcataggcaacacaacagcaggtttgtcagaagtttccggtttacggaccatcctaagcaaggggaaaaaaatgttattgatttaccaatcaaatgaaaattttaaagaaatcttcttcagttagtatttaggataaaaacatggtatgaacgatcaagagattagactcacccattcgttatctctgcaaccatattcaggaaactctgttcaacattagtggcatctttagcacttgtttccaagaatggtatcccgacctcatcggcaaatgcctttggaaaaaagaaagatcataattttctgataaatatatattagaagatcaacatcacaagaaaagttagcaactaaaataccttggctgtatcataagaaaccactttcttgtcagttaagtcacacttgtttccaactatgagcttcttcacgtttccattggtatatttatcaatttcttgcagccagcttttgacatgtttgaaactttcttcatcagttacatcatagacaatctagcagagagaaaagaacccacaacaaaaaatcgtatatgtttctttcagaaataagatccaaaattaagaatggaagaggttaatactaatacatacaatgatgccataagcatcgcggtagtagctgttagtgattgtacggaaacgttcttgaccagcggtatcccactacaaataaaaataagaaaaaaaaagataatgatttaataagggatgtgttagatttgactcatttaacaaatgccacatcaacattttactacttttaaaaagtatagacagtaaaacttaactaattgtcatagtctataaatagacttcaacacactaaacttgagaccaaatctaaactctccttagtataattctgtccgaaaaataagagtgaatgaggattgtaaatagaacacgtgtgtttgattatgtgattctcaaggtgagcttgttgtaattggtgtttatcaccatagccttgaagtgcgtgttgtaatctcgaagtgtaaaagtgatgatcacattcaataaaagctcattcattttgttattgactcaagctaagttctcttcccaattttatatttagttcttgagttattattcatcataacaagttagagtgaagcaatgcaaattgtatcagagaaaagagaaaaggtgaattgagaagaattttcaggattcgcatccaaccaatcaagaaacaactgcatcaattcaagagtcaaattcgaacaatcaagaacaagaataaaatggttacataaagtttgaggtggacaaattcatttgatcaaatgatttcagtctatggagaataaagataaatgcattcccattttaccagctatgagggcttgatgaagaagccatgaaattgatcaaagataagaagaggaaaattgagattgaggccaaaccaaatagtgccattcttctcagttttggtgatgaggtgttaagagaaatctctgatgaaaaaaaggctttaggattttggaacaaactggcctcaatttacatgaagaaatctctagctaataaaatgtatctcaagaagaagttgtatacacttcgaatggatgagtaaaaggaactaagaaagcatcttgatgattacaacaaaattattcttgatttgaattatcttggagtgaatataaattatgaagactaggccgccataatcctgttgagttaccatgacagaggttaaggttgcattgagttcaaaaaatattcataagaaaggagatgagaaaggagaaaatagtggagaaggattactaattgttaaaggaaaatttgcaaagagggaatacaaaggaaatcaaaactctaatggttactagggtaaccatccaagttcaaattcaagaagctccaatggaggatcaagttcaaatggaactacaggaaagaaatgttactattgcaagaagcacaaccactttagaagtgagtctttggccttgaaggctaaactgagagggaaaaatcatcacaagtccaaaaaacatggaattgcagacataacaaatggctatgatgaatttatttcttctgagtagatggccatccgacatagcagatacctatcaacatgagctgggtagctattaattagctagagacagagacatgagacaaagtaagagccctaat

SEQ ID NO: 220892 - DNA, 2387 bp, Cannabis indica
tttattatataatgtgaatatgatgatattttgtaaatatttataaaattgcatagaattgtgtaattatgtttttttacacattttttgtaatataattaatttacttgtatataattgaaaattgcccttatttatttgacatactttttataaaaagatatagcggcaaaaccatttaaatccccaatccccgaaaatccccaatcctgaagctcgcctccctcgctctccccttctccttttggccccaaccccaaaaacccaaaggtcccaagtcgacgatgagcaattcactattaggggttggtggtgcggtggaaactcgatacctctttttgcagatctattctttttttagggatttgtttcatttttttttatttggagaaattttgttagtggtggttgtaatggtagttgttatatacaaaatttggctacacttcgtaagtgacatgtgtcttgcagtagaatatgaaccacctagtataataattttatatcatttaaatgcaagataagataactcgttaacaaaggtttaatagaagatattcataactcgctgactataatagtcttaagcgaggtaaggataaaagaccattatattgacgagacacacacttgcctcggagtacacagtcaaagaagataattcatttattcaaagtagagtgaatacatacaaagcaacctcgggttacgaatagcgagacagccacctcgcgattctaactaaagagacttgacgaggtgggccatctactaacacttagcattttttctacattaagatagacaatgataataactcgaagttaagcgagatacaattgtccaaatcagcattaaccatcgataatgataagaacaaaaagcagttaagcagttatccagtattatcccacatgcatttaaatgaaacatgagaattgtccacgtttcatgaatggttacattttaaaccgatcccaatagtaaataactgccatcttatattcctataaataggggtagattccacagaaaaagtggacggatatttggagagaaaaatattatcaattgtattttgtatccattattcaaaaaaatatcataataagatagactcgtggagtatgcagatttaactacaaaactacgtaaaattcttggagttatttaatcatttattactatttttgtgatatatttatcacgtaaaggcttattatttttagttaacacaagtctacgttaatagtttggtgtttttattgagagccttagtgataaaatttagaaaaaaatccctccttacaaacagaaatctatccatggctgataacaatcaaaacgatagaaatcatcctgaggaaactacacatcgccttgggaaagagccaatgagttctcaaagaccccatacttccggaacaacacgttcaaggagaaattatggtggtgataatcaacacccagaagggatgaacgaaaaaaccaataattttgtaggatatgtacctagaagtgaggatgcgtatgatctaactaggtatgtaccattagtggaattgaaaaatagacaactccggcaacgcttagccaaatctaaccgacaaaatgcttagttggaaagataggctccagcagctagggcaattcaaggaattaatactcaaattcaacctgatcctggggtaaggagaccacgaggcagacctcgaggttcaagaaccaggagacaggaagcaaatcaaggaaattcccaaaacacccaagaagaacaacctgggggtactagggatgttctagtggatgaacaacaaaataatcaagagcgacgtcgagacgtgccttaaagatcccaaggaaccaagggaatgaacataatgatgtactataggcttctcgcaggaatgaggacacgagacagccctgacctagggaacaagaaatccctcgtgataacgagagaaatcatgggactcaacctaggataggtgggctgccaccgagacaccctcaacatccttctcgatcagagagggaaggtttatacacgtacataaatagaggacgcgtatctaacctctttctaaggagaaggcatgtacaagacggagcaaattctagctcatgacactcaaggtctcgagggcacagttgatcaggaaggcaaacgcgagaaggaagcagacctcgacgttatgctgatcaagaaacatgagcaatacggaaagctatcaatcttagagttactcaaagatcatatctgtgagcaattatgagcgaagacaacatgatcttcgtgaacatttgaatcgaagacaacccgatctttgcaagtgactaaatcagaatgcacttgagttacgccatcaacttaatgctaacca

SEQ ID NO: 220893 - DNA, 2727 bp, Cannabis indica
gatgttcattcatttcaaatgatcataatcaccatcttacataacattaatggtttgattagagctatgaaactccatgagtagccttcaaaagttaagacattagatacattactcttcaaaaggaactagtaaaaaaatctattttaaaatatacaaactacaaatatgaatttttgacaattttgatggatgaaactataaccaaaactccatagattggacttacaagatagaaagaactactttcccttcataacttattctagcttttgttcaatcctaatattcatcttccagaaaaggaccaagttttactcaattacaaaaacttaatacccgaatttccaacctaaaatccgcaggaatgaacaaaacaaaacccacaactttaatcattcacggttcacaaattcaacgaataacaagaaaattcgattgtgggtgagcattattttcaaatagctacaatacccagatggaaaaaattattctttttgagaaatctatgcagaagagagagagaaagatagataaatacctgaattaagttgagaggtgggaattttggaaggggaagaagaagaagagaggaagccgtgaagcaagaagagggctaagaccacattgataaagcacaaagaaacggtggcgattctgaaggacaaccttggtttccatggttgccgaccctccatttctctttctttcttctccttttctcactacaccaagtcaccaaccccatagtcatcttcactttattgcagaaactagaaactagaaagaaacttgactagacttcccaaattcctattatgcccctacactatagaaaggttaggattgtaaaaacaatttaattaaattccggattttttttttatttttttaacataataactaattttattacagagagtcaaacaatacattttttttttttaaaggagagtcaaacaatatattggttatcataataagaagagtttcttccaatcaagaaatcttatttttcatttgtagtgcatatcttgctaacccatgtactgcagtattatctttatgcatcatatgttgaagacatacacctggaaagacaaatatcaagtacctaataaatataagagaaatgctaaagggcaccagtggtgcctaacacccttctatgtgttaatatcactattggtccaactaagtatcgggtctcgtatagtttaatataataacttttagtgagtatcactagtcaatcgccagcgacatgtctagagggtgttaggcaccactgggtgcccaaatgcaacgctctttttctaagggataaaaaatcagtcaaggatttaacaaaatatctcaacgaaaagccatcagaatcacaaaccaaagccccaaaaccaatagtaccgttttcacaacaaataacagcatctacatttaactttaacaatccagcaagaggtgctaatcaatgaataactcgtggggagatagaaatcttagctgtttgcttatgtgatatttgtccctaaagcgaactatcataatattaaaatgtctaacttaaaatcgttgaagcatttctattggggtaccatatttttttttgttacgttcagtctaaatgcaccaaaccagaataatgaaaacacaaaactgatgtagtgaagacactaacaagagataattaagattgtcgatgatcttccaagagataattctaaaaaatttatttacaccctcaaaatttataaaaacaccatatttaatcatttttattttatgtaaaaaaaatatatttatttatctatggcattaagattcaaggtaaaatttagaatccacatttttaaaaatatttaaaattaatcccataaaatattactattcctatataatattacctcataccaaacacaccctaagagtatgtactcatgtgttttatttaaatatatgatactttatattttttaaaaatgctaatttggtattatgtatggaagaataagttaaagctaaatacgaagccattttaaaaatatgtgaacaaacttggggaatttcatttgaaaaacaagtttaccaaactattagtcctagtcaataaaatttggtacctcacctaaactaaaagcctcaacaaggaagttgtgttcttctcctttcccctcataacatgaaaaaaattatgaaagattgataatgtattaataatttgtgggatttatgttatgaaggaaagtgctagatagatgggaatatgagttttaccttatgtttagtataatttttaggtggaatatagtgggtctcaccgagttttaatgggtaatatgaactcttttgtacactaaagttttacgttattcttcatcttaactccactcacaaattcttagaaaattcaatatcaaaacaaacactcccttatggtatttattatggggataagtgtttgtgatgtgagatccttccaagtaaatctttttactctaaaaaaacttgatttgttgaattttttttaggtgagaatgtagtgagtcctacaaacatttagtgggtaaagttaataactttatacattcttaagtttaatttttatcaaaatatgacttaaaaataacatgacttggaggtgtttatgacaactaattatatttttttgtatctattcgtgtctaaaaattaaatttttaaagtatagtttatgttttaaaaaaaaac

SEQ ID NO: 220894 - DNA, 1571 bp, Cannabis indica
gtagatatttctgttcctaattctagatgtttcaattaaaactcttccagtgaatgattggggtgaaaaaataaattcttttaaagaaaaataaggatgggttgtagcttattacagtaggaatagatttctgtagttaataacattatgaatttttgaggactttatttttgacaataggagtttcttgtggttgcaatgtgtattcttaattaaaatgaagtagttatggccaattacaatatttagagcttaaatttgaattgttatttggtttactgatgacttgacttttcttgtgatctatgcatattaaattcgatttcctttgggttaatgatgtatattgtataagaaatacactgtttggaaattgtggattttgattttgttgtggattgttattcttgataaatgtaatctttctatgtggaactcccaatgtttctttattctttagcaagaagaacaagtgtgatccaaagtgtatgaaaagatctactaagaagtgtattttaagctaatcttggtttacttatcaaaaaaagctaatcttggtttctcttcatgtgatctttgtggcctaaaagtgttaaatttcatgaagagtattgctaatgctaatgctgctctattcatacattgtaactttgaaaggaaatccaatgtctttcggttgttttcatataaaatgtcatcttaaagagtttgaggatgatttttcaactgttgaatcaaaacccagtaatatttatttcttgacttctgtttttaagctggtaggacttaggagaggggaacctttgcatcctaaataagaaaacttttaaagatttttataaaattagaatgggaatgaagaaaaatattagagaaaatgaaacttggagattttgatatttcttgttgtgaccccaacttttgatggtaaagacaaaaatgtcaccatgacattggcaaaggcgtggaggatggtgaatgagattttttttttttttcttgagtggaggaacaaagcaaagaagtcatgactgttctgttctgctgtgcttttggtggtaccattgttaggagagtgagaataaacttaaggaaggaagttgtatggaagatacgtcgatgtcagcgaaaagataatcttgtatttatgcacttgggcatatcagctgcttcaaaagctgttgtcatgatctaatcgataagtgtggtcactactcagtctgccactgccaatggtgcacatcaactatacagagtataaacaaaagtagtgatttttttaagtttttctttctttttgaaattatatatattaaaaaaaaaagacttagaaaagagtaatggttatttatttaggaaaatctatgataccacgtatatatcactctcccaaaaacataatcataatttttttttctgattttttatacctcgacaattcatattcgtgttgtgtgaaatgccaaactcaaattgggttgaaaatcatctattctatataaagtgtgtctatataactgtatttttggtttatgagaaattcatggttgattttttatttatatataata

SEQ ID NO: 220895 - DNA, 3037 bp, Cannabis indica
aattacaatctatcaaattgtttattacacttttttttaaatatataatattttaaaagagatttcataaaagagattgtatagatatgctttacccttccaaaacacatcaattcatagtggaatctttgtgtttaaaaacttcagtataacaacttagaattggaatggaatgtattcaccatagtatataagtttacaattatttgagtttggtttatcttcacctttatagaaaaaaaaaattctataacatattattatacttatgagaattgaatatagaatttgagcagacatattattattagaatttaatatgatatatggtatatgataaataaatttattttataacatattatttattattttattattattagaattgattattgaattttaatagacacattaatattacaatttaatataaactaaatattttatattaaagaatattttatattaaatattttatataattattatgtaatcttaagtcactctattaatagtaaattaatatatatgtaagttactctattaataatatcatataataaaattttaactgaaaaataattaaaaaaaattaaataattgacaaaaattaagaaaacaaagaatagggaagaaacttcaaatagattgccacataaactctttaatagttcctttatatatattgattgattattaataataaaattgaagtaagtaaatagttaataaaaataaaataaactggaaaaataaatgaatatttatggaatgggtggttcgtaagtaatttgatgaaatgggcatagaagtagggtcttagttttcttgaagcaatcaggaaacagaaagctaatttttcgatcaaggtataccgatttttggtccctatcatgtgtttgctaacatagtatactggatgttgaactttttcttcctcccagaccagggtcgcactaacggcgttctcggagacagctaaatataagaacaagtcttctccgtgaaccggcttagacagtattggtggtttggccatgtgttctttcaatttcctaaatgcctcctcgcattcttcagtccattcaaatttttgacacttcttcaaaatattgaagaaagggatgcatttgtcggtcgagcgggagatgaatcgacttagggcagcaaccttcccagtcaagctttgtacatccttgtgttttttcgggaaaggcatgttcaacaaggcctgtatctttttagggtttgcctctatcccacattggcttatgatgaactctagaaattttcttgattcgacgctaaatgtgcattttttgggatttagtttcatatcgtatatccggactacctcaaaacactccgtgatgtcatctgcatggcccatgcacgttctggatttaaccagcatgtcgtctacgtatacctccatgttccttcccatgaggcttttaaacatctggttaaccatgtgttgctaggttgctccggcgttctttaacccaaagggcatgactaggtagcagtatacccccttgtcagtcctcaagctagtacattcttgatctgtgacatgcattttaatttgattatacttggagtaggcgtccataaaggatagcaacttgaaacccgaggtggcatctaccatctaatcaatctgaggtaacagtccttcgggcaagccttgttaagatcggtgaagtctatgcaaacttgccatgtcccatttcattttttttaccaataccgggttagccagccactctgggtaatacacgtcccggataaggccattgaacagtaacttatccacctctttctctaaggcatcggcctttacggggtcaagtggacatctttttgttgtaccgaaggcacatctaggttgacattcaagacatgggtgattacatgaggacttattccagtcatgtccccttgtcaccacgcaaagacatccgtagctacctttaacgtgtctatgatcttactacgctcctcatgttctgggtttcttcctaggaagataattttagtggagttgaggtcgcacaccctcacttcctcgacgtcctccataagttctaaagttatctcggataccacacgaggatccaactcgtcttgctctgcttccatgggctcttcgtcccttcgtaccatcagaactgacagatgtactacaacattataacattgtctcgcttccccttggttccccctcactgttcctactccggcctcccgagtagggaacttaaggcataagtgtcgaatggaggtaatcgctccaaaatcgactagggccggtcggctaaggatggcattataggcggtggggcagtccaccacgataaaggtgcagtatttgaaggtgctttgcggggtgtcaagacatagggtgacgggaagccttacttttcccttcgggatgagagttgtcccgttgaactccgtgagttgtgaactgctgggcaaaaggtccctgttcgtgagcccgatggccatgaaagcttctttaaataacagattcacgaagcttccgttatccaccaatatcctagccacaaccttattggggataggagtttctaagactaagggatcatggtgggggaaacgcattgacttcgcgccttcttccgtaaaagtaatgagttgatccatgagcctgggcctttgtgctgggatttgagtgacctcccatacttcatcatgcttaaggctctagcatagcactttaactcgtttttggtggttcctccgatatgaggcccgctagagatcatggtaactctcccatttggttagggtggtaatccgggcatctactgaggaggtacccctctgggaggtacttgtccctcgagcgtacccccaaccctccctgaggtacgggggctccctgttgggctgggtttaagtgtggtaacctgtttttgatccactcatacaaatgacccaaccgaattaggttctcaatttcatccttcaagtttttgcactcgtttgtggtgtggccaatgtc

SEQ ID NO: 220896 - DNA, 3847 bp, Cannabis indica
aaaaaaaaaaaaaacaataagatctttgttgttgttaggagagttgaatctccttgacattattgttcgaggaatgaagaacaaagaacagggaaaagtaagagaaaacagaaagaaaagaacgagaagaagaggaaagatttcatgaaagagagatgaagcgttatttaattatgaactcagactgtacattatatgtacatgaataataaaaactaatcaagattagttgcaactgaaaagccaactaactaactgtttaaaatagacaattagaaaactaacttaatagaaaagtagtacaactaaattcccttaacactcccctgcaaactcagcatattggaggtatcaacaattgtgagtttggtttgaaaatgacagaagctttgacttgagattggcttggtgaggctattcgttagttgatcagttgctggaatatgtttgacaacaatttggtgattttgagccacattagcttcaagattcagatcttgataaaaaaaaacataatcagtgtctgtttttgcaagatttgcattgatctcatgtttttgatcagttttctcgattcttgattcagatgcaagcaataggtcttcaatttcaacaactgtgtagccttctatccttgtgttcgaggagattatgaacgtgtcatactcgctggaaagacctttgaagatagctgagatatgatcacgatcatctagagtttttccagcacttgctagaaggtcaacagtttgtttcactttcagtcgatactcattcaaggacatggaacctttttgaagattttagagtttagtgcaaaactctagaatcttgatgacattgtagagtgaaatacttttccaaaggaattctagatgtgcctggctgtgttgcatcccaccattcttgttaacagactctctgtcatagatgagagaagccatgaaacaagaagctggtcttgaacatcccattcaacaaaggttggattgaagacaccattagtttgatctggatcattaaggaattatggacggggagctacattttggatgaattttagccagtcgatttcctcgaatagcaaccagaacctattgtttctaaagaagaaaattgtgatttttaagcttgatttaaatcgagtgattaaagtacacaagtaaattctcatcttgatctctatttcgattttgattttgagtgttgagctggttgccaacagtgacagtgtcggctgctgttccaccatttgcagttgttccacgactggagatcgccatgtttgccactaatggaggccattgctctggtaccatgttaggagagttaaatgtccttgaaattactgtttgaggatgaatgaagaacaaagaacaagaaaaagtaacagaaaacagaggaaggaaagaaagagatgaagaggaaagatttcatgaaagagatgaagtgttatttcattatgaactcagtttgaacattttatacatgaacaataacaactaatcaagattagttacaactaaaaagccaactatacactactacaacacaagcccttagaggtagtttttttcttcagcaaattaataaaattttaataaaaatacttagagagtagtcggttattttgtatccgtaggtggtaatttttttaattttaataaaaaaaaccctacggagtcagttattttgtaataaccgactctgtagatattttttttgaatttgaatgaaaaatacatatggcgtcggttatttcgtaataactgatgccatatgtctttatataaccctctccagctattgtcttcctcgtaccctaaaataaccagcagcccttcttcctctcaaacccaggaaaccctcgcacaaccacccctcttcccttcatttcttcattttcattcgcttttgcctattttttttaatcttgtatttttcataccaaaaaatatatccccaaaatttgatcgtcttttatttggttttttagggtaaaccgagcttagaggtgggggttgtagcccccggccaccacttttggtggagaaatcgttgaatctcaacgtccattaaagtataaatctactctataataattttcttaatgtatattgctttattttttattttgtaaattttttagggtgtttctatactgttaagattgtgttcttatggttgtgcatggtggctgaatttcggtcggtattagtggtcaaatttcagtaataaggtaaaaatctaactttaatagtatagaaaagtgaaggttgtggctgaatttttctagtagtgagtggttttattctttgtgaattgtatagaaaaatgaaggctgtggcttgtttgtcatggtgcttttaggttgtataaaatagtaaatttgcaataacattcactgattcataaaaaaaataaaataaaataaatggtagacatttatgggtcaaattaaaaaactaagtatttgagttcaaacctatggataatcttaagtattaatatcggtaattaattattaaatcaaatgttattaggtgtcccaaacaatgataattatttaacataagttagaaaaactacatattataatataagcatccattaattatatatatgcacaaaagaaataaaaagacttctctgcacatatccatttttttttattgaaaggttagtgtcgacaatggtgtttgtttaactaactcatttgaatatataatactatcttctgtattattattcaattattgattttttaaattgcaatattttgtgtataaatagggtaacaaatcatgaagaatgcattgaagtgaagtaagcaaagaagaaaaacacaatcaaaatggctacaagacgtgtgaacttccttcgaagctcggataattatgttctggcagcagtggaaactaatggacacacgtatctgaagtttttgccgagtgcaaatgggcaaaacacgcaatttgatatcatcgacgctgggcagaatcgtgtgcgcatacaatgcgttgggacagataagttctggaagcttgaccgcacagacaactggattcaggccgaagctgtgggaattcccacaaccgactcgctcttcgtttcagctgttgatggactgagctacactgcgtaccaaaatgtggcaaacggcatgtactgtaagacttttacccaacgccctgtccaggactgtatcaatgcatcagcccccgccttgaccgaggctgtcaagctcattcttgtcgacgtttgatgtaaatgttgtgtcctctagtgtgtcctgttttgcataataatgaatctgtttgattccatgtacacctataatatttatatgtataattaagctcatgatgatataattagggcttaattattattatgagttgttcctccatgttgtaatccttgtgtccatcgtgtgatattatataacataattaagttttattttgctttattaatttttagttttatgcacgtgtcgtgttgcatatggctcgagtagcgcctagggcacaccaagcccaaagaccctaaatatgaattttctttacaatctcatagagttccatatttctattaaacaacacccaaaaatttggagttttttcaattatatacataaaatcaattttattttctaaaatacgggtgttgtgttgccaaaccaaatttgaaataattcctaccaaaaataggaaagttttgtgcatgtttggcatcataattaaaaaactgttttttatttttaaaaacagaaaattattttttgaaaacaatttggcttgtttggccttgttttttgaaaacagttttcagaaaacaaagttac

SEQ ID NO: 220897 - DNA, 1935 bp, Cannabis indica
gtattacattatggaggctgattggatggcttttgttatccccaccaatatttttttttgagtggaaggtgactcggaagctaaaaatcataagtccaagtgttatctaaccctaaagaagcttgggcaaggttatgtgcagctgcattctcagtcttttggtgtgagttagggatgcagttgggaagaaagataacacttctctaatagcatccacttgagctccataacttttgagcatgacgtatcctgccttgatatctttgatgagattgaggcagtctaattcgacttgatgtatgggaattctctgatctttacgctagtggagggcctgtagcaatgcccaagcttctactgactgaggtggcatctgtcctgcaatgctttgtgctctagctgctattatttgacccgatgagttgcgaaccagtgctccagcacgtgagcgtgcacttttagtttacattgtgccattgacattgagtttgttatgatcatcatcgggcggctgctaagtattctgactgggtaggtcttggtgaagaatgttgtgattgctaactattaggttttgtttgtagaaccgaagaaagtcctctacttcctataaaatcctaagaggttgttcttgtatgttcgtgaaaataaagatgtttttactattccaaattttccacaaaacacaaaggattagttcaatctcattttcttgcaaatggtttttgagaaaaagaagtgtatcaaaagtactttttccttgcatggcattaataagaggctttaatgatgtacttgaccagatcttcttaacatctttgcatttaaagagagcatgcctagtattctcaggacatatatggcatttggggcagagaagggaggtcctacttttcctataaaaaggttattggtagttagaagagaattgtggcagagcctatgtgtgaaatgtttaattttaggagggagattgaaattccataaggatttccaccagctagtgataatgttggtattagaagttgttggtttagctgagttcctaatgttttgggcaagatggtaaccagttttaacagtgtagtttctcgtagtggtatgttgccaaaagagggtgtcaggttggtgggtttgtggtggtgggagagacaggatgttatctaacacatccttggtgaactcactttcaggcttcaatatgttcaagttccgagaagggaggagtaggtttgaaacttgtttttagttagatggcagggatgtgggaaggaagggacagttaggtatccgattgtcatgatatattcgaacaatgtcaccgttacctattctcatttgaggcattgtttaaaaaggtctttgccccaatgcaagctttgccaaacaaaagaggggatatgacatttgccatcttctaagaaggtggttcacagataatacttggctttaaaaagctttgctaaaagcaacgaaggattggagtgaatacgccatgcctacttagcaagcatcgcttgattgaaggagtctattattcaaaaccccaacccacatgtgatctttgacttgtagaggaaataccatttcttctagtgtattttgctttccccatcatttgagccccaccaaaacttagccatttctttctccacgaatttgaaaaaactcgtaaggagattgaaaatcgacatagcatacaagggaatgggttggatgaaaactttgaggaggatctctttacctcctttggaaaagatctttcctttccattttgtaaggtaagcccgaatcatgtccttaagggggttgaaagagtgcttctttgatctcccaaaacattggggcaagccgagatatttatgaaggctgttgaaaagggggatgcctaagtagtcctatacaagggttgggtaagtaagacttgtgttgggt

SEQ ID NO: 220898 - DNA, 1534 bp, Cannabis indica
taaaaactaagacaaagaaaaaatgacaggacagataactgagcctccaaataattaaactaccgctgccacctgtgcaacttcaatcatggttaaaccaaattttcattccaacaactctaaacattaactcggatgcacaagctagaaaaaaaaccatgtatagatgcaaaatacatcaatttgaaacatatcacaatcattctactcttaccaacgttccaccaaccaatgttcaatatgcttgcatgacctacctctctctactaatgtcagcaacccctgctctgaatcaaaaggtctttctcggttgaaatgtcatggcttaggtgaaaggtagatgaaacgtcatttcggctacattataccataagcacactttaacccaaacaagcacccatataaatccacatttttcaatatttaccaaaagaaacttgtaaaagattgagaatttccactttatgtttccaacatcactttttctaagacttgttactcttttttctttttttctattttgttttgttcttccttttcctttttggatacattccttttgttttttttcttaaggaattagcacaattttttctttctagtgatgatgaaaatattttttctctacacaactttcctcaatctcccacttctgaaataatacccactcataacacttcatccccccaaacttatttaaaagcttatggcacaataaggtacattgggaattaaagtaaataatggaaacacattagggtcaattaagttgttaaaatttttgaaacatgctaacgctcaactttgggtatactaaggacgaaattttactggtaagcttgaaaggccaatcggtccaaagaaaaatgcctaaatcattttccaattaacagtcatcaaggattttagcttcaaggaggtaagtcaagcaagttctattcgatgtcaagcaaacattccacaaacccaagtagaacaaaagtgatactatccaaaaatcaataattcacatctatatagcaaaaaaatttcacaaggcatccaattcaatccaaagagttattgaattaagcagacgatttaaatttcaatccatcatacaaataaacaacatcagttcaatcaatatattatcattggctcaactatcaacacatggaaacttaaaactaaaaactaaacaatctaacctactaaaaacaaagacattgaaaacgtaaaaattttaaatccctcccccaaactaaagactcacattgtcctcaatgtgacataatattcaaggtgagaaggacttacctaggacccccatcagaaggggttggatctcaatactgcttcaaattggatcaagcccacctcttgcatccaaaagggtccttgtacaaaatgaaaaaattttacgggtccttgcatccaatggttatttacattaatgttcgttgtagtatagttgtaagtattcccgcctgtcacgcgggtgacccgagtttaatcaccggcaacgacgccaaaaacttgttacgaaaaatat

SEQ ID NO: 220899 - DNA, 1512 bp, Cannabis indica
ataatacatttaaactttattttgtgcattaattgatcatgtcatataggctcaagtaagacattcaattgtgtcgatttaaattatgtcaaaaaaatggcaattaaatcactgtaaactatttgaaattttttaaaaaaattataaatgaccttaaataattacaatgtatacgatcataaaaaaattagactaaaattttttcacgttcatgaactacatacacagaccatacatgtactctcatccaatatcgaaattttatctgaacaattatagcatatttaattacacttttcaaatttttaaattaaacaactgaaatcatataaatggtgatcaagcattcacaaggattaaacataaatgacataaatgataataatgaagaagaaaatcaagaagacgcattaatctataatcaagagactccattaaaatcctagaaaaagtatttagttctaataagcataattatatccatcaaattaaaattaaaaaaatattaatggaataaattaaagaagaaaataagaaacactcttgaagaagcttctaatcttgattatccctagcctccaaatatttttcctgagtttttcagaggtaaaaattgatgaaaatcacacttaaatgtatttatgtagtagccctagcaattctaggtgaaaaatatacatttgccccccttaaattgagtttttagtgacatgtacggacgatagtgttgcggcccgttacttgggcactgcaactctaaatttgattttcaaactctggcatcctgtagcgacaaccaatatatttttgttgtaattctctcgatataacatataatttgatgattaaaaatattttagaaagatagaaaaatctctacacattttattcaaaaaagtttcttagaaaatgaacggagaatagtcaaaaattggcttgaaacttcaaactagatttttttatcacaaatagagcgcgttaaacatcccaaagttagaatttctactcattatatcgtacaactccaaactccatgataaatctaccatattaatttttaacatgttcttctcatttcaacctatatgatgtatttattgaaacttatattactaggatcttatttactatcatgtatgttgattaacaacctaaaatatgtttctaaaatgatcaaattcaacacactaagtttaagattttcttacattgagaacacagcgaaataaatggctcctcccattcagtactctaactctcaaatccttttagtagcagagtatccccaaatactgaatctgaatcttttcttctctaaatatatatgtgagtaaagttcatcatagtcttcctcaatgatatgagtaccactcatcattagtgtgagaaatttttcaactcactaggatataatggtggctgaaatctctgagaaagagataaaggaatttcgaaaccaatggtaatagccacattcgaaatttacaatagagaaagagaaaaaaaaaaaaa

SEQ ID NO: 220900 - DNA, 2703 bp, Cannabis indica
aatttgtgtaatcttggattttcttttttatattttttatagtttaccacattatatatttatatggtattttacattttctctttctgattggaattttactcaacacatactttgtttgactctttttaaatatattatttttatctgccaaaggattaaggactttgagtatgaataaatgaacaaatagataatagagttatttttctattatttgcggaaaaatccttttatattttgattttttacacttaactctttttttcttttttttttttaacaaaactccccgtctacttttatttgtatatttgaattgtcaatcaaatttctgagggttttgaccaaaaaaaaaaaaagaattatgtgcataaaaactaaaacttggccaccaattactctaaataatatgtattgcacctaagatttgttaaatagaatcgtgaattaggcaaagaaaagagaatcttaagtagtacaatgacacgttagcattttctttctgaaaggtgggaaagctttttcataaattacgcagcaataaattcccaattaaacaaaactattccattacacaatattaatctttaggaaagagcatcctctactactacctttatctcttctattaagctgaaaagtattaaaggccttctttctcgtttaccaaaaggcaaaaggtctctcacactctcatcatgcagattaacaactttgtacaatatttaataataatcaacacattgcaaagcagcaacgtttcatcaacatatacaatattgcccttgattaatttgtcacctgcaatggtatcattttcaaactccctctccattgaagaaaaacacaaggactggagacctgcatcacaatgatatggcccaacatataaatatggaatgatgcactgtttcatgcatttggatgcatgactagcatgttgaatcctcaagccctcatttgagagtaagtatatcataggctcttcattaccattctagtgtttcttcaactttgagagggaacagcatctgtgaagcttggatcgtctctgtacttgtcgtatgctgcttcaaactgcacgcctttgcatcttcacaacagtggaagaaattcaagcaaataagctaataaggttatatcaagtaagtttgcaaaagcttctgcaaacaagtggaaaaagaataatccttactgctgcagcaaagtcagaatctcagaaacgagtcttttaatatcttcatgagactttttcgatgatgctcctttgtacaatgcgcttagttcatctaccagcctaaaaacaaatcatcaataaactatataacatgatagaaagcactccttcctaccaatatatatctagtgttacaaaaaggatggagagatggataaataaagttgatttgtgttcaccaacatacatcattttagagcactctttacttaatacgtaaactcttttcccttatttgaaaattggatactagtttctttgcttacctatcaacatagggtgtgttacggatccatgttagccttataactgtaaaaatctgttttagaacctgtaaaagatttatattatcagaattattaccaaacgggttaaaaaccaagtacagaaatataacaaacacctagagatacatctgtaggttgcaacaacttaggctaaagtatgactcattctctcaacacactaaccaataagaggaagatgactaaggtgttataaacgataacacatactcagtcccatgtgatcgcaattataaacctccatagatttgatttccacagccacttactcaaagttgacgctgtttgacaccctgtaagtgatttcacttaagacgccccttcaatgacagtactccgattcaaatgtctttgctttaatacaattgttacaacttattactatttaggtagagctcaatttcttaaaatacaagcttagagagagagagagagaatatagttttcttggctgaatagagagaggatatattgaggatggtacttaagtcttattgtcactgacatgatctatccgattctatcgggttaagttgattatctattttcaatccaatacacccacatgaaaacacatatcttcatccacagcaagggagcaaaagatatgagatcaaataaacagttctcatttatgaaaatgtccttaccagtataacagtctcatcatcatcagcacccatccactgaaagaatagaggaaaaattcgcctaaaatgggctaataagaaaagaccaatactattgaaaagtggctcaacatgttgaagccacgcaacacgacgatccatgttccttggttggcggtccaaatggctcagcatctcatttagaatcctttcaaacctgtacaagggttaatgtccattgaaaagcaataaatgagataaagtgagcattagttggtaggtacgaaaaagaacaccgaacagaaaacaaagacagcacttaagttagcaataacaatctaaatcaacccagtgaaaactgaaatgaaacaaaaccactttcgcaaagcttgattttagtctcatccataataattgtaaagaaccagcaatgtagaaaaacaccatataaagtaatatataacaaaaatgaagtaacactgcaaaccatacagataaacaagtataccatggactgcgaggattactt

SEQ ID NO: 220901 - DNA, 2486 bp, Cannabis indica
tagcctgatggtgataccatacagtatcgattatatgctaatgccgacactagctaagtgagcaacacttaattatgtaatggaatactttgtaaatttatcaaaccaactgtttgccaccccaatcagggatgttgggatcaatatgcaatgcaagttgttgaaaacatcgcattatagtgttgaagttattcaaatgtgcaactgggtcagttgtatcgtcatattgcacgacatgaggattcttaaatccttgagggaactgggaattgagtatgttggggtgagaaggttctatttcctcatcataatcataccctgacaatttcccatattcttcatctcgatatcatctgaacttatcctcacactaaattacccttaattggatgggatccatgacttgctgctcgtcttgttgttgattagttgtgttctaatttaatcgatctcaacaatcaagaacactgacgttcaaatgcttgcgtaagttaggttgttttcagtttaaatgttcacggtgatcggggttgcatcgccttttatcccttaagtcgtaatattactaactcatcttatcgtagagagacattgagactgataactctacgagttactcatgcttgcttgttcatcgtagtaatggcaatgagtattcccttctctccttgtttgcctttcatgtgcatgtatcctggttgatctactctgaccacacgtccttgacccatttggaccagtgcttggttctgtttcttgagaatcttatcgtgtaggtctttctctttggagtcaatttgatacatgacgtaaagtaggtatgcattttatctctttcatttcggtatggcctctgtgattgtctcgatggacgtcctaacccaggatgtccccttggacccctcgcatcatgctttgtgaacccctgatcaccaggtcatgtttgtctggcttctacattcatacgagatgattccaaattgttaggttgtgcattcccacaattcatgttaccgcatgatgttcctggatcactaggtcgagttttcctattgtcagtgctactcagattttggggacctcctatgtccactgagatatcccttatactccttagttgatcattctggggattcgcgggatttccatggttaccttctcaaggagtttcctcatttcttttggttctcgatcctctaggtcttccttgatgtcgcccagtggatgtgtttggttggttagggagtgcgtcactgtatgttgcccttgcagtcacagcctcgcgctccaacttagcattcctctaatttgattctaccattctatgtcggagttgtctattttctaattccagcaataacacatatcttgtaggatcatacgcagcctgactacgtccttttggggatctcatctctagtttgttcaaaaccccattaatcatttccttttctcgagcacggggtctcagttgcatttgtcctttgaaaattcttgtgttctttcccaggacacttagttttcccttggttgagtgtcatcattttgagggttatcatcaatcgtggttggaaaatttaaatattattgagggaagatatttttttttgaattttttttcacaagactctcaatgaaactaccaactttcagcgccaattttcgttgaccaataaatgagccttaatttagtaaataaactccaaaagaaacgaaaaatctagtctcaatcacacataaacttaatattaatcatctaatcttacttcttctaccaataattttatttttggatttctttttgtttttctcttttctttatgtaaaatcatattgataaaaatgaaaacaaatgagtttaattatactaaccactaaaattaaatgtccaagctctaatactatttgtgaatattattacacatggcgcatataattaataacaattaataaccaatcatattcatattaaccaaaattaaatttttaattttagaccattaacataataataaacataactcaaatcttgaccttgatctccaatgaccatgttgattacacttttttaatatacacatatggagaaaaaagagcttgggtgtgatgaactttactcttccattccctcaacaccatagccatacccattctaccttaatcaccaattaagagcacaattctttttttttaaggaattatgggctaattgggcctacatgtccaacatgagagaattagttgtctgcccaataggctaaccaaagatgttttagagcgtattcatgggctccatacatgttagtacgttatgtccatcctattatggcgcgatggggatataatgcattatcaattatatagttattattatatgctaatgtgagtgagcaacacttaacgatgttggtccacataaaatattctaatatctttaactatctatgctatcaaaaaactgcacatcatcacattagtaactctct

SEQ ID NO: 220902 - DNA, 2485 bp, Cannabis indica
ctcgaggagaccaaccagccctaatttatgcttcttaattaatttcttcacttcctgttgcttttgaggactgttgattccccggacgttccagatgagtaatctatccatgtgtaagaggaggatctccccctcctcttgtgtctccaactttaggccattcctctgtattcaattccccatattcctgtatgtatcctgcaatttcttctaacacattaaaagcatttgaggtttgagggtctgctactatatgctgagttttttgtttccatccttttgtaacgggtctgaaaccttcttcatctactgctttccccttagtttctgctggtttctcattccttttctccttcacaacccattttttcttcttacctactttcttcctacattcttctgtgttatgccccataccattgcaatgcttgcaaatgattggcttccactcataattcaccccaaccgaaacatcactgccatgtttattctatcaaaatagatcatatcagggaagtcctggttcatggaaacttcaatcagtaccctgggttatgtaagtttgtccctggacttggtaacatcatccatcataataggcttcccaatctgccctatgatcttaaagagagatttcttgccccaatatttaagttctaaatcctcaagctgaacccaaattggcatagttataaagtcctccttcttgagattaaaattcagatcccaaactttcattataactggcctcttactaaagaaaatgtatcccccctgataatacttcatcccttatttcatagcttttaaatttgataatgaagatgtcgtaggaaatcatacctattttatccaccttgtctttccaaatccttcgagcaaagccatccaggaccgagagagggggattcgcaccaagtacgtagcagacaaaagatgaattccagtaagcgatctcctcttctatatcctcttctgtaattcgcactttcttctctgtcttctgggtagaaaatgagccttccagacttctaataacgttgcctgatctgagtattggaggaatagtcttcttcccaatcgagatagaatcttgacactccttatttgcagtaagaaagtgtccaaaatcaacagctatctcttcatgctgtagaatcgatttcaaggaggacttaggtgttaacggaggctggaaaagatcacgcaacagatcctgatttccttcctcttcatcttcgtttgtgagttccatgggctcaactctaagaatctcctccatgaattttgttttcttagcatccgcagtcgacaattgtcccttcttttttattttcttagttgaaattttcgatttccccacattcctgccctcgtttatgccatggcacccactcaaaggtgagttgcaaagcgcgcagaaagagagaaaatccgcactattgaacgaattatttgttgctaataaaaatgttctcattattattagtgtattttgaaatatcaagatttactcattttaatttaatttagtaagtattataggattggtaattactattcataagataccatttcatattgttttagacgtacaatgcctcaaagttcagataaaaattacaatatagcatcatttttgtcccccaaaaaattatgtatagaagcaatttaattgatttctcgaaaattgctgataagcgcatctctgtgtctgcttttgcgtgggcatcgatggtatataatctctctattcaaatatttatttattctttttatcacttctttttttttattttttttcaaaaaattgcatttaaatttttatatatataggtgtgtgtgtttgtgtgaacatatgatgtaacatgtacctagcaactagtgccattgcaataaatatctgcatggcatctctcaactttcagtacactacgaaacaaattgttataactttcgacagttatgttacactgtaaacacatacatctcatcatctctccattatgataacttcaaagaaccaataaaataaattatattatttaaacataaaagaaaagcattaattaaatcaaaaagaaattatatgtgctttttacataagcattgttattgggtatataatagtgccaattagttatattttttaaaaattattaaattgatttatatgagaatttatatttaattgtaccaatgataggcatttgacactagtacattttatcattaatcctttctaaagctacttgtaaagtattttggcattttaatggattattatatatcatcaagttctttcaagaaatacgaagtcaaagtctttatgtatatatagttagacctacaattactagctagctatatgtctagataaacatagttggactaataataatggcagaaaagaacttcacttctgataggttaaaagtacaatacatgatttatcgtctaagcatttgtagtgaacaatattatt

SEQ ID NO: 220903 - DNA, 3648 bp, Cannabis indica
acaaagcattggtaaataacaagctcaaaaaaacataagagtttgcatgtgtaattactaaaacaagggaaaatattcatttaaaagaaaagatgataaagcacagtataaacccaggatcaaaggtgctcggttagctagttgtcttaaaataaaatgaagtattaccaagtttaaagatcgcttcgttggccatattatatttaaaaaaggcccatgggccgaacaaaaaagaagaagaaaggttcacacagcaggagtaccaggttccttgtacggattagtttggtcattagaggctggagtctcagtgttttgatcggtcagagctgtggagttagctacctcacagttttccttatctttttggcccgcacagtaactaagatatgcctctttggtatcactgaggtaatcaaagtttccttctaggttggccttccaaaatttgtagaaaacttccagggtggtagactccaaactctcgacctccttcaaaagctcttcctcccttgtctgcctggatttgacatcctcttccaatttcctcttatctgtagttaaagtggcaagaagagtccagagattttccctctcgtccttcaaactattgacctcgttggatagaacctcgacatccgcctcaagctgggcggtagatggcatctctagcatctccttcttcatctcctcaactcgattattggtggccagaagttgtttgttcacctcgcccaactcttcccttacgacctcgacctccttcttggccacatccacctctttctatagattggtagtggtggtgatagttttcacggcagtagacttggctcgggagtaagtgacgaccatcttcaaattgagccgcataggaaaaggttaaaacctacacggataaagggataagataaaaaccaaaggaaaaaatacttactcaggttgactccttcaggagcccgcccatcagaagctccacgaacatctcgtcctcttcgaatagttggtcgtttacctcaggaagtagccgatccttgtagtgctctccttgcccttcttggtctcagggtttagcatgataggagtgtttcagggcttgggcagaccagacccatctgtgctacctcccttggcacccttggacttgaaggccttcttagttggtggctccacctcagacaccacctcctcagagacatcgataggagactcgaccaagcctttctccttaggcagtatttcatcaccctttattcgtttgggcagaggggtctggccggagctgtcacctgacctcttctttagagcctagaacacattttgagacatggcttcacatggacataataagaaggttaaaaaaaagtatgatataagccaaaacagataaaaattaaatatgagttaaaataccctacacgtaggcaggactgttctcccgaacaagtaaagatggaggctgatcatctgaagagtcttcttgttcctgctctatcagaacaaatttttcctttccctccattggggcagattgccgatcaggtcttccaagctcttccctgatcctgatagaccgctcaacaagtgtttggctacttggagaatccttctgtttcctcttcttgcttggagtttcttgtctgggcacagcctcctttgctgtctcacagccttggtacaaaatcagcctagaaaagtttatacttgacaaaattggccttggaagtcaagagggagacgttccgtgtgacaggaggcagttgaagaatcttttgtgccttcttcctaagctccagtgtgaacagagggtagcaataggacggcacctgctggaagctgctgtgaacggtgcccattcctttgacgaagtagtattcgtccacaaagccccttatcttggtcacctcgttggtcgtggtgcccgtcaaccatttctttttaatctgggaaacatagaagaatcccgacatgttatgcttgggacttgacttcagatcaaagagccaattggtatcatgcagggacggctcaccccatccttgtatggcgtaaaggatgaacagggcagacaaatacttgaggccctttggggtgaattgggtcagacttatatggtaatagtcggcaatcctctttaagtatgggagcatgggcaacatcgcaccctacttggtatggactcccgactaggcatagtaaccttcccctgggctagtcgccagttggtaaggggagggaaggaatcattcgacactccctaggtaaccatggttgagaaaattcttcatcttttccatggtcaccacggatggagtagagacccatcgatctcctagtgcaccttgcctcctcagggggatggcctcgatgtactcttcaataacaaagccttcactgacctccaaaacctccctagcctcagacacgggtttcccttcttcgttgaagccatcgaatggcagcacctgagctactccctcttcttcatctccttttgcctcaggaggagtagcaggatggacctcgccttggtcctccatctcttggacttcaacgtccccaattgtgtcctcctcttcagtagtaggccgacccgttttttgccttaggaaaggtggcgagacgggcgatgtgtgggtcagacaatgaagatttctgtacattttgcttggtttgcgccatcattctacacctggacagaattttgtttgtgtgcctagcgatagtttcagcaaaagtggcaacaggtttacctccaacgacagggtttggacggccctcgggcaaagtgtcaacgatgtcgagacggactatgtatgtccagtaggatggaagatagtgtctccacccctttttgagttcccgaatagagcgatcgtatcctggaccttggatctggctgggataaaaatggtgttgcagctcgggttctggggaaggcgtgtgttcactacttacttcccaatcttcaaagatagagttagagaggttatcactggacaaagatgggctggcacagagatgaggatgatcctcgtataatagttgaagcagatcctggtccatatggtgtatggtgtttgcctccccaaaactcaccagggttcatctaaaaaaggtaggagacaagaagatgggaattggttggggcaatgaataaaaaacaggttggatataccgaccaggtctgattgaggagtcaaaaataaaattttcattcagaaatggaactttcagcccaaaagttcaaaactttgaattggagtctgattctcactaaaccccaaatggataagtgaaggtgaatatcatggggttaaaattagatcgaacttagaatcaaatgtcgtggttaagcaaagtcgagatttcaaaatcttaaacctagaatttctatggttatcctagaaaacgttcaagaacaatcaagattcgtagacaaaaaccaagaaaattaagcatgaaaatgtataaaagaaataaataaagaacttactcactaatttgaagcttttgatctactcgaatggtgctggaaagtttcctagaaattcttcgaagaatttgagagaggaaaatttctttgctctggtttttcaagaataaaaatgtctaaaatgattaattagggttttcaatcctattcat

SEQ ID NO: 220904 - DNA, 2067 bp, Cannabis indica
gtacattacaccttctactatgaatatcgtgcaacttttctcatcatctttcgagcatcgaatttgttttttggaagttctccagtgttgagataatttgctatgggtgtcatctagtttggcaccatacctatcattttgatttcttcttcacaggtgatgctgggttcctgcaagaattggattgggactatgttggccttatcagttactgtgttcctcacaagtcgtgccaaggcatcattagttgtgttttcttcccttggaattcgcttgagggtgtaaccctggaattgtgcaagaaattcctgaatcttgctaagataagccatcattttttctccacgtgccatgtattcccttgagacttgatttaccaccaactttgaatcagtacagacttcaatgtatttagcatgtacctctggaggaagctttagtccagttatgagtgcttcgtactctacttcattgtgggacgctttgaacccaaacttgattgctccgtgcagaggttgcccccaggtgtgatgagagcaattcccacaccagaaagttgatcagtggttgatctgtccacatgtaatttccctataggtttgtctctattctcttctggtagggattcctatattggcttggggctatcctttgaaatgtcttcctctttgcatgtacattccagcacaaagtctaccaaagcatgcccttttactactatgtggggttgaaagattatttcatactaacctaattctatagcccacttgagtaattgtctagaagcatcaagtttttttaatacttggcgcaagggttggtcggtataaacccaaacaggatgagcttagaaataggatcttaactttcttgtggttaatatcaaacagtaattaagctattcaattaaaggatactgaccttctgcctgaacaagtcatttactgttatagtagactggatgctggacatggttttcttctcttatcagcacgacgatgacaacatatttggtgactgccaagtatatccttaattcttcgccgtccaagggttttgagagtacaggaggcttagcaagttgtcttttagcccctgggaggcacctttgcattcctctatccattccaactttttgttacctcataagatgttgaagaagggaacacacttgtccgtcgactttgaaatgaactattgagtgcagctatccattcagttaactttgtacttcctttgtttttttggtgacttcatatctaggagggcttgtattatagctgggttggactctaatcccgacggaatagtttgagggatttattttcatgttgtattttctaaggattttaaagcattcatctagatcctctatgtgcccccaaccttcctagatttgatgagcatgtcatccacgtatacttccatattttgtcatatctggtttttgaacattttatttactaacctttgataggtagccccaacattcttcaaactgaatggcatcactttatagcagtatagacctatatttgttcagaagcttttatgttcatagtcaggtggatgcattctgatttggttgtaccgcaaataggcatccataacactttgggtttcatgccaggttgttgcatccacaagttgttcaattctttggagtggaaaatagtccttgggacatgcgttgttgaggacggtgaagtggataaatactcgccatttttcgtttggcttgggtactagtatggggttagccacccaagacgggtagaaagtttcattaatgaacttgtttgggtgtagcctttctacctcttcttttagtgcctgtgcacattctttgtctagcattcctctcttctgcgtgatgggacagaagtctggatacatttttagggcatgagacacaatagtggggtcaataccgaccatatccacgtgtgaccaggcaaaaatgtcaaggtgttctcacataaatttgattaaggctaattttatttcaagcaacaaacctttaatgattttgaccttcctagtcaggatagtgttggaaattatttt

SEQ ID NO: 220905 - DNA, 3432 bp, Cannabis indica
gagatactaatttttgtactaaaccttttttagcccaaacttttaattaaccaatttattgatctcatataaactcaatgacaccctaaatataaagatttttaaaattaatatttagaaagttaatttcacttttgaccctttaactcttactaattattccattatggctcctattacttataataatatattttaccatgtcttaacaagtaatactattgtatcattagggattttagtagcccaattttaatgtgactaaatatgcaaatttaagtagtattattttatcaaaaatcttaaatttagaaaatcaaacatgttaggaaatatatagcattattattattcattagtggtgcccaacaccactcaaaagtagcttttttgtgattgattagcgatatttcataaaaattattatatcaaattatgatatatgatactcaattgcatcaatagcgatataatacttaaaaatgcactaaacaccactaatgttttaatatgagttttgaaaaaggaaaatggtgaggttttttaatatgggtttggtttgttggaccaaaagtattaggtaatgcttaaaatctgtttgaattaatgctttacatattttcattgtttggtttggtcatttcctttgaagaaaagctttattttcaattttcattgccccaataaatataaaagataataaatactcacaagattgctttttttttttttttacaaatagacacactactaggtagtactagtagtatagtagcaaactaccaaatatcactacctaaaaatctaacttattacacccaaaaacattaaatgaaaaccaaagcataacaatactaatccccaaacccaattaactacatacattaaagcctccctcccctctatgaaataaccacactaaaaatttaccaaaccaaactaaaccaaaccaaattaaccaagattcaattcaacccctttctcttccataatctctcctttctttgtggtgggaaaatctaagtcaaaaacatgtgaaaaaacaaaatagaaaccgccacacaatcatctgacacgtgccacaaagttaaccgtccttctaccaactaccaaccccaccttgattttttttttttttttgtctgagtgcatgggacctctcttctgtgctcttataacgtcacattcattcactcacatgagagaagagagagagagaataggtaagggtgtgtttttgttttagcaagaaggagaggccaggattgctctcaaatctaaaaagagagcaaaataaccccccaaacacacccttatcctatcttcttctttctttcttttttttttgtaaaagattttctcatatacactactctattatactactctccttttctcttatcttattattctctctgttctttctggaaattaagtatatttttcttcgataccctccttttcttttattcctttcatatatataaaactatatttttccaaaaataaaaaaataaaaaaatccctttattcaaattagaagagggaatcaaaaaaagaagaaagaaaatggctccaaaatcaggtagaggtaagaccagtaaatcaaaagcagagtataagaagaaaaaagaagaaaaaggtaagaaactttttttcatgtcattttttattttttctttctttgattattattgttattgttatttaatttatttatttatttatttttttgtgtattggggtcagttgttcctgttgtgcttgacattacagtgataaccccttatgacaatcaagttgttcttaaggtaaataatattatttattcaatttggaaaattagttaataaatataaatgaaaaaaaaaaagattattattgagatattttgtttggttgaagggtatctctactgacaagatacttgatgtaagaagactattggctgtgaatgtagaaacttgccatctcacaaacttttcactctctcatgaggtaattattaataaattaattatttaattatagcttaatacagttaataataccaattttatttatttatttatagttatatctcctatttgtttttttttttcaaaggttaaaggtcataagttgaatgacaaaatagaagttgctacactcaagccatgtttgcttagaatggttcaaggtaggtgaagtcttttttttttttttttttttttttttttacatatttctatttttgggaaaatgctaataaaatataaaaagaaaacccactattgaatttttaaaacaaaattaataatgtttatcatgagaaaaatccaacaaatcaaacacacgaactttaattatttacatattaaacaaataatggcatattttggtgtacggcaaatcttattattttttaacttaaaacaatgatttcaaactttgtatgaatctcaccccatttacaaatgaaaaaggccctaattagaataaagaagattaaaacattacattacacatgtcaaaaaataatcacaatattcttcagaataattcaactataaataatatacaatcaaaaataaaaagtggggacaaaaaaaaattaagaaaaaaataataattgattgtaggactggtagctagctaggtttggcactgccataatttaaaataaaatagattacaacattatattaaccatgctaaaaaataattacattattctataggtaaattcaatcataaataatttacaaattctataaaaaaaataataataataaaaaaaaaatgttattggtctagtgagtggtaatgtggtatatatccactatccaaccctaactatagatgtatgattgtatgatattgttaatgtaatttattatttctttaactaactttatacttttgttaataactaagataagaaaaaaaaatgattttttaaaataattttataaaaaaaatgtatttaattcaaataccaccataaacagttttattttatttcaaatttaaaagctaaaaaaatatagaaattaaattaaatattttttaattttttctttttatttttacaatttggtactcccctaattattatgtgaatttaaattaagatttaagttaaattttataaaaaaatatcaaaaaattaatttaaaatgtaaaaataaaaaaaaattaaaaacctatttaattaaatcattatcatcttatatatagggcacaaaaatgttaaaaaataaaataaaataaaaaatggtaggactggtaaccaggttggcaggagctatagtagtagtggtaggagttttttttttttttttttcttcactgttataatcgcctaaggtgagacagcagatgacaccataggaaacggtgtcgtattgtctgagagagagaaacctgtaaagaatttgatgacaaatgaca

SEQ ID NO: 220906 - DNA, 2109 bp, Cannabis indica
acatgattatttcatgatttaaggtttaatatgtaatttctatttaaatccacaatttatggataatcatgattattgtgttgtgtacacattggtaaaataatcatggtcataagcttcaaacttttagtctcgcgatttaccagtacacaggatttacactgacgtgataatcagcgatattattcactcaaacttagataagtggaatgtcttctttaaggtattagtggagtaacctaagatcagatgcattggttatacaccagactagaccaatatttatagtggaagagatatcataaacttaccataatatcttctctaggtaaacctctaatagttgatcttagatcaatgatcttaatcctagaataattaggttctggtttagctgtgttattcttattttttgatttatttatttgaagcctaccagtaggtttggcttaatacttacctcttgggagcaaggtagtatatttaagtgggagcgataatcatagacatggaatctataacttctataattagataaaaagtaaaatgttatctccttagagcttagactaaatagacataaatagaagatttattattttagttaattatattagtttcccaaaatatcatttataggaagccaagtattttacaaattaaatacattgaagggtaacaccgtaatttcagtctctattcaatgtagacaatctatagaagatcattgattatttaaattaaaataatgaataattaatagcatgtctatttttggagaataaagtgttctatataattaagagtgcaattccaaatttatagtgaaattagaaaaaattaataagatacagatttttacttagtaaactctagaactacttattagaaatttgattatataggcccacagtccccatactaactgagactatattgccttgtagattcaattaattagttttagataatcaattagaattctaaatgaaactaggccttatttgtgaattttactaagcaaataaaaatttgagaagaaaaaggaaattgagggcttatttattaattaagagactttacatagtctaattaataaaaaaaaattctaattttatttgataattatttataatgattaaataaacaaaattaacatttaaaggcttagaataaaaaaatgatattattaagaaaagataagtttaactaaaaatggcaaatttaaaacccattactcttctatagagttcggccaaggcttcaaattaaatgttattttatatctttttaagttcattaaattataaccctaaccctaaaatattattataaatagacccttatagctcttagttatacgtacacattccttcatctctaaactagagatacaagcttcattaggctatagaggaatttaaaattcctcattctctcttcctcaagtatacacacctatatacacaggtatatagggtgtatacaactttgagggatcatagattatagtcagaaaagtaatatttttgagagatataattttatagtatatacaaactagttttcctttggcttctctttttctaattttttgggtgctacatgtattgagtacttgcccactcttttcaagggaatactcaagatagtgtggaagactgcgtctttcacattcacgagcaaccaggtttgaattcttgataataccctacgatagaaagaaataagggttagagaattcaaacaaaaggagtcataatttttgctactctattgtaagatttcttaatcttttatatgtttaattcgaattattttaaggttccatgtttaggatgttagattagtaataaccaacatacttgtttagtaaaagtaagatcttggtaaaatatgctttccaacaactggttttagagctatgataatcttttactattcatgttaaattggataaaaaataattttgattgttgttttttactatgtttatgagatttggacgttacatgttaaatggattatgcattatttgaaagactgataaattacgagtttttgtataaaataattgtaattacatctggaatttaatttttttttttt

SEQ ID NO: 220907 - DNA, 2243 bp, Cannabis indica
tctctctctctctctctttgtgtgtgtctcttgtctcacacgcccacacctattcaagtatttgtgaaattaaaaccatgtctcaattatagtgtctcatgatatgagtacacgttgtaatacctaaatttgtttatcaaattaagatctaataccccactctattcttaagtgttgagattggcttggaagattaaggtgtgaattcttcaacaaagtccttagactggatgttcgataattatacaaaaagaaataaggataccctgataggcttcaaagaggtataatattttttgtttttttgcaccatgtgcaagaaacttggtatcaggttgtatgattcaattgtatttcctcttaagtcatttataacatgctccttacttctcaaagccttcatgtagttcattcttgattccgtacctgtatttcaattctcttttgatatctagtggtgttgcttttgtctttatgttcagaaacttaggtttgatgcattctcctataacttttattgttcattggctttggtcttcacatctaacatttattgggtaggtgtggatgttcgagaacctcctaattatgaatgtatttgttggctcattttttaatgcttgtagagaccaattatagctttcataaacacacttcagactgtcttcttgagagcatgacctctataccttgaattagaagttgtttttgattgcgtagtagctcaagaccctcttgtgtatttctttgtccttgtattcttgtctttttgcaacttcatggtgaaatttatctgttatgagttttgcgttgttcgtaagcattcccacattttgttgaacttgttttgttcttaattcgaatatacgtattgcagcagcttttgtgttgttgtttagtgtgttaacgcacaatggatatatggtgaaatcagtttctttaatctttagttgcaagtaaaagaagaggctcgcatcgttgagtattctaatcggtggtattccatcttttgcttggtactggatttgcatggttgtttttgtgggttcgcacgccaatgaagagaggagaatccgtacaaattgttcattgttcatacttccaatcttttagtataaattcttcactagcctcataattgacataattttttcattcctcccagtgtctattgctcttcaaaagagctggtatagattccatgtcctataatattttgaaagtatttcaacaatttaacattatatcatacacaaaacaatagtaaaaacactgtaaaaaaaaaaccatccacggttgttcttttcattatggtagtccagcttttattttggtgcctaattattatgtatatctttaatttcgaatacactatggttaattaaccaagaaaaaccttaaaactacattgaatctgttaaaatttaaatggaattattaataatttttttttcaataatattgtatataaatttataatttattccattacacatatatataaatcaaatttgaaaaactgtaaatcatttttgtaattgatttcgagattaatgtatgagaatcatttatatttttagatttaaaagaatttgtgttggtttgagcttcttaccttttttgatttgttgatttctagtattgatgaagcttttggattttgttttgacgtcgattttaatgtttctgcatcatctcgctagaattaatggttactttacgactattctagtattactctggtttatcccacggtaggtcttgagaacgaatccttcctcttcgttttagcctctgtaaagtataaaagacagaatttaagcttaggacagtatttttgtaattttatccctactttttggaataagttgaggaatacttcttttttgtatccattaatcaaaaagaccctcaaattatatttttattaaaatgtatccacttttgtgagtggattgcccaatgtacactcaccttctacttaagtctaacacataatttacattaacttaagaagtataatggagacatcatttataaaagtgagtatattttaaagaatatagaaataaaagtaaaattaaaacatgtaaaataaaatgtatacaatctaatttttttcggggtaagttgaatacttttattaatcaattaataaaatttacctttaattttatatttaattgaaacatatctcttttcaaatgtattgtaactcaaaataccctgacataagagagtca

SEQ ID NO: 220908 - DNA, 3665 bp, Cannabis indica
  modified_base (1878)..(1878): a, c, t, g, unknown or other
ggcgagaagtaagtaacgattttttattgggctcttatattcgacggttttaaacccttgcttatactataggcgacggttttaaaccgtcacttatatggggcccaataaattttacgaatttcaattaaaaccgtcgcctattcctgtaattactgttataaaccgtcgtgaattctaatttttctcaacgattttaaacatataattttttagcaacagtctcttgaaaaaagtgattttaaaaccgtcgcgaattctgacttttgtagtaaatacttaagtagtaatatgactattttaactaattattttaattgaaaaaaaatgggctattgtttcaaaaaaaaaattgaaacattaccaaatcattgattttgcgtaatattttggacacacacaaaggactgataatttattttccaactcattgatattaatttgcatgctagcaggattaaaatataaaatagaccaaacatatattttctaaaattgtattaaaatatataaatatatacaattttttttttaaattttaaaaggattaatattcattttttatagaagaaaaaaattaaagtagatgtgagtggtagtactactaccacattgagatatgatataattattgttgtaattaaatataaaattttatatattttaatttaaaaattataattaaaaatcaacaagtatataaaaagcaagataactcgtggggacttcataattttacattttaccttgaactactgtagttttgctacatttaactaatactattcatcttttaaaatcttattttattaattcatcaatcattttctttgttctcttttctgtttctctgttgcttgggtaccattacaattgctgttttgtgtcaaagaccaaatattgtatttatttatttaaattttcatttaaaagagtttacaatatgtcaagcaaccaaatgtggacacactatacatatgtataggccttaatttggttggtaaattatatattgtgtcattttcaagtaattattatggcatttatttatttgtatatatttgataaggttaataaattttaattaatttaaagaataaaatgtaattatatgatactatacataattaaggagatattgtaaatattaaaagatgtggggatactattgagagttgtagaaaatatttgaaagtaataaaaaaaatattaaaagatataatatacaaatgatatagagaaaatttagagaatctaatgtatagtgtgtagagtgaggtaatttaaaaaaaattaaagttttggtaataaaagttttggtaatatattttaaaaaatagagtagagtaattgttgaaagtattgttagataccactagtacctaacaataatattttaagaataaatataaattgccacattatagtaatggtggtgacacacttgctcacttggtaatccatatgaaatggataagactagattatgaaacctgtatttttacactaattgagtagattgtgtatttgttagaattattttatattcatatatgtgtttcatttttatttttagaaactttatttttaatttttagaaagccattatcataaatgaaaatcgtatttcatgtaaaaagtgatgagaagtagtactcataactacaaattatgatgacacgtgcccaaggctgaattggaggagaaaatatgtaaatggccggcgaaagtaaactttgtcggctcttattttgatcacgtgagatggttcgtggtagattcacccaacccttgggtcaattcgcccaaggtgtgaatccatggtctaaatctttttttcttttttattattttctattctaaaaaaaaaaaaaaaanaaaaaaaaagatgacaaccgcacaagtctctattcatttgagtgcaccaaaccaaaatatggtcaggggtcgtgtaactaaggtcgatttctctaacgcactattagtactagtactcatttttgtacgcaaaaatatgaagtgggcccaatgattttcatatgggcttcacaagatcctatgtggtggcccaatgccagcttttcctgattagctaatagctagctacctcttttgattggtttttgtatattttttttttttttttctgtataaaaattaacttttatttaattgaagttgtgattgtgcgagattagaattttgaaataggacaactcttgtgccgcttgatttttggcggccattattgattggtggcgaatcactaaataggcccctattatgattaagtgggctcacactacccgatccaccgattatgctcttttctttcatctttaatttttaagtcatttatggttccattccatgtatattaaatgactagtaaatagtgattatgatcctagtaatgatgcaattattaaattattaaaataacccttattcccttttggagagttcaagttgtgtttaggcactaatggtcaattttgtacgtgaatagactctattccaagttcaaagacccatatatgtatgtatagttcacatgaaatttccagtaagcataaaagaatcagcatcataggatcaatttatttggttcagtgttttattaggttttttttttttaatattttgcctccataattgacggtttcattattgtgttgtaaagagaaatagtttatttgtgtatataaacctatcatgatctgatttgattgtcaaaaggatatataatgaaataggatttaataagattgggaagtgactaagaaaggttacaaatctcaaatcaaactataagattttgatatttgattaaatcaaaaatcatgtcaaatgcaagttgtatagatataattttgattttgtgatctaaacagccaaattaggcgatcagagaaatgaccaaataccatccaagtttcctacttaattaaatataataatgtgaattgacccaaaaattgaaaattgactttatatctagactccttgagtttctaataaataaaagaagtaacactatgggttagacctttttttttccttatcctaatcactactaacactagattaaaccaaagagtttgactagtaaggtggcatttttgtggtcatggcatgcgtttatatatataaatttatatgtacatatttgactttgccaaaaattcagtatattaagataaacagaaactccaaaacatcttaagattaaattattttgaacgtggtaattaactgcacttagattcatgcataccggcatatgggtaatgatcagcattagggagctattaatctatgtgtatattattacactatgatctgggcagcctgcctttacaaattttatttgatttgggtttcaattttgttttttgtttttgctactgaggaagagaagtaggaacgtgggaccttcaaattataagtagaggtgtgaagcaagtaggttatacatgatcacatgtctcaattgtttctaatgatattttcaaaaaagcaaaatatataaataacaaaagtatatgaatcaccaaaattgatttcattaaaattacttatttatttgtcgttgttgttttttaataaaaggttaattattatggtaaataagataaatctattgttaaagaagaatttaaaaa

SEQ ID NO: 220909 - DNA, 1255 bp, Cannabis indica
taggtctaaagtagtagtatctaatctacctctatattaaaagatttattcgacatcataagttacaataagtttcttattaattgagatgaaataaataaaatgtaaagtaagctttattatatagttatttatagatgatacgtgctttagcaaagtaaatgtcattggttaggaaaccaattgattaatcaggatttgtgacaataccacatcgaaattacaccattggctttcttaatgaaaatgttatataagttattaactgtaactcataaaatttagtttactaatttaagatttaatttattgttgcgtgtcaatacgttgcataattcttatcttctctaagaatgcttgagaaagatgagatggctgatctcgtcctttaattatgccaattctttcctctgaattagtattaacataattctcaagcataaaatttgcatacgatttggttgtttatgatgccggtataagatatgagaagagtagtttctttcaagctaaattatatgctgatctaattcatgaacatcaataattaaattaaaactaatatgagaaaaaaatatctcaaaaatttaaatttaaatggaaatagaaaactaaatgttctttttttatcgtttttttttttttatctaactcaatcattttatgataaaaaattatttctattgaaactcaatcgcacaagagtaaggaaggagtggagagagcccgacttgatgcataataaagagataatgtggattggagattgcaatccattcttcattgcacaactataatttactagaaagcactataaccaatttactaacataaatatgtttcttgaatgcaacattataaatttagtaagtgttacatgatgagtccattacaagacaatgattcttttacaaacaacaagatgggttataaggccttttcaaatggtcagtggacaaaaaaaactgttgaacaatctgcttgaaggattgtcattgttctttctaattgatcgacatcttgcaaaagctaaattacctttgagaacttaattctcatgctgatccttaaacaacataattcaattaaagagaattacaataaatgaaagatttcatctgtgacccaaagcaattatctgtctagacaactcaaattgagttttgtatcgagagaatagttatacatgtattcacaccgagcccatctgtaacaccctaactagcataggcgtattatgtgatttttaaacgta

SEQ ID NO: 220910 - DNA, 1638 bp, Cannabis indica
caaagcatttggtaaaaataaaacaaacacaattgcttgatgactataaacagagaatgaaattcattaaagataacataagcatctaaaattgagattaaggctacccaatcaccctgttgtctaaaaaatgaaaaataattccaagtttaaagatcgcttggtcggtcacgttgtcttaaaaaaggccttatggccagacaaatataaaaaagaaaaagataaaaagagaagtatttagacaactggagtcccaggctccttgtacgggtcttctgggccggtaagagttggaggatctgttgtctaggcggggggcactccaatgtcctagctagaggcaaaagtggtcgtcttagattctccataggccacctgagaagcgcaatactcgagaaacatgtctttggaattgcccaagaaatcaaaatttgcgttcgaaatagctttccataagtaataaaaaatctcgagacccgctgtcttaaaggcatttaccttccctccaagcctcgtcacctccgctctccactgctcagcctctgctctctgttgttcagcctccggcttgtacttctcgacctcagctttaagctcctcttccttagacttcttctctatttccaacctatggaagacagcctgaagaatctccctttcttcttgaaagactgttcacttctgatgataaggaggcgatgatagcttcaagttggtcagaagcctcgagttccttagtcagctcggctactttcttcttggcagcaagacattttttgttaacttcacccagctccaagcggacggctccaagttgaaccctggtttcatcagcgtctttcctagccaagtccacttctgccctcatggtgttggacatggcagcattcttagaagcaactgactttgcccgggaatatgcataagccatctacaaaccggtctgtacagagaaaaaatattagaacctgagctaagaaaagaaggataaaaggaaactgtcaagaaagactcacccttgtgaactctttcaagactcctcccatcacaagctccagggaaagctcattgtcagctccgccaagctgttcgttcacctcaggaactgatcgagccacgtagtgggtgagcatatctttgcctctcttagtctctagatgcagcactggaggtggggcaggggccctaatctattcagcttcgctcctgaccagctcggatccaccctttggctgttcaggcttgtccgagctccctcctcgagagtctttggacttagtcacttttggggcagaagggtccacgatggttggctcctcagagaggtcaataactgcttcggcggcgccctctctctggacggggttgtctcaccgctcttggatatcttggccggaggagataagcctgagcttcctgccactctcttctttagagcttcgagcatcgtctgagacatgtctgcatgaaataaaactaacataataagaagatgctcgaagctctaaagaagatgaaagcataataatcaagaaagttaaaagcaagacggagtatattgcacttcgaaagaaatgtttgcccgagcaagacctgatggctcatcatcatcgaacgagtctctttgatcctctagga

SEQ ID NO: 220911 - DNA, 1814 bp, Cannabis indica
tcgggttcaacccgaaactcggtggccataaaaaaccaacctgcgaacccgcatgatggggtaccgggttgaactcgacccgcccgaacaaaaccaattttttaaaattttcgggttgagcgggtcgggtccaggcgggttggtcgggtccaggtcaaacccgatcaaaatgttcagtcctacatgtaagtaatagtatattgaataattaatttttcaactctttatttgcaattaaaaagcaaataaaggagtgagacgatgatttaattagagatatttttgtttccagggacaaccatatcatccttagcattcctcttagctcatccatgtgtgaggatgtttggtattggaaaaagaaagcatctggtttttactctgttaaaagctcatatcagtaccttcaatatttgagaggagatttgaatgttcaattggaatatgacttgtggaagcaactgtggaagctcaaggtcccttcgaaagtgatctattttgcttggtgtgcactgtcaaggtgtcttactactcgaacacaatcaagataaatatcaagttcatgtatcagcaactatgacgagattgagcatatctccattgatcaagaacattatgtgccaaagtaacaacatcaacagcagaccgcgagcaattcttccataaaagctcattacaagctttccaaattgaccatcccaccatcagaaattcttctaccgctccacctcttctttttttaccaaaatttagcaaaccagtcactaaaaaatgtagcaacaaaaggaaaaagatcaattgcaaatctgttccaacatgatcgaataaggggaaaattaataagaacatggagaattgatttaacctctccactgcagaagatacactgcatatcaacagggacatgcttgttgtatatctatttaattaaatttaatatatttatcttatatagttgcgtttttatttcactcacttgatcatgctaaaatacaaggatttcaaaagctatcaacgaaggattttttttaatgagatgggagtgttgtttgaggatgttatagctttattgtctaaatttttggagcaatgttgtcccatgagctatcctgttcgaggaggtgtcgctgtcgattgtgaattgctgcatcgttaatcatgtgtgattttgatcaccatgtaataaaaaaataaaattaaataaattattgttattttatgtctccaacaacaaattaaaataaataaaataacatataacaaattaaaaggaagaaaaacaaattgtatgtataaagaaatatttaattttgttttaaattgtatgtagaaataaaattatatataagaatgaaatatacatttgatctattaaattttgaaatatatttgtattatatgttaattaatatccaattcgcgtaagtacggattttgaatttttccagttaattttacatgtcaatcaacattcaattcgcacaagtacatattttgaattttctaatccaatttgatctgcacaagtgcaaatatccatactttacgaatttgattgaattaaatcgactattttatgaacacctcccatccaaatttatttaggaataggaaattgataacatgtaatagtatattgaataattaatttttcaactctttatttacaattaaaatgtaaataaaggagtgtgataatgatttaattagagacatttttgtttctagggacaactatgtcatccttattgttgaccgagattttcggcaactgttaaaatatgattatactaaagagctgtaagaaagtgaga

SEQ ID NO: 220912 - DNA, 1500 bp, Cannabis indica
ctcttaatacagtagtgtgatatttctctttaattcatttgtcatttactctttataataagggaataattaagaatacgtgtagtgggttatctagtgtctattttattaataatatataattagatatttattatattaattcaatatatattaatagaaagctagcaaagaagagcttaaagaatgatatttgttgaataataaagtgtccaattgctaagccagtcaattattcaattaccaaagtctttgtttattaagtcatcacaaaaatacatatataaattcttatggacgaccaataataaaattgaaaacaatattcttgttgagatgcatacaagggaatcggttgttgattcatataaatatatatatcattaataatattattaagtgtgcatcgtaattgactactttcaacgtaagctacaaataaaataattaaatctatatatgtacctaccatgcatgggcatatatacatgtgaataatcataatattttcctaataataataataaatattatatatgtggctatatagtagttacctggcaacatactaatttatacaaatcaaatcatatataagtcatgatagagagagagagattatcataattataacacacacacacactaattataccaattaattgatataattatttttttgatatggtgatcatgaatatgattcctatagccacagaccaagccctaggacaggctcgaacccgagctcgaactcaagccatattgaaggcccgacgcgacaccagaaaccgaacccaaacccaagttcaagcattaagtagggctacacaacaagctcatactaaaattggaaacgatagacgagcactccaacgagcccaaatgagtaggtctagagaagtccatcgtctatcttttgccctagccaagtccgaaggccatgcccaaggactaaaccaagtcttaaacgaagtccgaattcaaacaccctactaattcaccatcatcaacatcatcatcatcagaatcatcatcatataatgtcttattattataataatgttgttcagtactctaataattaaatatatatatatagggtttcctgtatatgtatgcatgaacgatctatctagttggttaatttggccgtttatggtgttttaataaattaaattgatatatagcttatatcaatttatggtgttttaatatatagcttatatatatagtttttattcaattatcattgaaagggatcttttatatattaatacttatttatgaataataataatataatactaataaattaatacaatatagtagggttgtatataaatttttgtaaacgctcatcaattcgaataatctgcgaaaagcaaaccgagataacaaaaaaaaaaaactcaaaaaattgtatgttgtaaattaatatttttcacgaattataaaaattgttgtaaatatttaccttcagttacatttttttttttt

SEQ ID NO: 220913 - DNA, 2195 bp, Cannabis indica
ataattgaagctaccatcaataataaaaataatcatatatattaaaaaaacaaataaataaacatatttaccttggcagccattgataaggtaaggattgccttgataaccgtgtgagcaattacatctatacccaactccattagtagaattcaagcaaaaactattactatctctacaaccatattcattattatcatctttttgtaattgagcttcttcacaactcaaattcccaatagcccaatcaagaatcaaaggaacactttctctcttctgaagatcctttaaatcaagagaagagaactcataagcatcatcttcaaccacaaaagaataatcacaagggttaaaatcaaacacttccttgtgatcattcaaacttcctaatgaaacagcaaaatctatcacatcttccggtatgctcatttggcaacaccccacacccgaacacgacccgtttactacgtcgtttatttgattacacatggatatgcatcccgccgagtagtttcgcccctccaaacccccgataaccgccagcgaatcgcaccccaccaccgccaatttatttcgtctataggtaacaaaataaaataaagtaaatatggtcagcattatttagttactaatttaatttacacaaataatttattttttaatactaatataatttatttttttacctggcggagagtggaaaattggagtttgtagtcatatcacgagtaatttcgctactattacttgtcttattcccgaaactgtcgtaacagtttcgggcaattggaccttcaactcggagttcaccatttattattgaaatgtcaagaatagaaacgttactttttggaaagtagagtttgggagaatcaatattgctattagtgtcgttacaagcgacgagaaacgactcgtcgtggtaacaacccggtcctgtcccgaaagggaagggaattttcaccgagccacaactgtctaggcaggtggagccattagtagtagtgggctgagaatatgttggttttgtggataaaattagaagaagaattgaaattagccaaggtagtaaatggctggttttcatggtttattgattgtatctctttgttatattcttgtttgaaatagatatgaccaaatggtatgtatatatatgtgtgtccaaatttgaggactgtagattgagtctagtattctatgctagtttagaatattattattaatggacgtgctctaattagttgacctttgaccttgatggcaattactagagaaagtacgtaaggaggctgtgtacaagaatatatatatatatatgtaacaaaatttattagagaaaattgtaaaagtattcagtcatctataaaatatggggtattttatattttttttaagatgtaacaccataagctaacaataataataaattgggcataaagtaattaaccacgtttttgtaattaatcgactcattcaggtctgtacaaaatattaattaattaaattaaaagctaatatttgaaagagtggggacttggtcagtggaggctagcttgggcaagtggcattatcatcgatcccaaacacaaaaaaatatagtgcaaaaataaaataatataaaaatggtatatgtattgggttgatgaattttttgtgagaagctctttctgagaagtattgttgctatttagtcaaatgttagctttgtgcaaggggagggaatctttctgtgattcccaattatttttccattgcttaatgaacaagttgttctttaaaaaaaaatacacttacctctatttttttatgaccatttgaacttgtctcaataaaaatatgaaattgagttgatcaaagctcattataatttatatgctaggaacacatataagccgggctccaaactccatcgactcaacaacaacaagtagctagcttaataaggagttaatatattttctggtcctaaacttttaattttgtatataatataattaaactgaaatgattaatttttttgtttggataattattaaataaattaaatcttttttctttaattaaaaactatttcaaggtgtttgaattttataaaagaaaatgtgagtaacttattttaattaatttgaacatatatatatactaggtgattgttacgtgccaagctacgtagtgttagttttatttaatat

SEQ ID NO: 220914 - DNA, 4550 bp, Cannabis indica
gcttaacggattctgcaacaacctgatttgatttgaatcattctgcaccactacacttaggctgtaaacctttttcttaacatctaaagttgcatctgtaaaaacttgataacatcctggagaacaactcattttaatctgttgcattgtagaaacactctataatttttaacccaaagtattaccattattaaattgtatcctttaatttttttttgtccattcaaaattttccgagactacttacaatatattactaagactcaaggtaatataataagttagaatactaactactcaaaattgagattgaattaatttatagtcaaaaatatgataaggctagattagataataacaattcatttacttatctatctaaagttaatattggttacagtgttacaaatacattttgatcttatatatctactttgtcaatattctaaaaagaacataacatattctacttagtgtgagtagatgatattgcaaattttccagtcagcacataaaccttgtgcactaacaatcttaggactaagttttatttgaacatccaatcatagttatattctactatgaccacatcactatacgtcatttgtgttttcagatagctaagtaatataggtcggctggggtgtccactgacagcaaacccagagacctgaagttggatgatccagcgaagtttctcaagaataaacgaccattctgagggcaaacctagatgacctccggatgcagaatactgaaagatgcccaacaatggtatgggtcacaaacaccaacctatgtggcaaatatctaacagaatccccaaaaagtaggggagatgtctatgtgcctgaccacaaagaggctcacgacaaaaagtaaagcatctttttctctaacaccaaatttcttctaatattcttttttacgaggccttcgacagtcgtacgaataccactgtagtggtgcagatggtggttatttgttatatgggcctcaaataactaacccaaagttactattttgatgtattttaacccatcattgtgaatattttgagataaaaaccttaacaaatccaagtttacccaaaaacttgaccctagcctataaataggggttaaatcctccatgcaaaagcttatgatttttggcaagaataatcttgtgtaaaatactacatagctaattaaatagctcaataatattgactcgtggactaaggctctttaacactcccaatcacgtaaaaatccttgtcttccttacctgttttcttcaagcttaatatattctttatagattttgaaaaacacggtaaatatttttattctttcattgagagcttgaaggaagtgttcgccattgttgtcatcttaattgtggttacagctagaattgcgaccagaaagccattcagtcgtaacaataatgataacgataacattgctgccaatgatttaaaatgatcccctctagcggacgttaggcaagcgttgtaggagatgatgagacgtccaaagtggtcaggcatcctcctaaaaaaggctagcaacaagagaagtatgtcgatgaaactcccatctacaaagatgaacaagaaggctaggatgaggatgagtgagatgactacaacaacgattatgacaataactaccgagaggagtactatgaggaagactcagaggtgatacaattgagacaattgtcttagacatagaaaggtggttggaagagcaagaagaagctacagactaattgcaaaaatccctcttacagttgcagaacttggcagtgaaaagaaacctccacactaagaacccaccagtggagaagttcaaccatcctgggtctggaccctctaatccaaaaaatgacaagaggaaggccaaagaggcagagccccaaataagaaaccatccatcaagacccacgcataatgcaccccggacaataggaatgcgactgatccactatgctggagagagagggttgaccgagatgttgggatattatgccctataaataaattctatttcaatataatcttattaactaattttttaaaagtacgtaaataatttatgttgcatagttcacatgattactttgatgattatatgtttaatatataaattttattaaatctcaaacatatagttggtcataattatagtattatctatacagtaaaaaataatcatgattattcttggaatttatgtcctaaaaataagtaattaatggataatatattagagaatatatgaaatacatttataagataaataaaaaaaaataagttataatagtataattattaaatatgtgaaaaattccttattcaaatggagaaggtataatttttattgactcaaaaaattagactagacttctaaaccacactcgctcactagattaacgagaatgaataagtagttaagtaattataagagagacacagtgaatttttagcagttcattcactccctatatcgcgatagtaataaagctacgtctactttaattttttatttctaacgagatagtaattacaataataagctaagtgttagaagctccaaattctacagagagaaaatctagagagagaaactctgaccttatgggtagttttctgaatgtgtaaaatgagctaagggaactcttcttttataggtgaaggagacccacaaaaataggagaaaaatacaaataagattgttttcactgttgatgatgatctaatggtgaaaattagttcttggtggtgatgaccatttttgggagcccagtgagtcctactgcaagtaactcggagcttatttttgtaactccttgagggtaaattttgacaatgatatctttagaattacttctggagtgtgagacgtgacttgataaatcaatgaattagctttagaatgcaagttggatgatttcaatcagattaaaattgaggtagtaatgactattttactgaaagcaattcatgacccagtgtccaagttgacattcagtgccaaggttgacatccagcgcctaggttgacatatgacgtctacttggatgttgggtaagtgtaaaatcatccaagggacgtactttaagatgcctaagtgatattttgacattacttagtctatttatgtgttctggcgaacctagtcaccgattctcagagatattgctattttgcagaaatgagagactcaaaattctaaattttcaagtgagatagaaatgagaaatgcaaaatgcaaaggcatgaattcgacttctctggcttcatatatctttatcattttgaaaaaactagatggagagtcgaaatggcattagattcggataggcatgacctagtacactaaggcatttgtcaacctgagcgttgggcacttactctcggctcctatgatatcattttgatacttccaaggtttctgaacttgaggatgaggtctcctatcctatttttttttttttttcattttaaattcaatgatcgcaacaaaaagggattagtatttaagtaaaataaataaatttgttataagaaattaaaaaataatatatatcgagtaacaaatatatatatatatttctacctcaaataaagaataaactaataaaatgttaaatatatatacaaagaaaaaataagaaaataatataaaaatcatatataaataagataatgaaacagacaaaaatattatacaaaataaaatattcttttaaagggtataaggtagacaaaaataatactctatatgtaaagaaaaaataaaattataaacaataaactactttttttaatgagaaaaaaggaactattaaaatcaaagaaaaataaatatgtgattgaaaatgtttggagtgtgttgagtgtataagaaaaaaaaaataagaacaaatttactgccaaaaattaatggagtggatttaagtttgacaaatggaagaaacttatactttttagtaactttttatagtaccagtataatttagttttttttttagaaacttacaaaaatactaaaattttggttaaattttacaaaaatactatcacacgaattttttttaaaaaatattgtattttaataaaacaacagtggaacacaaaacagaacaactaaaaacaacagtagaacaactagaaaacaaccgtaaaaaaacagtaaaaacttaacacagtacacatgataaaacttaccataaaaattttctatatataatatataataacacaagaagaatataatcactcactcccaattttaagtttaaattaatagagatcaccataacttgaacaatttttataaaagtttattttccatcatctctaagcactaaaagaactctaatgaaaataaattttagaattatcaagatttaaaattttatattaagtgcttttgctgatagaaaacttcatatatcaaatgaacacattaggtaactatttataatgtttaggatcacacacttagaaattcacaccctacatctcatggttgttaccattcttttttttttttttt

SEQ ID NO: 220915 - DNA, 2231 bp, Cannabis indica
gattgatattgcttttaattctgatataactacattttctggtgtcgagatgatctttctcgtatgcatgccatcttaaaacgagatagacgtctcgctatctgtcatctcgatttaccgaactatttatacttagtttgggtaccgtgtaatatacgctaagtgtttttatcgttattgtctcttttccacacgacgaggttgaagcctcatcatgcacattttcactcttatggtttctcgtcgacacataagttagcagtttgtacatttctgtctcgcagaagactgttcagccagctgagttataagcatactctacaaattgtgtctctaacaagttgttccatgccaaatgtacttacgattgcgtgtttgagttcttcgttcttcccagctcgacatctgtcatctttcaatgtacttaccaaattttgggtataacaaatgcaacacgatctttttaactaaattgaaaatcatttgagaaagaatacaaaataaatgcaatacgatctttgtaacttactagtaaaagataatataaaagtatttgaaaccgtttaatacaataaattaaaaacatataagagagaacacaaggttaaaaaaattaaggcacagacctaaccaccacaacccagcagtgtgaaaatagaaaacagtatccaaatcattattacattgctaaatgatatgctaaatgatattgagtcatgacaaaagaataaaaacttgttaatgccaaaatcaaatatttctctaacttaaatttgtaaatgcatcttacatccaaacacaaaagaaattagaaaaatagaaaaaagtattatcaaataaattttagttcttcagtagttattacactaaccactaagacagtaaaccaaggcatttatactagagtatatttgctcttcataaaattgaaaagtatataaaaagggaaaacaaatagacctgagctaatatctgttcgtgtgaatgaagaaataggcttcacccatcagacatttcccattgttattcctacaattagatatagctgattatattgaactgttagttaatttagttttattgtcaaatacagttagttttgtaactaattctgttacttgatattttgagtcttgtaatacacaggtgtgtatataaatctctatgattgcattaataaagtttcagaactatttttactaatatggtatagacgataaaatctttttcatctctttttctctctgttttttctgccattgatatcccaccatggttagaactcttccaggaattctggccataatcctctgccaaataattcctctacaattccagctgctccaccaacaaacatactaatcattcctccggcttcgaccatgactacagacaatctcacccagactcatcttcacagacctgctcatgaagacagttcaagtccgtactatcttagctccggtgatcatccgggattaatcttggttaatcctcctttgtctgatcacaatttccaagcgtggcatcgcgattttgagttgtctgttggagcaagaaacaaaactgtgtttctcaaaggaaccttgcctcaacctccgatcgaagatcctttccatcaccattggtttcgatgcaaccaaatggtgatgtcctggattttgcattcagtcacaccagaaatcaaaagcagtattatgtttcttgaaacttctgctgaaatgtggactgaactcaaggctcgattcgattaaggtaatggccctagaatttttgaattacgagaaacattgatcactcttcgacagggagatgactctattagttcctactttacaaagcttaaatgtatgtgggatgaaattcaagaattaaggccacggatcccatgtacctgtgctgcttccactgacaattcggtcttcttgaatcaagaataggttcttcaattccttactggtttaaatgaatcttttttttctgttcgtgctcaaatcttattaattgatctatttcattccttgtctaaagtcttctccatggttattcatgaagcgacacaaaggaaactaaagaatccccaaattccccttattgcttctgttcaagaaaagaaccccctgctgctgctcttgctcaaaatctctcaacatcagcggcttcaactaatcctagacctgcaaagaaaatgaggccttattgctccaattgccataaacctggccacttaa

SEQ ID NO: 220916 - DNA, 2911 bp, Cannabis indica
acaaagaggaggttcaaagattacctcaacttgaattacactaagaattgttgaaaactaactgaattgaagaacaaaacaaaccctagcagcccctagaattttcgagagagagaaagagagcttgagagaggaaaagtgtgatttttctcaacttttccaatttttttgaatataatgaaaaaaaattgattttccttattttgtttcagccaaaccaagttagaaaaatcagattactaacataattaaaaatccataaaagacaattacaaatgggcaaaatgacctttttgccctctcacactaagttgacataaaaagggtactgagggtattttgggaaattataaattccgaacattccccatgtctaactaaaccgtccagctatactaaaatattagattgttattctattgatccacacactgtgttccatgttgtcgggcaccgaaaatgcaaaattatgaaatttcactatatgacatatataaatgcattttgaattcaaataaatcaacataaataattatttaaatattaatagataattttcataattaaaccctaattttctccaaatttccaaatttaaactaagcggtctttacattttcattattttaatgctaattaaatcaaacctaaccctaagtggttcgctataaatagatagtgatggctaaagggaaaagatgatgcatcttattactttagtaaaaattttagcctccttcactaccctagcccaaaccctatctctctcttcctctcttcaaaaccgaagcctcatagtgaaaagagtgagtgcccacacacatcaagtggtacacaatcgtagtgtgtaaggctgtgaagaatccactttcaagagaaggagattcagactcagatcttggtgataccctggtacagaaaggatacaagggttaaagatctgattggaaggagacattgtatttcgctgcaaccactgtaaggttcctgatactttatatgtgtttattccatgtcgttttagaagttcatgtttaggatgttaataacatacagtaactctagatcctggtaaaataattccaacactttttatatatcacgaattctctccagaattttgagcggatgttctctctctaagcataataccttaaccaacatcctataaacaagctcccaaataaaaaatttggaataatgctatggacaccgaaataggtgctctcgaaaaaattgtacttggattgttgtcccattaccatcaaaccagcatgtaattgacaataaatggatctataaaaagaaatacaatcctgatggttctgtccaatgttacaagcatgcttagtcaccaaaggatacacccaactaccaggcatagactactttgatacttatgccatagtggccaaatttaacacttttaaactcatgtttgccttggctgctatccatgaatggaactcacaccatatggacatcaacaaagcatttctatatggggacttgaatgaagaagtttaaatgaaacttccccaaggctacacacccaaagaccacattctacataatgttattcgcaaattgcagaaaagcatatatggtctcaaacaatattctcgggaatggtatgctaaactgagttctacacttttatagcaaaaacttctttcagtccccaaatgaccactcactatttatatgaaattaatcaggcgtcttcatggctttactcatatacgttgatgacatggtttttgctgccaacaacacatctgcattacaaaactttatcaccacactcaatgcaagattcaaattaaaagaccttggtacacttcatttcttccttggtctcgggatagcccgttgtcccaaaggcatattcgtatcacaaagaccttttacactcatactgttgcaagactaaggttttcttggttcaaaattggttttcgccccatggaaccaaacattaaactaagtagtgactcgggggaatttctccaaaatcccacagaatgtaggagtctcataagaaaactcctttacctcacaattacacggcctgatatcagttttaccgtgaataaacttagtcaatatctccaatcccctcaactaccacacttgcaagatgccactagaatactatactacctacaatattctccaggttagggccttttcttctatgcttcttcaccaaccttgatacaactccaagccttcacagatgctgattaaggagcatgtcttgacacaagatgatcaataataggctactatgtcttcctaggctgctcaatcatctcgtggaagtcaaagaaacaacaaatagtatcgcgatcctcagctgaagcagagtatcaagcaatggcgcatgccacttgtgaactcatggctcacttccatcatcggagatttcaacgtcaacatcaagcttctttcaactctatattgtgacaacaacgctgctatacatatatttgaaaatcttgtatatcacgaaagaacaaaacacgttgagatagattgccacattttccaagaaaaagtcactaatagtgttctccgaatgaatcatgtgttaggatttataaaacactcaagaaatatatatattacaaatctaaatatattcctaaaagtgctttaatataaaaaaccctaaatcataaatctatagagcctttgctaaattaaagaagaacaaaatgataaaagatgagtggaagcactaacctgaagccattgttagagattgcaaagaaggttttgatcttccatgaatacactattttctaaagtattttctctaatggggaaggagagaatacagaaaccctagtgtttcttggggtaccactacctattatagactcattatataatgagtttttgggta

SEQ ID NO: 220917 - DNA, 3684 bp, Cannabis indica
ctaaaagtagtagtcacaaaaattacaattaattgttgtgactaattaaatgtatttttagtcacaatacttgttgtgactaaaactaaattagtgacaacttgtaactaaatactatattttagtcacaagtaacattttgttgagactaaaagtcacatttaatcgtaaaaaaaattatgttgtgactaaaaagttgtcactaaaagttacaattttttgtagtgtaatatttgcaacttatattatgtttacatgttgtaattaggtagctgaaccatatttatgttagacttaattaagagctcatcgattgatcaatttttttttccataccaacttttcaaatccaataaatttgtttgaacaaggataaattatatagaagagtaaaacgataaaatttttcctatactcaatgtaaaccgtctatagaggatcaatgactgtttatattgtaacaatggataattaattacgtatctatatttggtatatagagtgttctatgtaatcaatagtgtaattctgaatctataatggagtcaggaggaattaataagctacaaaatttacttagtaaattttggatctacttatttggagcataggtccatgatccccacattgtctaggataatatttgtagactcaattaattgatttaacaagtaaatgtgaattttgtttactgagattttcggaaactaattataaacaatcagaactgaataaataaacaattaaaagagaaaaagtaagaaagacacaaaagatttttacatggttagggcgttaactagccttagtccacgattcaatgttattatataactctttagcttgaaaattctttggggaatacaatgtaagttctcaagtttgcttgagcaagtttttccagagaattcaacctttaatccataggattcactgggtatttatagtattttgagaattacacttagtttttcttttttctctattggaaagtttacaatgaattacatatttgggctgccttgtgaagtccaacccataaaggagaagatatgttgactaggtaaatgagattttggttagatttagtcaaaaccatgtaccacgattgtgagcaattaactgtgaattaattgtctgatatctattttaggaagtttctccttttggcttgatgcaatcctttgttgagatttggcaaacagatatttccttatttgcgtgaaggaataaaaagagaaatcggaccagtcttccagatcatgttgtcttacccttcctgtctcatggtactagacctactttcggacacgagctgtcaatggcggaaggttatccgatcacggagctgaagtacgttcctggaaggtcctgtctaaaggggcctatcccactttatcttcttttagggacccactgatgggctttggatgctgatctggattccacgtgtccaatgtcgaaaacgtggataacaaatttgaaaatagactatggcttatttgagattttttactaagtttgggtcattttgagaagaaaagagaaatatgggtttatttgttaatcaagaaactttgtggatctaattaataaatgtacttaaattgtaattttttataattatttataattattaaaataaaaattggtatttaaataattagatgagataaatcgtaaaatagaaaaaacacactttgtttcattaattgaaataaagtgacaataatctaactcaatggcccattatttatttcggtcctagaattatttaagcccaagtctttattttaagcccatctcattcaaacctaaccctaagtgatgagaaagcttgaaagtgctattctaacctaattctatgtcagacaactttctctcttcctttctttatagaaaattcaaaattcactagtctttctctctcaaaatgtgctccaaaggtgaattgagtatcatctcacactattcaaggtgatactcaaacctttgtagacgattatgaagaactgtcactttttatcgggttaaggaaggagattcaggctcagtacttgttactactctgcaacagaaaggaacaaaggttagagtactgaataaaatgagacattatattcttctgcaaccaacgtaaagatttctaatctcttatatgttatttattattttaaaataatttatattgaagatgttagattatagatttataatcaacatgtatgattagtaaattaaaatcatggtaaaataagttccaacatataaatacttttattaataataaaaaaaaattcatcagttttaaaataaattatttcattattttatgtgacttttagtgagtacagtactttgaaaatatatatatgtttatcaggaaagaagaattttattaatcacaaactcaatataaaataaagccaaataagatcaaaggtaaaacttttttttttttgaaagtgaagattcattcaactaaaaagaaaaagatgggccaacatggggtgaaccctccccttagaagaatttagcattctggctagagagcctaacactcttagctaaaccatcagcaaaaacattgagtctcctactaataaaaattaacttacacctagccagggggcattccttgaaaagttgtacacacgtctccataccaatttcgcacagatagcattctttgtcatacacaaaaggaaactttaccttcgtaggaatacactcactaaatgtacaccaaagcatcagcgccaaacgaggatgaattttcggtttccaaatctacttccaaatctcttgagtctcctgaaaacgatgctcttgattcaacaaatatgctcctttaaacagaaaattcctcattactattgttcatccaaatgatacaatccttgaaattcttagtgagcaaatgctcactaagaaattccctctctaccatcttttaatttttcatttgtagaaaaactaataatctacacaatatattttctttttaccatatctacaatatgctttacacgatttatataattctcaaaaaagtaagtgttcttattattccaaatatgatagattattgctgctaaaaatagcagcaataatctcaactttaatctcctttttcatgtactttgaaaatatatttactatgaaaaaaaaaataaattatttagggttaattatatgcataatcaaaaaaatcaaaaattgtatgaaaaaaaattaaaattattattattttgctaatttatgaacttggcatcctatacatactaatttaaacttttaaaaaattgaaaaactttagtattcccaatggagatataaatattactatatttactatactaatactaattattgaattactttgtttttgagaaaattattttttgaatttttataattttaatttaattataaaatacttaatatgaaattaagtatacatgtttacataactgaataataataaatttattgttttttcatatttttataaatattaaaagagcattaattaaatattttgttttgcaattatatattgggtcacaatgttaaaaactatatcaaatatattataaagtgattttttgtgttaaatatgagacaaatttttacatcactcattagagaaggtcttgcatgttcactacaagaaatgtcact

SEQ ID NO: 220918 - DNA, 3852 bp, Cannabis indica
ataatatttaatttacattttaaaaataaatttgtaatttaaattaaataaaataatatataaattaataaatatataattaaaataaattatataaaattaaaaaactaaaaactgctcatttttggcgtcggttcctacgccccctatggcgtcggttattatctaggaacagacgccatatatattcctatggcgtcggatcctagataataaccaacgccataggggtatatatggcgtcggtttttcaaaaacctttagcgtcaccctgatcagcgtcggtagcgaatttcgccaaaaccaacgatgaaagggcttaaaaaccgcctctaaatgggtatgattgtttgagcaccacctttacttttcagcatataaacacaagtgaaccttgtgtggtcatcaacaatagtgagaaaatatctataaccttcagtgttgattgtatgaaatggtccctatatatctaaatgtattaaatcaaatggagtagttgccatgttgtaagctgagttgaaaagaagtttcttttgcttagctaagtggcaaacatggcaaagagatatagaagaattgaaataaaaaaaattcaatgtcttattcaatgattttgcaattcgtacagaagggtgtcctaggcgtaaattttatttttggacaacaatacaagtatgagtattaacattagaattacaagtattcttattgaaaacataattacaagaggaagtcgagacttgctggaggtaaaaaagatgtccaacacgattagtagcctcaatccgaatattattagtttgtccttagaaaagtaagcattaagagtaaacaaaactgagtatttgggatcttctataatagcagaaattgatagaaggttatattaaaaatttggaacataaagtatgttagaaaggaataaatgatcatttaattgtatagtttcaaacttatgcacgagtattttaagtccattaggcagtgaaatatgagaagcagccaggattgtacaacaaagaggaaaaacatattatatcaaaacaaacatggtgggtagccccattatcaactatccatgatacagatttaccagtaaggtttgatgccattggagtcaggagtagcttgagtttgatgaatctgctgagtgagttccgttatcatgtcctggagagaggccagcttgttggagactgaaggagaggcaaaagcggaggcagagttgactgtaggccccttggcagattggcctcaaactgtaggactcttagaggattggctgcgatttggttaggacgttgtgtagacttagttttccatttttcaccataactaggggaaatctatgaagtatatagtattttttcgtcaagttctctggcttctcacagtgagcgcaaaatgggcgtatttgcttgtttcggggacgtttaaacaaggtacggatcttgcattgcctttcatgttgaatgatggtggcaaagaccttcgaaacagaaggaaatgactcagggataagtacttgagcatggacatcatggtataattctttaagacctatcaagaattgaaggaccttctcttgattctgaaattttaggttgtcggtagaagcttgacaagtgcaaggaatatgaggtcgcaacttgttgatctcatcccaaatggcccaaattttggtaaagtaagtcgtgacaaagtcatctccttggcataaatcactgagggattcattgagttcaaataggcgaggttcgttgctttggatgaatctattagtgagctcagcccacataattgcaacaatatcgagaaacatggcactgttcttgatgtcaagggaaacacagtggatgatccaaggcatcaccatttggttacatcgaatccaagaatgaaacagaggactcgtaggcactagttgtggaagagtaccgtcattgaattcagttttgtttttttgcaccaagagcaaggtgaaatctctacgccattactaaaaattgttgtctgaaagtggtggagtgacaagtatgagactaggatgatctcatgagcgagcgaagtaggagttgtctttgttgggagagtagttttgatgatccattggctgagaagtgtgggatgatgaaggatgatgtcccgcctcgtggattagaggaacacaaacagtgaagtcttggttggcttgctcagttacataatcaaagtcaccaatagagaagccaccaatggtgatgggaggagcgccgattggaggttgggaaaatgagtctccaaccggatttgtatgaccagaagacaaaggattcatatcttgatttattagaggagatggatcttgaacaatcgggtgaaccgtaggatcgatggtgtcagtttgtcttggatggcagaaagaaccacaagaacaggtgttgtcgatttgagaggaagtggcaggagcaagagggtcaaggatggatcctaagccagctgccatggatggatcagagttcgatcttaagccaagagcaccatgagagcccacatctagaggtaatggtggtcaaacctgaggaggaaggcggctgtgttggtgcaccgatggatgtttgcagagaagacagaactagtctgaaatgtgcagaaggaaacatggtcagagaagacggagctggttcgtgaaatatggatctggtctagaaagaaacatctgataccatcctaggaaagggagagaagatatcttttatttctgagagaaaatgaatgggaatgaatcaatgtatagctcttacaatataatattccttgtatatggtacaagtagggtaaatgattccttatacccgaataaggatgtagaccaagcaagtataatattaaacctataaccaattaaaccaaataattctaatactataaggctatcaatacaattggtagtgacataattactaataacttttatggagtctctctttataaaaaatgtacaatatcgctaattaattgtaaagcaacatctctaagtagtgctagacactacatgtgtctaataacaatgctctttgctaatatttgttttattttattaaaatacatatgtgttgactcagaaatctagattagatttctaaaccatacccgctcactagattggcgagaatgaataagtagttaagcaattataagagagacacaataaattatagaagtttactccttgtatcgcaatactaatagagttacgtccacttcaagtttttatttcccacgagatgataattacaggaaaacactacgtgtactaaaacttcaatttttagagagacaaactagagagagaagctttgacctggagctctcctttaataggtgaaggaggctaaacaaaaatatgagaaaaaatacaaataagaaatttttgaccgttgatgtttaactaacggtgaaaattatctcttgctggtgatggccattttttgaagcctagtgggtcccgttgtgggtaactcaaagcttatttttgtaactcccttggggataaaatttgagaatgatgactttagaattacgtctggaatatgagacatgacttgatagagcattgaatgagcttcgaaacccaaattaaatcgcatcaatcgaatcaaaattgaatgagttatgactgttttgctgaataaattcataacccagcgcccaggttgacatctagcgcccaagttatcatccagtgccccaagttctcatctagcgcccaagttgacatccccagcgcccaggttgacatatgatgtcaacctggacgctgggtaagtgtagaactatccaagggatttactttaaggtgcctaagtgata

SEQ ID NO: 220919 - DNA, 1576 bp, Cannabis indica
gtgcataaatttggttcgctgacttagtttgttctaattttatcaacttgtttggtttttcacagtcaatccatcctagattcattggagagaatttggagaagaacaaaatgttatacaacaaacttgccaatctagctgccaaacatgcttgtaccactcctcaattagctttggcttggcttctccatcaagccaccgacataattccaatcccgggtaggtttgactctattttttcttttaattattttttcacgtgcatgtgatttagttattaagtatccagattttataagaaataactacctcacttaacaccaactaatttttaaggttgaattactattctgcagtaaaaggcttttccctttcaatttgtactacggtattctgtcaaatatcatgttaggtgatttagttttaagttggaaccaaatcctatttgaaaaattaacattcctttcaatttgtaataatgttttaagctttgttaagagccaccattgtacaaagtggttttctgtactaggcttgatatgaagctgatcatgatgtcttaacaaactaaaatgattagctctactcattaactggctgattcttatcctttgcaatcattttacgcagggacaactaaagttaagaatttggccaacaatgttggatctttggctgtgaagctttcagaagaggacatgaaagaaatttgtgatgctctacctatcaatgatgttagtggtgaacgagattttgaagttctaaccaaattttcttggcagtttgctgataccccttcaaaataatcctataatatttttcctttcaaaataatccaacaatatttttctgttatctcgtctctcattttacaataagtgtacctaataaaataaacgaagtgtaccgtgcacccctagcctgttcccagcacgacattagtttataattttgaaaattctactgaagctagtgtaagggaggtcaatgcctaatcgatccctaatttgtttgttttttttcttgctctacaaatcttaatatgatagcccatgatctagccaagcttgctttgtaaatgtcaagctccaagatttggtggcctgttaaaataggcttgttatattttctttattggtcttttactgccactagtttgtggttacattccgttgtgttctgttatgttggttaatttggttagttggttcttgtaactaactttttaactaactacatattgtaatcttcttgagcttgagctatataaagctcactcccttctttgattcattaatgagaaattcactctgttttccttcttctctttctctctcgttttatattttctggtttgtaatatggtattagagccacgactttcgtgagctccttttctggttcctttgttgattgtcgttgtggctcatggctcgtggaggagccaatactcgaagcacaacaaaccagggagatgaatctcggactgccaacagattctctgccctggaaaccaatgatcgaccacctggagaagatcctagaagtccttacttcatttcgagtggagatcaat

SEQ ID NO: 220920 - DNA, 4239 bp, Cannabis indica
aacaagtggatctcgctaaatagtgagctccattgtttgcagaccgcttaacaaattttaaagaaactagacaatcttttaactcatccaacaactttttgcatttagttataattctaccaaaataggagtacatggtagtagaacttcggatagcttgaattgcaactaagcagtcagattcaacttccacacggctccaatgtttatccttgatccaactgagcgcttcatggatgccaatagcctcagccagatcgggggaaacagctcctctaacacatctggctttggcctccaacaaagaaccggtatgagttctagctacacaagagtagctgtaacagtgagaagaggagaaaatcgcagcatcagtgttaatcttaatcgtatcaacatttggtaaagtccaatgctcactaccatctccaggaaaaagtaatcctaaggacggatcaaaagttttatcttgagcatataaccattgattaagaaccgtaacagccaatactaccacttcctttacttcaacttgtttctggttccataccagatcatttctactcctccatagagcccaacaaagcatagcaatctgttgtcgacgctgtccactccatttttcaaaagctgcgttcaaccagttgggaaaagtgtcttcaacatcagttgagattgctggttcgagctctgtccagcatgccgtggagaaagaacatgttacaagcacatgactgattgtttcaatttcaagattacaaaacggacacaaggcattaacagtcactcgttttgtttgcagttgggacttggtgggaaggcagccagtcgatgcttgccataagaaattctttgcctttggtggaatttttaaattccaacattttctccaaaaaccagatgtgtcaactggtgcttgctgctgtttgttgtcttggagaattgcataggcactcttcacggtatagtggccaaagttttcatgcttccaataccagatatctgattcagaagcttggatagggatgctgagaattagattaatgtccctctcattgaaaatgtcatacagaatatccaagtcccactgattttgatctaaagacatcagctgggagacatttttatcaagaagagagtcactaaccgtatgcacaaatggatcagcagtatctggaagccagggatcgtttaaaatgctcactgttgcaccagaacctacacgaattgcagcaccttgtttgaccagctgttgtgcttccatcaagcttctccacacaaagcttggactcccaccaatttttgctgaaagaaaggagttgtttgggaagtatttggctttgaacaatcggctaactaaagattgaggttgtatcaacaaccgccatccttgtttgcccaataaagacacattaaaatcataaagattgcggaagcccaaaccccctttcatctttggtttgcacatacgatcccaactcatccaatggatatttttatcctttttagatgaagaactccaccagtatttgcacatagcacgctctatttctctgcttgtttcaattggcaacaaaaagacgctcatagcgtagttaggaagagcttgggcaatagttttcagcaagatctctttgccagcctttgacaatagtttcccatcccaagattgaatcctcttctgcaccttttctttcaagaaacccagtataaccgatttcttcctgcctattatgtttggaagaccaaggtaagttccattttcatcagcctcatggattcccatatcaccacagatagcatctctagtttgaacatcagtatttctactaaaaaagatagatgacttatcttgattgatcttctggccagaagcttgctcaaacacattcaggagggataggacattggaagcttctctctcattggctctgcaaaaaatgtagctatcatctgcgaagaacatgtgagatacagttggagcccgtcgagcaatttgaatacctcgtatccgctgagtttgttcatagtgtttcaatagagctgagaaaccttctgtacaaataatgaatagataggatgacagtggatcaccttgtcgtaagcctctctcagggataatagaaccaaacagacgaccagcatgagcaatctgatatttagctgaagttacacacttcataaggagagaagtagtatgattgtcaaaccccattttggtgagaatagcatgcagataaccccattccactctatcgtatgctttactcatatcaagtttaagggccataacaccattcctacctactgttttcctcttcatgtaatgcattatctcaaaagcaatcataatgttgtcagtaatcaatctatttggaatgaatgcactttgagtttcagaaataacctgatgtaacaccgatttaattctgttggccagcactttagaaacaactttatataacacattacataacgagatgggtctgatttcagtcatggaggagggctgcttctttttgggcacaaggacgatgttggtatcaggcaaatggttggggaagtcccctcctagaaagaagtctcgaactagctgaaccacatcatggcgtactatgtcccagtatttttggtagaaacccgggctcataccgtcaggccccggtgatttatctgggtgcatctgaaataaagcttttttgacttcactttcttcaacatgtgccaacatctcagaattttgcaaagaggttattgttgtaggaacacaatcaagtacctgatcccagttagtatctgacgaggtaaatagttgctggaagtagtcgactattacctcttgaagaccattttcccaaccaaccattacacctgctgcatcacgaagcttattgatctgattattgcgttttcgtgtcttggctgcagcatggaagtacttggaattatgatctccttccttgagccacaactgttttgatctctgtctccagaatatctccttttgtgttaacatttcagcaagtctttcattctcctcttgatacttctttactgaatccgcatcacgtctgcctttaaggagctttattcttttttcacacttagaaattctggttttgaagctaccagtaatttcttttccccatacagcgagaacttcagaacacttttcgatttttattgctaaaggagaatcatggtgcagcagccatatgtcttcaactagctttctgcacattggctcacggagccaggcattttcgaacttgaaggtgcgggtagttgcttgtgtagtttttacaaccggggttaaaagaataggacagtgatctgaggttgatacctcaaggttggtgagctttgcagtaggaaatttgtccagccaacttggagtgacaagggctcgatcaagcttgatctcaacccaattttcagtaccttttcctctttcccatgtgtacttgtatccttccatctccatatcaatgagattacaactactcaatacattttggaacccgtcgatgagccaattcggatatggacgtccccctttcttgtcactttggcaagttacattattcatatctccaataagacaccaagggagattgataatgttggcaaggtcagtgataagcttccaagtgagcttcctttttgatctatttggttctccataaatgcctgtgagtcgaaattgaggccattcgggagtagtaacaaccatatcaatgtaattagtaccataagccttgatctccacttcttccttatttctccaaagaacagcaatccctccactatgtccctggcttcccacagtgaaagaaccttcaaaaccaatagcaaatctcagtcgttcaactttttccttttgacaaaatgtttcacaaagaaaaacaaaattgggtttcttttggataataatatccttaaggaattgaaaggtccacggggtcccaagcccacggcaattccagcttaaaacactcataatccttggcgggtccgtgattcggagcccgccccaatcaagtttttttgcccgttgttaaacattgggtctgagttacccacatcttcatcatctgatacacggcccaattcactttcaatgcacattgctacactctggcccaattctgagtcagaccttctttttttagactcaacaataatctttcctttttttgaaatgggctgattgtttgccaattcatcaatcacgtgctg

SEQ ID NO: 220921 - DNA, 3861 bp, Cannabis indica
agtagtagtatgagtattattaccactactactagaagcagtattgttagcggtagtggtcgaagtaataataatattattattattattactttcatactgaattacaccaccaccgctaacagcactgcttccactaccactaccaccgccagaacctatgttgtttagctgagcttgcaactggcgctggcggcgtcttgacctagaacgacggttttgaaaccaatagaagacatttgcatctcccacagccccaaatttctcaaggagttttctattctaacagtctcatcttttggagggtttaccataccactattgaagattgactcaagtataaggatttgttctggctttggtgtccatcttgacctcacagctggttcaccaccatcattattattattattaattctgatttgatctgacccatttggactatttgaggaatagtagtgatggtgatgctcttgttggccttgatgatgatggtgatgatgatcttgatccattttcttctatgttgttgttgttattgttggatttcaagaagttcactatatatgtatgaaacctaggtaagtgatattatataatatatataaatataggaagaggttggagaatgagaaaatattgaaagtacatatataagtgaaaattgtgcttcgtctaggggtgtgaagcctctctctatatatagttatatatttatatatgaagtacttaggaattacagaatgttgatattatagtcaatttatttataattactttaatgccccttctcaatatagaatatagaaatgtatatcttattagatagctatatagaaaccgacttagaggatttgaagaagtagtatataataatctagaaaccaccatatatgtgttattattagaatgctatagtgaaacacaattaatgtgtcaatacatattatgtaataaagacacaacttcttttcttgataagtataaatcttagttttaattaccacaagaaatgatttcaaaaaaataaaattatccacacaagaatttttttttttttgaaaaagataatgttatctgtattttaagaaagatgacaagtacgtagtatttctagagaattattaagtatgaatcgcttgtaaagcccttccacataagaaggctcgattcagatgggagatgggcccaagcccatatgaagcctgttgaggtttgatctcttgatgtttggatttactgtcagatttgacagttagtaacttcccaactaacttaactgtttcgacaggtaagttagttagttactaacagtataaatacaccttgaagtcctctcatttggtgtgatgttaagatacaaattcagagggttaagagaggattgagagtgttgttgagagttgtaattggtttctcttgagattgtgagagagagccatttgagagacacttttgtaaggagcaagtctccactttgtttcagggttttatccctgttttgtacctcagttcagatcaataaagttcatcaccacaaccatgattaaggttgctttctcccgtggattaagctcataatcacattgattatgtagcccaaccacgtaagttcctattgttctttactgctttctttaaggtcattttactggtttatttttctggtttaatgttgctggttttatgtggaatgtgttcttgatcattgtgtgttattttggtgttgtgttggttcttgttgggagtttaagcctccacaaagcctaaaagcttcacctccgtggacgagacatacttgaatcgaacaagcaaaacactccaaatgaacattggaacacacttagagaggtactccaagaggcacctccagaagccctttgacgtctgatcccaccgaatcagaccttctctcttatgtcagaacatgtcgtgcgcaccaccaaaagaaatatatcatctttgtccaaggatgcttatataacatccttgtctgctgtagtagtgcccacacttgacacgtgtccaaaccgtgtgggccccatctgtacgtacaccttcgtcccataagctagaatcctgcagtgggccttaaagtcaagtattttatgtatttatcctaatagtgagctagtttgcacagtatccctagctagcgggttatgagtatgcccgggtccgaatcattaacctataaataccctattatacattcacgtagggagcagattcataaaatagatttttagtgtttcttcttctctaagctagaaaaactaagaaaaaatagtaagaatctagggttttttataagacttcattgtaatacattaaaacctttcgaccaatacattaacttgtgaactagggttaattaatatccaaaccacgtgaaaatatccatctctattacttttattttttaaaatgaatctttattacttaattacttatttaatttgttaagctcttctttaatttagtttctgaaaatctctgtaaaacaattaagtttttttagaatgttattatatgtcagtacaacttgaatttgaagtgtcccatagtgtatcaaaaccactcaaaaataaaactgtggtagatttttttggcaagaatttgtcaacttgtgaaataattaatgacaagtcatacattgttattttttttttcaaaagatattcattcatacttaagtcttataagtttggagaaaataaccaattaattaatgtacaccttaactttttgaacacatgtacatatgcttataaaacttttggatgaaggcctctctaattagtaacatacatttacataaataaatctctatttatggtatacatcctatcaatccctatagattaattagtatatatatattactactcctttaacaccatgtcatcattatattaagtttaatatattgaatagctgactataacacaaatgatgttttgtaactttctttcttttttcaacaccacttcaattgaagagaataaaaattgggttaataatgtattctttgtgattgtcatgatcaataatattaacttcttttatttttatatgcacacatagcgataaatgtcaagctaaaaaagtttcacaattgtcgtttacacactccttttttgatctatagaggaaacatccttttcaatatataatatattaagaagttgtgtagttaggtatatatagtctaatttttgatgtatgggaagtagtggcttattgtctagctaagctacttattggtcatcatatatatcatcttctttgccattcatgtgttttctttttcaatcttttaagactaaaagttactttttatagtgttttgataagttatatataaaaccctatatattgatttaaattaattaatagttttgtattttatatatatatgatcgatagataagggtagaaggtgataaggtgcaaaagccctattcaaataaacacaatcacttttcccactttattctttcatttttcttctttatttctcatgtgggtagtgtactatatcttataaactaactagcaaaaaggaatgcaaagtcactagctaggaaggaagaataaagaaatttaactatgtattaaaaaaatttgggagacatatttacctttttgccctcaccaaatagaggcttatatagttttagtataaggagaaaataataattttttctacatcacgatatacaatattatgtaattgtatggtaaatactttgttatgattttttaaaaattttcgaataatttatagtattgataacatgagcttcaaaataatatattttggattggaatataatcaaattttaatagaatattgtt

SEQ ID NO: 220922 - DNA, 1903 bp, Cannabis indica
aaaaaatattgaaagtgaatttttttttgtttttaaaattttgatttctaattataaaattgaaaagtaaaaacagttttatagaacatgtttttgaaaaatattttcactttttcactttgaaagtagaaagctgattaaaaaagtattaccaaacggcacctatgttaatatatttatgattaaaccatacaaatccatttatatatgattaccaaaattttataaccttatggttcggtagcaattataagagattattataatatgtgtttcattaccattttgtgaagcttatacaaagtcaacttaacactatcatatatcatattatcattaaaaaagacaaccaaaaaagaaattaaaaaacaaaatatggttaaatgaagagtactactatatatatataaggttgccaaattgtcctgtgaggtgcaaattaagaacatatcaagtgttatatagtactaatatagtaattagtaatataaatcataataaatgggaaagaagttaggatatatgaggttaaataatattattagtaaaagatcaaaaatatgtagaggagaaattcgaaagggatatgttccaatattggtgggaagagaagacgacgtcgttgagaagatgtggttaccaaccaacctcatttctcatccttcgattgtggctcttcttgacagttctgcccatgaatttggctatactcatcaccaaggcttgctcaaaatcacacaccatcctcatccattcaagaccattctcaacactatatctccccaataacaactcctatatatgttttcaactatatatatggtaataattttggctatatatatatatagatatatgcagttgtctagtaatggtgtcctgaggcgagactactgtttttatgtttgtggtcaacgccaacccaagacacatcaaattaagatatccatgttattattaattactttcataaatcaatatataatttgtattatatattatggtgtactagataactatacatacagatttgatcagttcgattgaataatttgttagactttgattaaatatggctattactattgtttctggtctcaattaatttaagaccaaatatcatgcacatatggtttttgtctcaattgtttggaataagttttatattctctgttttaaaacttcagttaataaattattttgaacaatttattatatatagaatcatagatatataatatacaaccaattgatgcatatacaattatacataccccttcctctaatttggaaaggggttggaaaatttggtatctctatacattcattcaaacaatacaacatcttcttagtgaaactctaaaacttgaggtggtgaaagagctcaggcaatatgttagtaaagggggcatttccatcaagaatcgttcgggctttgatcctttgcatattgccgccagtcaaggtcataaaggtataatattttctactctatttttcagtgattaattaagcatccacactttattagatgtaaacttaatactttgaatagaaaagatataaaacttaatacttaattacatcaattattataaataaaacatatggtacctcatagctctatgcgtaaatttacactctaacgagtggtgtcaaaattaggaatgtcaatggggcgggtcggatctgatccggctatgatccgacttgatccatatcatataaggatctgtcccgccccgccccgctagatcaggtactcggatcggatgatctgatccgacccgccttatacggatcggatctgatccgacccaatttttttttttttaaaaaaatatattttatatttaaatttatcattttttttcttaaatttattttttaactaataatgcat

SEQ ID NO: 220923 - DNA, 3467 bp, Cannabis indica
agagagagagagagaaattttaattacagggcaatttgggtatcttagaaaattataggtattattttgtacaaattagtgtagggtataaattttgatatggggtttttattagttattaataatgaaaattttcttttaaaatgatacaaaatagactatcaatttaattttcctcaaattaaaatttaataataactagatttgttatattttttacatctatttggactagaaatttagcctcaagttgattatattgaaaaattaaattaccgaaaattaagttcagtatctattttaatttaatattttaaaaaatacaaaatttagctacattgtcatttaacaaaacaaatgatctactctataaattttacaaaacagcatatgatgtccagtcatatagaaattgagtaatatataacttctggaaagtaaacctccaccaaaaaaaaaaacaccaaactttcacattatatatagatccagtagctagatttctgcaaccatattattcctcactgaaaatcatccccacaacatatccttgcatagtttacaacacacatatcatatataataaatacaaacacataattaagaaactatataaatatataattaagggctataatagagcttcttctttagctctaggcagtagaagtggtagtagtagtacaaacacaacttttttcagcacattcatagtaaggtttagccatatcaggcccttcaagcttagaaatcacacacttccacccttctccacactcacaatatgcctctcccttcttaccaccctcttccacaatattcaactcttggcacactgtcccatctgcactactgcacatattatttatattttaaaaattaaaaaatattatatataaagaaatattacagtcaatctcttattacaatcttttaatcaatcttcgtattcaaatacacatgtcagaatattttttttttggcagtgttcgttatacttataacatcatccctgtaaaattgtaaactattcggaatttttataaaatttacagaaataatactgtaactataatgaataccgcaatgaaaaaaaaaaatattgcgatatgcaattttggacgtgaaaattaactaaaaaagtaataagattgcttccgaacaaatattgcggtatgacactacctaaaaaatttaatgtaatttaatttaaatagcttccgaaaaaaaattttttgcattagaagaaatctcaaattcaaatcatctcgtcttaatatcaaaaaataaaaagaaaaacgtggacatacacagtacaacagcatcctccgccgcatttggcgaagattttgccagcgtcgggccccaccgtgcgagtgatcacacagctccacccttcactgcacttgcaaaatgcttttccactgcaaaaattaatattaattcatcaaattaaattaggattttagtttacacaaaatcaaactattatctatatatatattattttttttatcaagaccgaacaattttcgttaatcacaaacaaatacaatctttacaaagcaaagttaggaaaaaaaacctgttttttacataaaaattctctccgtgtatctctttttatgagcttccaagtttctatatatttttagcgatttttaatttatagtacactatttttagctttcaggatatatatacatatataaatatatatattatttaagaagaaaaacctgagagattgattgaggctggaaccctgggcttccattttgtgtatatatctttacttgattttttctctatgatatttattatattgtgagcaaattctaatttcttattgagatgtggtgtgaatatattgaggtctactccaatccaaaagtcaattatgcccttgattattcaaggtgggaaacatattatcaattgggttaagttgtcattttaccttttttgtctttttttttcttttctttaaggtctcgaatatgagtcccatagttatcattatagaggaagaaagtgacaagagtattattaaaattattcatcaaagaaaagattcggagaataaaagataatataattaataaccataatgataatcaaacccgcaattattttagggaaacttacaaaatgctgaaatttaagttaatttttataaaattattgtcatacggaagagttttcaaaaatatgtgttttcataaaacattagtagaacacaaacagaacaactcaaacaatagtagaacaactaaaaacaccagtaaaacttaacacagtatactgcgtgtatgaaatttataaaaaaatactacctgacaatatttttgtaaaaaaaatgataaaaattaatatatcatgtaaatttcccattattttacgagtaatggtataaactcacaaattatcctccaaaacttgactcataatggtgtattagtctttgtggtgacctatcaagaattaaataaaaccaagaattgtagtactctaatgacaaaaaacataaattaaaatataaaagtgaattaaacttgactcatactagtgtgttagtttacaatacaatagtgtcttgcatttataaatacacacaacctcttttaacaaaccctcctccctctcaatacaaattgaattatcatcttaattcttttctaaaaggtcatttaaaaagagtaatacacaagatcttatgtaggcaactcaatataaaggatacctgaattagttaattgacttaactacctcatgaattaattatagacaaacctgctccatctaaccaactactaaatgagtctaaaagagtatcaaattactcattcacaatcttttttatctaattatatctaattaacaggttttatatattttagggtaaatatgattttagacaatgtattttacaaaagttattaattagaccttctgttttgttaaatgacaaaatagatcctaaattttccagacggtaaaaataggacccaaagatcaattttcaaaaattttatttttaaatataactaactttaagacaatttctaacacgaacagatatagaaaatgtactcaattttgtcataacatctttaaatcagattattattaagttttattgtaaaaaaaattagtttagggtcctacctatttatacaattttagaaaatacgaggtctattttgtcatttaacaaaataaaaaatccaattaataacttttacaaaacacagtgtccaaaatagtatttatattatattttattttaataatcattataaaatatcattaaccatagtagtactactaattaatttatgagtgtatatcatcattactatacatcttatattattccactatttcattttttttagcattattttgttggtgcttattttggtggccctttttttttttttttttattttttttgttaaagaaag

SEQ ID NO: 220924 - DNA, 3274 bp, Cannabis indica
taacaattgggaattaaatcaataggattttttttcctaaatattcatccataattaattacactttttattattattatcctgctttttaatttttagttatttaattattcaaccttattattgattctgccaaatagaaataagaattcaattgattggtacttagctacagtcctcgtgaaaacgatctcacttatttgagtattacttgttaaaacgatacgtatacttgcgtattggatttatcacaacagcatccaggttgattgtcaacctaagcgctaacccagccctaggtcaaccttggcactggtccctattttgaaggacttgggattgtggtttctccccaaatttacttaaatctttgttatttatgatgataaaaaatgctcgaaacactttttgctgaacttgattggaaacagcctaggttgacaaaatgtcagcctaggtgttgggtcccacttttgccccttttagaaattctgtttggtccacagaaatagttgaatatcaatattttttgaagatggagaagatgctcaaaagaattcctaaaaaatccattttaaatggcctaggttgacaaaatgtcaatctaggtgcagggctagccccaagtgtcaacctgggtgctgggccctattatttatgcccacgaattgttgctttccctctggaaggacctctttccccatttttgatgaagaaaaatacgatgaaaatgtcgaatctctgatcaaatacttggaaggtgcccaatttgatagattttcaactcgggggcttggtgcttagggccccggggcctcaggtgctcaaaaatcagcttgctttgattccaattctaatgcctcaaatatgtctgtggtatgtctatttaatgtctaatgtaagtttttacaactttgcactaagacagctctaaaagctaaaaccctagttatggatgtcaacttgggcatcaggtaaaatcctaggtgcctaagttggcttccgagttgtaggtttttgtaatttcaactttcgagacttggattagattgctccatatcttcatggtgcagaatactaaaagatagtgggtttccatccaagagatatcaaagtcaatctgggcgcagggctagggtcccctcctaagttgactgttgtgacttgagtctacttaacttcgtgacgtcaactttcgtaccacgtgtgaaacatttatgtccacataactagggaaagctttcgggttaaaagtggcagtggtcaaccataaaaaatggtgagaaatttctttggctaaagtatatttccaacatcaatgtatcaaatacaagtgagaaaagtcaccaaaaggtatataacccttataggtgacatctaccatcttcgtggcccaaaagatggcaatactcttttctaccaattgtccaagaaccaatgtggacgaagtgttgtttcttgcatccatataacgaaaaataagcaagattcaccatcaaaggcttcccataagcctagggcaaccactgccatattttggcaccaactaatggcagtggtctcctgttagggtttcaaacatcaaattgaggttttgaggtccagacaccctcaaaatatgattctccatcaaaaaagcaagtgaaaacacaccttgaggtgtccgggagcatgcacggccaagaaccgccactttgacgtggcagtggtcgcgcagatttggagctgaaaagtacataattccctttggtaaaatagtcataactctctcaaattttatcaaacaacttggttcaacttgcattaagaatatcttttcaagatagaccaaagtgtgtctcacggtcataactcaattctaaagttataggactcaaaattttctcacaagacaggttgacacactttaatcgggaattgattggttttattaagtgtgagctacaatggaatgttgggagagctatgccacatcccatgtggcatcatgaccgagaagtgccatcccgaaaaacttttctccaacactctctaatttttgtgaaatcctaacggagaggtgacatcccttttcattcctctctaattttgtgtatttctagtcgagagtgacatcccttatcactcctctcaatgtttgcatttccaaagctcaacgacacacaagcaaatttaaagcaaggagaataaccaacttcaacaacaatcccaatgtttgtgggatattttcctaggagtaatgggcattttcatggaactttatttatttctattttttattcattattgagaataacttacatgatttgaaagtgagataccccgacatgtgggggatcactaataaaccctacgagtatatatagatagtgataggctagggttaaagagacgaaaaaccttgcgagagacgaaatccttgagggactaaaatcattcttcgtgttctaagagcttccagacttaaagaccattggagagtatttccttctgcatcttcttctttgtgttcttcacgacaccaagctttcattgttatacctttgacaaacaccattacttcgacacatttactaaggaagagagactattctctattttcaaccatcatccttatcaaatttatgaatgttgggtcttccatgagccttgtgtgcagattttacctagagatcttttatttactattatccacacattgttgagaacataactctagtgtgtgtcaaatccaaataataaaaacatagtagacgtagcaccaaaattattgagacatggaagtgaactactgtaaatttctagtgtctttttttttttatttattgcgattttatttagccaagttaattcatcgcaatcctcttattttttacaattcgtagaccagttgactaaaaaccgcgtcaacaataacaacaaacaatctttaatactatatcataataaaattatttttcatcagtaaatataatatttatacttttattacaattttaaatacaattattaattttacataaataaatttataaactttacataaattttattaagatataattatttttatataaaagtatattttattgttttaatacaaaacttaaaaattataagattaattataatttagagttaatatttataatggacataattataaaataagtttttgtattaaattaaatgttattaaaatagtattgaacaagaagctcatgattatttggtcattttatcaagcagctcaagacaagcgtgggaaccacac

SEQ ID NO: 220925 - DNA, 1217 bp, Cannabis indica
aaataaaaaaaataaagtaaattgattacttatggatcttcacgaatatcaatattattttttagaatttttgagatgctaattagtgagctttttttaacataattttatttttgctcatgattttgaaaaagattgtatatatttgattcaactatagaattttaatatgattttttttaaataaaaatatttagtgtttaattaatttaacaaatatttaatttactaaattattttaatattataattttttcttaatattcatatacaattcttactacttattttaataaattagctatttttaataaataataaaatatattttacttagtgtaaataagttgatgcactcaaaataataaaatctacactactcgaaaaggagtgttaattataacctcttattacaattctgaataatttacagtaccgaaaatagagttcttgatttttcagtttactacgcgcgttcaaaaaacttcaaacgtattttcagctatataaattattagaaattttttaaaaatctacaggggtgatgttgtaagcataacgaagaatcccagagaaagaaaaaaaaaaatattccaacatgtattttcggacatagatgttgactaagagaatgtaacatgaagctggcggtatcactcctcctactcaaattagtgaaaccctttgaaatgttctcactcactctccccacatccaattataacttttcccaaggtgggattctttcctacacgactcaaggcccacaccttcccttgaaaacaaattttacactctcaccagccaaccaaaagaaaaaaaaaaaaaaaacataaagctataaaagtaaaaggaaagaaccaaatataatctcatcgcatctatcctcaatacatattctttttattttttatctttaaacaaacatgaaatagaaaaaatggttggttttcttgtataaagttagaaaccttgataacatattcgcaaagaatattttgggtaccattgaaagtaaattccaagttctatatatacatatcaatatatttcataatgttttatgatattgtagctggctttagtaataaaaccaattaattacgactattgtggtatccaacgcttctttggctgtttcttgtaaagatgttttgaagaatgcatccgttaattactgagcataaaaaagaattattaacaaataagaaaaaaaa

SEQ ID NO: 220926 - DNA, 2664 bp, Cannabis indica
tacaacataaatttaaaaaaaaaaaaaaaaaaaaaaaaaaaaaaaaaaaaaaactccaaaaattcaaaatctaaacaataagtacatagacataaaatgtaattcaaccacaaaagtaagcaatatacctcaaagaataataaagtatgtctcatatcatatcaattagttatcaatcataaaatcttaccgattgttgagatgatttattggattgctcattgtacctattaaaaatgatgaaaatataattaatcaaaaataaaacttacaaaactgtgattttagaataatttgataccttaaaaatgatgatagaatttttactagagaaaacaatcaaataagcaaagagaaaacaatcaaataagcaataagttctcttcaaattcatgaaaagtttgttgtcatatttgaaacatagttaggaacaaaatgggtggtgtattcggaaacttattaactaacaagctgtgaaaaatagacttgttctctcattcatcacatgctcctccaatctcaaatcacacaatgaccaaaaatggaagatcaatataaattcacaaactaatgccaaaagaataggagactgatttcgaaggctcactttactcgattcaaagaacttgtttgatatgctaccacaacaaaaaaactcaactattgcaagcacattttttgagaagaaaggttatgtatgttttgtaaaacttccaaaagaaatgattatcaaattcagcgctgaacaaagattcaatattaataaaacataaaagtggagagagcaatgtgataccttgaacaatttacgttattgttcagcctggttcctacttttgcgatccaaaagtcgaaaatcagtatgaatagcactgcaatagcaaaaaataaaatagcaattggaaattggaaaaaactgaaagggaaaataataagttccctaagtaacatgtaattagagtagagattacttttcattttagtctttataattatatggtagactgaatcatcagtctttgaactttgaagctttttccttgtgtataaatttctgcagaccaaaagagaaaaaagagtatgagattgaatatatttgtggtgattgtatctgaggatttgtatatacttatttaatataagtaagagtttgtctaacttttacaaatagaactatacataaccagcatttcattatgatatgaacaaaatgctataaatctaatcaattttaaagaacccaaatgtaaaaaaagataataatatatcataaaaatgttaccttggattgagcagagttggagaatgactcatttctgattttcctaagttacttgctcaccacttaccaccttacgatctgttttttgaatgaaaataaagcattggactctgattagatgagtaacaatctctgattgaagccctttgctgaaaaatccccaaattatcttcttcttttttaagaaaataaagtaagtattacagaagaacattttgtggatacagaatagaattaatgtaagacattgcataccaaatggtcaaagtaataagcgagatgcagatgtagacagagaagagcatcacgattaaattagggtttatgagaagaaaatgaggttttattttttgaggttctctcaaactaactcttttgacaagttttattttttttattattattatttcacaaatacataaaaataattaaaaaaaatatatgatttatataattttaaatacgattttcaagattttatttactattaatgtgatattttgatgtatttttatattgtcccattgtaaatttattgttattttcaaattacttttatatagtatttttgttgttttataaaatattgtaaaaatattaaaaaaaaaataagggtaattttacattacacccctttaaaaaggatctactgatgcacccttaacttgtttcggtatctagaagaattatagatatttaagataacctacaaaattttgaaaaattcggaatagtttacaatatagaaaacaatgttcaaacagtctattttacacgcgtataaaataaaatagtcacgcgtgcaacatactatttgaacgtatttttcggcgtgttaaatttttccaaatttcttaaaattttgcaagatgtcttaaataactataacgtacatgaccatgagaaaaaatttgactataaaattatttcgggtgctaaaatagataagagtgcatctttgtatccattttaaggaagtacatttttagaattttccaaaatataaaaatataaaaattttacaaaagaaatattattttatgtgtatatataattttgtatacattgcacatttatattagcacaccttatattattattatttaaaaattataaaaataatccttttaagacaccaagaaaaaatatttacaatgctggcattattttcaatatgaatttgtaacaacaaaatttggtgagtgaaaattgtcatatataggtgtccaccctcgtaaacattcaagaaagaaactagaatgaggcctcccatttgatgatcaaatccgaattcttcattcgacttggcaaagaaactcttcgaaatgaagtccggtttaagtaggatatggggatcacaaatctcttcactttccttccat

SEQ ID NO: 220927 - DNA, 1573 bp, Cannabis indica
attttccaaatcaaaagcttttggcgagggtgaatctttagcttccatagacttctccaactctctctctcaggatgaaaccgattattttgcgatagccagtaagcattcttaacagaaaaatttcctttattgctagctttccaaaagactctgtccccttcatcagagagaggcctaatcctcaaaatcgcatttgcaacctcagaggtgaaacactgccgtattaaattctcatcccaaacccgagagtttgacatgaaaaggtcagaaacagatgaaaaagcatgcgtagttccataggtgaagctctgtcaaacctcttcagggctaaaaccaggaacccagggtctggtccaaatatcaaaatttcctccccacaccaggactcccgcaccagaaacacaaagatctctagccgaaagaagactcttccagagataagagtctgaaattttcttttcaacctcccagaactcaaaatttgaacaatacttcccacttaaaactttcacccaaggtctatccgattgaaccaagatgttccaagctaacttagccacaagggccacgttaatatctttgaaacgcctaaaacccaaacccgcatttctcaatggctggcacatatggcttcaacttctcaaggcaagatatctgtttgaatcgtagcctgaattgcagcccttccaccaaaatctagcaacaatgctatccaattccttacataaagacacaggcaaccgaatagcagacatcgtgtagcagggaatgctttgaagaacacttttgatcaatgttaatcttcctgcctgtgaaaggcattttgctttccacccctccaatctattaagcacatttgttttaatgaaattgagatcctcccgtttccttgcagatacagagaaagggttgcccaaatacttttccttgcctttcaaaacatgcattcccatagtagaagtcaagtccattcgatcagaaaccgagattttcggggaaaaaacaatactactcttatctttactgaccttttggcctgaccaggattcatatttctccagacaacgactaagagctaaagcttcccttggtttgcacgacagaaaaatagagcatcatcagcataaaacaagtgtgtgatagggatagtgtttcggcctattcggataccagtaagctccccacaatcttccgctttccgaatcaacttcgacagaacctcactgcacaagatgaataaatatggcgacgagggatcgccttgtctgagcccacggcctggagagaacacatttccaggagccccattaaccaaaacagagaaggaaacacttgtaacacattgcataatcagtttgcaaacatgagtgttgaaaccattcgccttgagcacctcagcaagaaacccccattcaattcggtcatacgccttatgcatatctgtcttgactcccataaaacccttccttcctttaattttcctcatggtatccatcacttccgtagctagaaccgaacattcagcaatccaccgtccctttagaaaagcactctgaaaagggctaatgat

SEQ ID NO: 220928 - DNA, 1519 bp, Cannabis indica
gttttattgatacctagagataatactattcagatcactattgagggatctgatatatctctctttaaagttacaaagtatgaatcagtaggcagatctctaatgagcgagagatatggccttggaggcgtgtgagagagaggaagagagaaggccatttaggcgtgtagaagagaaagagagagactagggtttcagacttagagctttatggcataaatgagacttagccttttagggttaagttaagtctctttatataggagaccacataagccctaattagcagataaaatcatagatatttacatattaaattaatagatacaaatgactaagttgccctttgaagctagatatttttgtatcatcttaattgcttatcaaggcccaactcgcagcttggtttgttgtccacggatgaaggctgcacatcattgtcttgctagggagaagttggttagccatacacctacacgatgaggtctggccagccatgcaaggtctataggttgaggtctggccagtcatgcacctgctagggtctggccggccatgtgcttgctagggtttggccggccatgtgcctgctaagatcctttaggtcatgttcctactagatttccaagaggaggccaacttttggagatggagaccagccttttgagatggaggctagcctttagcaagtggaggtcaactttgtacaccttttccttgctgaggttaggttcccttggtcgaaggaaagctcccttggtctgaaagttactttttggctgaccagcttgtgcctagatcctggccagccatacaagctcatcctagccggcctatagacttcccttggccaaccagacatgttggtgcaactccttgacgacttgcttaactcatttcgcttgctgcttgacagttttgccataccttgtaaggagaccttgtcttgctattggcaaggctgtgttccacatgtactctatcttggcttacatggacatgccatgtcaggtggacaaaatttgggataacatttgtccccaagtccctatttgaacatctggtcggatagggactttctggctctcatcttgtttgtagtagtctttgtcgagcaacattgtctggccaagtgttggctttttacatggcatgcttttagatctttgatcttctctgtatataaatgtctcattttctcttctcggatatctcttctttgtacatgccattgaaaagtttcaagctttttaagcttttagaaactattttaattttcatgttagtttgtaatcttattggtatattgatcctcatggcaatttttgaatgtataatgtgtgatttcttgagggaaaagatttgattttggcctttgttgtgattcctgaatcatgagtcataaagaacatgaagcacatatttgagttttgtaaaaaaacacatatttggattaaaactaaccttggccggcctaggagtgttggggattatttacccggatctagatttactacca

SEQ ID NO: 220929 - DNA, 2138 bp, Cannabis indica
agctcattaacccacatacttgtacatggagaaaataagtaccttcatccatctcgctctctatgcgatggaataaccatctcgctaatatcattataacacgaagaacactacgatgagaagcatatttatactttacattttttcctataaaaacggtgaagaaggataactcgcgtttagtaagaaacaacattcacagtcagcataatcgtttaaggataaagacgaaagagcggttcagtagttattaaatattattccatgtgcataaaaataaaatgtgaggaatgtccacattttatgaacagttgtaaatgattagatcctaataaaaataattgtcatcctatatacttataaataggagcagaatcatgggaagaatggacagtgaactcgagaaaaaaaatgatattttacatttatttgaaaattatactctgtatccatattatcatccctaataagaaggactcatggagtatgtaaattttaactacaaaatcacgtaaaaatatttggtgttcatttattattgtcatcaattctatatcatacataaaaggcttatatatttagttaacaaaaatctgcgttaacagtttggtgctttcattgagagtcttagtgataaaaacttagaaaaatccctccttataaacacaattacaaacttatatctatggcagataataccccccacaaaggaagtcatccagaggagactactcatcgccctggaaaagaacctcggggatcgcaaagaactaacacaaccgaaattccacgttcttagaggaatgatggaaatttcactccaactgaagagcagatcccaaagagatgaagtgaagacgcctatgatcccatgagatatgtcccacgggtggttatagaaaataggcaacttcgacagtgtctggctaaatctaattgaaaaaaatgttgagttggtacgagaggctgcgatagttaaggctacacagggaaccactcctcaaactcaatctaatccatctataaggaggctacgaggaagacctcgaggttccaggaccagaaagcaagaaaataatgaaagaaatcccataaatgatcaggaagaacaacttgggaatacaagggatattctaatgaatagagaaagtcaacctaatactggctatttaagatatcaggagcatcaacgtgatgttccaagaacttcccatggatttgcaaactatagaaatgaataactgatgtactagagtcatcttgcatgaatacagatgcatgacagtcacgactgagaaactaggaaatccctcgtaatgatggaagaaatcctagaaatcagcctaggtctggtcgacccccgaggcatccacaaaaacctttttgcacaaacagagagaatatacacacataacttagtaggggacgtgtgtcaaatctctttcggagaagaagcccaatgcgagatgagacacgtgaagcttagttcaagtataggagagtcatgatctcacaaacacagtaggtcagctagacaaacgtgagatggaaatagatcttgatattattttattgatcaagaaagtatgagtaactcgcttagctaccaatctaaaagttactcaaggactagatccgtgagtaattacgatcagagatgttgtgaacttgacctctgtgaatgattaaatcaaaggcaacagacctttgtgagcatttaaatcaaaatgcacctaatttgtgtaaccagcttaatcaaaatgcgggttagcaacctgtggatcccattcaattacgagtaatacaattggaggataagttcaaaaaataccaggatggagaatatggaaaattaccatggtatgactcggatgaagaaacagaactgttccaccctgatatcctaaactcataatttcctcaaggatttaaaaattacacacatctcgcaatatgatggtactattgatccaactcacccaccttaaacaagttcaacaccgtaatgacagcaagtaacatttcaaacaaacttgtgatgcatatggtttctgacgtcattaataggagcagcagtagttggtttgataagttcaccaccattccataacttcttgggagcaattgtcaaaagattt

SEQ ID NO: 220930 - DNA, 2423 bp, Cannabis indica
taacattcatttaatcacatcacatattagcatgcttaaataattacacaacatcgtaatcacacaatctaggtacttcataaagcacccttactattcgttaaccacgagctacgtatgtcactatcgttgcctgatacagcgaacggtaagtaagaaacctatccgtagtttcaagagtaattactcgtaacggtaatgactgtttctaactctcggtcataaccgaggcatatcaaacacataaccaagatctcgatcataatcaaaactatattaaacacaatcgctaatcacttaatcctaagtgatgcgtaacacttttcttactcagtctagaaatcaggtgtgcgggccaaccttagtggaaataaagttgggcgatcccggtcctatgccacgactaccaaaactcaataaatgtcttaaataaaaactccagatgaaaatcctaaatctgaaattagacataacctaacttctaacaatgtcaaaataggccacacaacacataaataacctaaatcgattactaagtaacaccccgagccaaaatagaactcgaagaaaactcaagaattccccctgtagggcaaccgttcgaccaattctggtgcaccagaaccaaccggttgaccagttctggtagaccagaaaacctcgagttttcttccccaaattcaaaccaaatcctttccaaacctgtccaacatctccagaacattataatattacaaatacaacttatcccaaacatcaattaatcacaattcatcaaattcacaacttcacaaagctagaattttaaaacttgaaaattcttaattcacatggcaatgacttaccttaacgcttctatattgaactttaatggaagaaatctactagaaaccacaaagaattgatgaagaattcttggttttggttagctcctaggttgctcgaaggtaagaggagtaaatcaatccttttttttattattatatttcttaatttcaaagtttaaagataatacccaacattattcatccatatactaatattaaatcaataaatctagacttattaaacactaaaagacaaaataaactaacccaataaatgatcattttaccccttttaaaaaaatttaactatgtaaaatctaggggtatcttggtaattctgaccaatctgccaaaccgacaacctaacactctaaactagcctggtataatttccaattcaatccatactttattgtcgtgatattttcgaccactccgcagagctcccacaattgccaggcccaaaaatatttatttgaaaaatggtatccacgatacccacataatctaataaaatcttcgtaattaataaattatgctttatttaatcatttactaaatccacactaattaacctaagtaagaccataatcttacttcattaccaaaatagttattacatatttaataaaatatgtctaattaaataccatattattttctgggatattacaactatcccctccttatagaaatttcgtcctcgaaatttacctaaacagctcgagatactgctcccacatctgcgactctaactcctaagtcgcttcttcaaccttgctattctgccacagtactttaactagcggaatagtcttgtttcgcaacaccttttctttcctgtctaggatctgaactgtttgttcttcatatgacagatcaatttgaagctcgatatcctcataacttaaaacatgaattgtatcagacacatacttttgaagcatcgagatgtggaacacgttatgaaccccggatagagcaggagttaaaggtagccgataagctacttgacctactctttcgagaacctcaaacgggccaataaatctgagactcaactttcccctctttccaaacctccaaattccattcattgggtacacccaaaggaaaacaaaatccccaacgtggaattcaatatctctacgctttggatcaccgtagctcttctgtctactctgtgagacaagcatacgagctcgaaccttttcaatggcctcacttgttctttggacagcttcaggtccaagatacctacgttcactggcttcatcccagtgaatcggtgaacgacacttccttctataaagcatctcatatggagccatgccaatagtactctaataactattgttataggaaaactcgatcagaggaagatacttgttctaagaaccttcaaaatccattacacacggtctcagcatatcctcaagtatctgaatagtcctctcagattgtccatcagtttgaggatgaaaagttgtacagaactttaacttggtacccattgctcgttgcaagctttcccagaacttagacgtaaactttagatctcaatatgaaattatcgacttagagcatccgctacca

SEQ ID NO: 220931 - DNA, 3228 bp, Cannabis indica
ataaaatgataaataattatcatttttctaatctcttaatttaaatttaaataaaataactaaattttacaaagttgataaacatctggttagtttttcaaaaaaaaatatctagattattctttttaaattataccatattttaattttaaataagatcattttataaaattatttaataaatgaaatagaaaatatatgaccttataattaaaataaaataattgataatacattttttttgaaaaaaatccaaccaataaaacaaatttttagaatatgtcctttttaatgtttaaaatctactcatacttaaaattaattaaaataaataataattaattttttagttttaaaattttgaaataaaattctacacaaaaaatgtaccgaaaaatcaaaattaaaatccatgaaaaagatgaaaaattagaaaaaaaaaaatgaaaaaattttgcatgtggcacagaccatatgcattgcatactgtctgcgcgcgaatggggcctactagaccgagggagaaggctacatgtagcatgttacaggcacatatggggattcaaacaaggacctatctgagaaacattggacacactttttttgaaagtgtgtccagaccaaggttgatcccatagtcgacgcatacaggtgaggtagccctaatcctgatattatttttcataaaacattttgtaattctcaatcaaacatcaattaaacacataaaccaacatgaacacatccaaatcatacaactatcgttgtaatccatatttcataaaataaatcattaccaaggctatgaggctagtaattggaacttattttaccaggatctagatttactaatatgcatgttgattatatgactataatctaacatcctaaatatgaatttcctaaaataaaaaaataaacacatataaggttgtagaaaattttacattggttgcagctgaatataatggctctttccattcagatctctaactctcgttcctttctattgcacagtattgctaagatctaaacctcaatctccattaggtgatgggattcttcacaatctttgacttgatatgtgtggacatgtactatcttcactatagggttttgaattaaagatgaaagaagagaagagaattcaaaaattataggagcctctcttatttatctgacaaagtgatattaggttatcagcctctcacaattaatagcctataattatctatttacactataccaattagggttaggttaaaatttaaatatgtattaaaaaaagatgaaatagctttaaattaaacccttgctgaaccctctagtaggccctactggtttcaatttcgccactttattaaataacatatctttctttcactaatacaatattttaactataactttataaatgctaattttatctatttaagaattataattaattattaaataaatttaccaattaatttatttattaattagacatgtcaaagtctcttaattaatattaattaataaacaaacaaaaaaatctcttttcttctcaattaagcccttgcttagtaaaaaatcataaataaggcatagtctaacttagaattctaattgattaaccaattaactcagtctacaagccaatattatctcaactagtgtggggaccatgggcctatacaatcaagctccgaataagtagttctagaattgactaagtaaattctctatcttattaattcctcatgactccactatagatttggaattgcactcctgattatattgaacgctctatatgatccaaatttagatgcattattaattatctattgtttcaatttaaattatcaatgatcctctataaatgatctacatcgagtagggacaatttttactattctaccattccatgtactttattcttaaaacacttagctccttgtaaataatattttagtaaactaatataattactgaaatgagtactctacaatttaatcttgtttagccaagcttgaagaaaatcatcgtcttgcttctattcatttatagaagatatagattttgtatctatcattagcgctcctacttaattgtactaccacgttcccatgatgtaagtattgggcagatctctttggtcaactttaacaaacaagtgaaagaactcaaataataaaattgaactagaaccgaaccatctcaagatttagatcacttatcgaaggtcaacaatgtgatatttacttagaaagatattacggtaagtttatcatatattttctatgtgaatattggtccagtctaatgtataacaatacatccagtacaagcttactttaccaatgtcttggaaaagacatactactatctaagtgtaagtaaaccattttgtttattatcatatcagtgtaaatcctatgtactaataaattatgggactaatgtttaatcacataattttgattactttcaactgtgtagacaacacaataatctagaacaataatatgataaggatttaaaagaatttatatatcaaattaatgaccatgaaacaaataagtgaaccaagcattatatttaaagaagtaataaaataattatgttcctttattgataaataaaattcaagattaaattaaaatagagttttagttagggcataaaatccaacagaactaattgtataaaatcttctacttttgtggcatagatgtaatcattgtaacacttcttacaaaataccatccaaaacatatctaaggtcatggtattcagatcatgaccctgagatactattgagttttatgccctaaataaaactcaattcaataaataagatttactaattaattaaagatcataaatcattttatgttgcatggttcacatgatttatttcatgattttatgtttaatgtatgaattctattcaatccataacatatagttaatcatgattatagtgttgtcaagacagtgaaatataatcatgattatatgtttcaaagtttaagtcccatatgtatgctaggatcatatgtttagccggccactaagtggattttagccatttttttaatcttttctttaattcatataattaaatcctaaaacatagaaaaaatattatcaaaggaataagatgctctcattttcatccaaccatcaaaatgtagtattcattctctgtcaaactagtagtaaatgagagactccatt

SEQ ID NO: 220932 - DNA, 3578 bp, Cannabis indica
ttgatgttttagttacttggataaagatgaatattagtcctttaaacaaaagtaaatgttcttctattaattttatttcttcgtggtcattgttagcataatcaaacgctatcatttgtgacatacattgtgttatcttgggttaaacctatttaaattttcttgccggtgttgagcacaactgaccatagcatcttctcatatatgggttattcgtgtttaatgcacacaattttacaatggcttttggttactattattaagttatagagaaatcctaaagggtactagtggtgtttaacactctcctatatgtcagtatcgctatagatctaactaagtattgggtcccatatagtttaatacaataccttttagggagtatcgctaaccaattgtaacatgacatatcgagaaggtgttctaagttataatagctaatctgtacaataaagggttataattagccaaaattgattcgttgtattaataactccaaagaacaagtggtttaatatttaatgatatgtcattttacactagaaacgctataccctttggtcaaattaataagattgtttgaatagaaaatcaactttattaattttaacttctgcaaccaaattaggtaaaatgaatgggaagcttgcacaaactcatgaacaatcacacattcgctgattgtttaacaaaacaaattaaaatatccttcaaatcattaagtgaagctttacaatcttgaataataataccaaacaaagaaatcttgaataatattaccaaacaaagaaatcataaccgttgtactccataaagcttggatctcgagagacaatcagtctcaaagtaacatgtttccatgacaaggaccggtttgacgcaattgagatcgtgaactgtgtgaccttctaacaatagtccatgctcatccctcgctactattccaaacccatatatgcccctcattaaacaaagctgcatcaacattgatcttaacttcattaacagttggtaactttcaatgctctgcacaattcccgcttggaaacaaagccaagacaactctttatgagttttgaacatttttccattgattaagatactcctcaacagatgcaataatgtctaaccagtcgctctccttattccaaaccagctcattacgagctccccaaatcgctcaacatacaatagcaactaaacattgtccctccccatccaagtgtttaaagattatactacaccgatcaagaaaagattgtttgaaaaataagatcgtttgaaaaagcattcaaagatgagagatgagctagactattggctgtcaacaaaaggaataaccccataccagtcaccaccaactttggtgttcaaagaagcatttgcttaacaatgagctagactattgactgttataaactcgtacttaaaaccaaagaacccagctttaatactctcaatcagccatcaagatctgaacactgcttgtctttgcttcatgaacaagtgcaaaagcttaggtggattatttatttttttaaaaaaaatataaaattgctagaaattatttttatttatttattttgtagttattgttaaagtattctagaaatggagatatttagtattatgtaaataaaatttgaaaatggtagtaacgtgcagaatagtagtattaatatcaccaaggataactatgagaacatataaacatgacaagaggatgatatggagcttgttatgtaatataatttaacaaatgtattcgtcgtatctattacaaaataaaaaaacaacaacaacaacaatttacctaaatctacttttgtgacccaactcattagcgtctataaaccactaataaagtaatatccagatgcttgaaactggtcatacactcaataatttgacattattcagaaattatacaaatgctatattattttaaatcttacaataggtcactgcaatgccgtcaaagatatggttccccttctttctttttgtttttcttcttctcttcaaatatattaggttttatgcatccagctgacttgtgtaggctgctttcagtaccctgatagacttattcatatccaccttcgtgtggaccgttgttctattcatacatgggtacctatataagagaggaaaatgatcaacaacatcacggtgatgtaattttctagttttaagctgcctattatcttcaactgagggtgctagtaacactctttatctcactttattttacactccacttttctcattgttaaatcttataaccaaaggaacaacactaatattaggatactaattttctatttccaacaactatcaacattaagtttaatctatgcaacgtgattactttataaaataatattcgcaaacaataaagaccccatggatatgtcagtttctcttcttacggggaaagtttgatgacccaaaggtttagcataacaagcaatatgttgatcgagaaagtttattttctgtaatactatactgcaggacatgtagattttcattttcttttctttctatctattgttaggaaagtacatagagctttagtcttgtacctctgccttgagctagcttctgtattcaagtagctccaaccttcctctcatttccgttggacgatgatgaaataccttgttcaatactctggaatagagaacactaattattaatataacaatagtagaaaagataatttaagctagtgtatagatagactcgctaagaatacgtgaatattgtgatcataaataagcaggcaagattccagccacggtggttattaatgggaaacataacacaacaatataaagatggaagaagtataatcacattttaaactattgatgatggaaagcatacctgcaatagatatccatgcaaccaatccaaagtttgtggaaatgtagtagctgatacattgaccactgataaaccctgcttgggggtaaacgacaaaaataccttttttcttcagacaaaattacacatgaaaatccatgcttctcaaaatgaaagaaaaatattcagaaattgctgaaaggtgatactgtagaaaaatgaaaccacatacctgtgatttaaatgagcacagatagtcctgaatggttttcaaattggctactagtttatctttatcctggacaatataaagatggaataactgacaaagttaaataaaatttcaaacttattatagtaaagcaaacacgtcaacttatcttcatacaaattttcaagtaataacacgcagtttcctgtttactttgataatatataatgataaaaataatttaatatacataacttcaaaattcttcatggacaataataccagtgatagatatacctggactagacttgtatccctaaatgtacgagttgatatccactcctcaagtaatgcctgtcacaagaacaacttagttataactgtggggagaagacaaaataatggtagactagctatacaaaaatcagtaaaaacaaagcaatcagcatgccatgcagtttctgtctccaaaacattaaggctatgtttggaagtt

SEQ ID NO: 220933 - DNA, 2333 bp, Cannabis indica
tggcagagcaaaaagagcaaaacaaaaggatgcaagagatattgattgccatgaaaaaggtaatggaaaatacaggcatccaagtggatccaactgcaatcccgtctgtgcgagaatggactaaggaagagccttttcagcccaaagggggctagaaacaaaagaacagggaacctagtcccattaggtatcctccagaatggcctaccatgaagggaaatcttacaatttttcccaaaaataataaaaaggcccaggatccacgaaaaagtttgttctgatctctcaaaaggaaaaagtttataggggatagatttcccaaagagaaaactagccccaagatcaaggagatcggaggagcatatttgtacatcaagagccatgaaaataaaaaaggttctgtcaggaaagatccccctgtcgatctaagatataaactcaatgccaaatatgaggacctaagggcacaccttaattaaagaaagaaatccacgccgatctctgaggggggtcctgaatgaaggagtcctagccgaacttactatcctttagaaggacatagcaaggatcttttggaggcaaaaaggagatgactcagaatcagattgtgaggattgggagccttgtgcgagaaatatactagaagttgagctcctaaagaacttcaaaatgcttaaaatgaccatgtacacgggtgacacatatccaagtgatcacctatctagattcaacagagtcatgacagtcaagagggtcagcaatgacgctaaatgcctatgtttcccactgacattaggaggatctacagaggagtggttcaaaaagttagaactaggatctgtggattgttggaataaattgcaaactaattttagaaggcaatttggtgcagccagaaagataatctttgaagttagtggcataactaacatcaaacaactaccaataaaaaccttaaagaacttcgtcaagaggttcaaagaggaggcttccaaaatcaagaaagtagatgatggacaacaattagctttattgacaagttggaatttagacaggaactccattctcgaatgagttgcaacaggaaggtgcaactagccttcaagatttctagaagagagcccaaaaatatatcaacctggaagaatcccaaatagccacttttggaggatattatcctactggaggctcagggtatgcttctggattatagttcctaggtatcaaacttcctgccactccccaaatgaggggcatgcctagtttacaattccaagcaacacctaggtacttaccaaattctatcatggtaccagcctattctaatatgggatgccaaaaagtggtctcactcttagagcatggatgcactatcctgctcaatccacgtcacttgcggcaagtgaagctgtagttcccaaagcttctcggagtaagcagtcatccaaaggaagcacccggagtgataacaagaagccaaaaaggcccaggtataatccctagtacacttagtacactgatctagtggacacacaagagcatgtatatttggccacaaggcaaaatatccactaccggaggccacctcctctatattaagatagctcacgaagggaccccaacaaaagatgtgagtaccacaatgacattggacttaaaccaatgaatgcaagaatctagaggacgagattgagagcctgatacggttgggccacttgtataagtggatagggaatctcttgttgcacatgagggaaggacaaaaccaagttcaagtgccacccggaggcaatccctaaatgtataggctccatagggagcacttccccaaaactaaaaggctttgccaggacaacctgccaaaccaaataggagaatggctatgatctttggaggccctcatacccgcaatgagttaaaattgtatgccatagccttagaccatgatgaagatatatggcaagtgggccagctgctggcttaaagacctcgtctcatagaccaaccaataacgtttactgaggaagatgcccggacaatgccttttctgcaccatgacccactattaattaaaactcctattaccaacaaaatagtagctcgaattttggtggataacgggagttctgtttcctgttcaaagaagctttccttgccattggcctcacataccaagacttgtccccaagtggttcataagtcactgggttcaatgggaactctcttatccccatgggaaaaattaggctctcaacgaccctgtgtcccaacactgctcaaagtatgtttaagtactgcatctttgttgcagtagattatccaacaacacacaa

SEQ ID NO: 220934 - DNA, 1938 bp, Cannabis indica
aatatatcttatctttgcagttttttttttttctttttttttatattatttttttctaagttttttaacagtcatagtcaactatacactattaagtaaggggtttgactacgtgaactcaagtgtagttagtttttttttttttttgttattattattattattattattatttatgataaaaaattaaagtaattatgtataactagtaaaagggtgaagtaattaaattggtgaaaaaatatacaataatgagttgaaatcttttatgaagaattaaaaactagcaatattacatgccactagaaatttgtaattttgattgctttgtaagaaatgagaataaaattaattgaagaaaattaaatttgaaacaaaatcatcataacaatttactagtgatagttggagtcttaaatttccttgtttatgatttattatatctaccaagtgtgctagataattaattcaattatttggcatagaaatagtctaaaataatataaatgactacttagtgaaaggtttattattattattattattaataataataataataataataatacaattgtcatttcatacatcaattaagaagtaataacacaatgtttaaacattaatattaaaataatctcaacataattataaattatcttaataaaaggaaaagagatatataaattattaaattattatcttaataaaaggttaagagatatataaattattaaattctagcacctttgttgcgctttataggtggataactcggtccaaaatgagtaaattaaaaatttatttttcagctatcttgatttttagtttacaatttgtggagaactcgtaatgaaattttgtggtgtcaaaaattaacaaaattgagtatacttataaaaaagaatcgaaagtgttaaaagtagaattttattaatttgacctaaacatattagtagggaatatagagtttgattatcttatatgtcaacctaaagtgagttttgtatagctttttaggatttttcataactttttctttttttcccattcctccctcaccattaaactagttttagtggcttaattagtttgatttattgtaatacattttctgatttctaaaaaaatttattaaattatattttaattctttcacaaattgacccttaaaaattataacaaaccttctaaaataaaattctatgatattttattatatatttatttttcagagattcgaacttgagtcctcttctttcaataacagtaaattttgttatattataatattttataaaggaatattttatatatattatatgtttatttttgcaaataatatttatttatttatttatatatattaattaataaatatatattttaccttttacttttaccattaggagtgctcttacaccactcttcatcccaccacttaatcctcaatctttccaaacatacatatagcttaaagaaaaagtctaatttttcttaaaatgaatttctcctagcttttctatggttgttatgtttggacatatataagatataaatatacattatacatatatatatatatatttatataacatgaatagtcatatcaaaacttcctaatttgatatagctttaagtccacctcattcaaaggttgtccacccctaagattctaattagatagtataggacattattacacaaatatgaacataacttgaaatttggacttgggttttcttttctcttctaaagatttttcactatctaaaaaaaattaattatttatttatatatattatttctttttatagtgtgggcatagctatatatataaatttatatagtggagataagaaatatatagtactcaacatgatcatctcttcacacacacagtgtaatccacttgctcaaaaaaataaaaataaaaaa

SEQ ID NO: 220935 - DNA, 2392 bp, Cannabis indica
aacaattttaacagtataatctccctgagcagcagtatcaaggaccaaaaatgccgacgaaaataaaatgtcaacttcaattgttttgctagacctgattcaacttcctaactactacagtgcatccattaggcaatataggcataacctaacatgaatggccagtagtactatgcacaaaaaagtatacaaaattctttattatagagagctgaaagaaaacttgctttgtttcttcaagtccttcaaatatcttcaattcccctccttattaaaccacttcggctgttataaaaaagaaaaatgaacaatccttagcataatataaattaaacataatcaaatacatgggaaagatgattgaaaaggtacctcgtgttgtagttcagtccaggtggtagatacactagttcagaactaccatggaactccgtaagcaaaagagacgaccctctatagctgttacacactaaatgcttagggggaaaatcaaccacagtagcagtcttagtaacaaagttatagcagaaaaaaactctaggcaaagtcgagctacagaccaacatgctagattcgtctttccatgctcctaaaacttgtaaagtccatgagaaatcaaacagctccccctcatgataaatgtcaatggggtcatattttttccattcagtgatttttccttcactgttgtggttcgtaccataccaaattctcaaaactccccagtgtgctttgacgaaacctacatggccacctaaatccaccagacgaaactccataggcgagcatattttgcactttgcatcaattggagtttttatgattgagaatttttcaagcttaacatcaaagacgatgatgtgttcaagtggtgcataccaataaaggaatcctttctcaaaaacaggttcgataaagaattctaagtcatctacgtctataacagaggggtagcggaggactctccaagtatcagatcctaaggtcaaaatactagcgaggttcgcatgtttagtacgttgaagaagaataattttgaaagtctcattacctgattccccgcaaacacccagtccgaaggatgacctaacaattcttagtgaaggactcgaaggtgaaggtggctgtttgaggaaaagaacttcccccttcagtggattgactatgaaagcttgggtagaagatgtccgagagtagcaaagtagtccattacaaaaagaatataaggtgatctcgtctccttccaattcaccaagcgatttgagattaaaaccacataacttcccttcttcatccctccaatatatctgttctctttctccaataaattttgaagaaatataaaaataactatttgtttgaggttgagcgatcggaggaatcggcggagcaatcggaggaactggatcttgagcaggaggtcgaggaatgggaggattctcaatttcttgtggtggagccgagtaaaaagaagacagcggcggaagcgtggaaatagtcgccggagccgagaaagacggcagcgaagaacacgcaacagaggagaaggtgaaagactcggtggaagcagaagtcggtggaatgggaacgaacggagtggttccggagccgatcgtcaaagatccgatggcggcgactgaagaagaagcagtcgtagtaacagtcgccggagcagcgacgacggtggaagaaagaaaaggagatactacggtgtcaatggaagaaacttctggagttgttctggtaggactaggaggtgccatgagagagatgaagattaggaatgaatgaaaattgtgatcgatagactcagagagccaagatttatacaacagagtcatacacaattcacgcataagaaacgatacaacttcttaagagattctggaagttagttagaaaacggtacaaaccggctgtaacggaattctaactaacttcgtagtacatgaccctgcactgccacgtgttgtagatggtgtcagacgccgtcaccgccgtgtggaacagcctcttacacccagatttcccttttgatttctccactgggtccatcgaaatcgaacaagttttcgatggacctgggaaatcctgatttaatggaccatctgctataatcaaacctacagaaaaggttatcaaagttgtcaacaacaacaaatttccacaacccattttatctcctcttttctctctttctatctctgaatctgcttctctctcgatgtctttctacttataaataataataataataataatatagggtccaaagttactaatacctataattttttttctgaatccaaagttattaaaattggttatgtatgaacacttttccaatttttctaaactacccctcatttgaatcagcctctctcttcctctc

SEQ ID NO: 220936 - DNA, 3170 bp, Cannabis indica
tttttgtaatttttttcttttttgtatttttttgtttttttccctactttttatctaaatctttgtttgaaatgatttattttttaatttaattttttttcccaaaatttacattcttaatgtgtatatacacatttgagaagtgtaaagcttaaaagcactccaaaaagtgagtagtgtatagcgggcacaattcaataatgatacttcgtaaaatctaaaataattagttacgtgtcaattttacaatttaactattttttttaaaaaaaatctcaatttaacaacaataataatagtttttaagggcaactctaatggaaaaatttaaatttagtgttaaatcaacactaaaagaataccatttcaacattaattttttttctaattctaacaacaacactaaaaattacactaaaatttattctttattattatattattttattaaattatctcacactataatatgtatataaatataaaatttaattataaacatattattttactgttaaaaaaagaaaaagaaagtttggtgtaatctatagtgtcacactaaaaacagtgagatattataaactctcacataaataagatagcatttagtattctattgaaataattttgtatctaaactcattatttttaaaattttagtgtccctaaaccctgacgaaaaataattggatattcaaaatttatgtatgtaaattatttgagtggattttgtttgttggtaaaaaatgattggtgattattaaaatggaagtagtagtggctagtgggtatagttggggtttaagattaaagctggacaatgacatatttgacaagtgacacaatatttgagggaggaagagacttaactagcgagcggtagaatagaagtgacttatcgaaattcattcacccacattatatttatggtctcgtcctagccttgttttgtatgcaaaaacaacaacaacccactttctctattctattcccattattgtttcagcccaggaaggaaagcttatcttctaaccaacaccaagttgttgttttctgtttttggggtcccttttgaactgggattcctctgcaattctccttattaacaatggcttgtagacttgcagattctatgttcctattcaccgtcagtttttccacattcccattattaccaacaacttttcaatgtctttctttggtttttgtttaaaggtctaaggttttatttgtttattctggttttgatttcagggaccccatcagaagcaaattcgaattcgaagaatggctgctcattattcaccaagtgggtcttttactgtttgtttttctcttgcctattttgcttgttgatgtgtatatacaattgggttcgttaactcgttgcctattttcgttttttggtttgagttatgaattatggagggtttgtatccaaatgaggacttgggttttcagtaattcacttattctgttatttcttttagttgttgttgttctctctggtttctgagtttcttggccaatttggtggttggtttgagttctaatgataaagtaggtctatagcaaatgggaatttgggcattgacttattctgcttagagtcaaactgagtagcttaaaagtgccactcacttttcttcattccaggtttaaaggaggaatcaaatttagtgatgataaagatggaaatttatttttcatacaaagcacccggcttttcatttgaatggatttctttctatagggagtttgacacattctgggtttaaaagtgcactttggtattattgattttaagctgtgatttattcaaatgaagcaccaaacttcttatttaagtgggttttcttatgtatgttgattcacaaattccttaggttggacatttgttttgagtttgtgtgattattctatagagctcttgaataacagttatggtttctataaatcttataaattgttagacttgtatgctgtctctaatagcctcgtagacaaatcgttttcctcattgttagcgccaccctgtgacaatttctttgtgatgatgggcaggcacctctcttttgaaatgggatggtcttctccagaagggaatcaaacgacaacaactttcatattccaagagaaaaactaactttgtacaagctgtggctatcccagctactccatctccattagacactgctgagaacagagaaaaattagcagaaagttatggtttcagacagattggagaaccacttcctaacaatgttactttaaaggatgtcatcgatactcttccaaaagaggtacttcttcttcctgcaatgaatttaacttatatcagctatggaatttacaggatacatcttaagtgagcaggcaaagtaaagtaatgtaatgatatgatatgatatcagttttaaaatattaaatatctgtttaatgtttgtgttttatctttttcatttttttttatctgtaaggtgtttgagattaatgatgcaaaatcctggaagacagtgttaatatctgtcacttcttatgctttggggctcgtaatgattgcaaaatccccatggtatctacttcctctggcttgggcatggacagggacagcagtaactggggtttgttcttaacatttctctgtatttcatagatttctgaaaaggcaacatttctctgtatttcatagatttctgaaaaggcttacttctttctttctttgtttctttgatacatttaatttgtttaaaactaatctattccttgtactttttctcccccaactattagttctttgttataggtcatgattgcgcgcacaagtcattttcaagaaacaaactagtggaagacattgttggaacactagcatttttgccgctgatatacccatatgaaccatggcgctttaagcatgaacggcatcatgcaaaaacaaacatgtgtgttgaactttttctaatgtttttttatcgaaatatttataaattatttttattcattcgcatatgttctgttttagcatcttcactagttatatgatggcaagattttctcttcataagcatgtttcctgacttattaacattgaatactagaatttagtaatttctactgcatggccttgaaagcatattaagcttatggaatctaaacaatatgtatgt

SEQ ID NO: 220937 - DNA, 1751 bp, Cannabis indica
atgtataattttaaaatacaagagtactaagtattattaaatatagggtactcaacttgtataaacacccaattatgtaagataaatagattttactcttaattatgacacttatataattttatctcctaaattagtataataataattattattatttataaattgtctctcaaactatagaataattacaaattttcttcttttgttgcattttatatatttattgatagacttaagtcttacaattaaaatatgagaacctatttaaccgaaactaattataatgaccttaaacattaattctaaaaggttaattaggatttttattcccccaactttgatatataaatgccccctaaacttttaaggtcattaaaaatatccattgaattattgagattgttgaatttaaggacttttatctaattttaataaaacaataacatggataaaagttcaaggggcatgatttagtacatgtcaaggtttgaagggtatgatttggtaaatatcaaagtttggagagtatagtttagtacataaacaatcactgaaataataaaattgaatgaaattagacaaaagttctcaaatctaacaatttcaatagttcattcagggggcatgatttgatacatgttaaagtttagggaatgaaaatcctagttagccattctaaaattacccatactatttatttatgctattctttttcccttgaattcttgaataacaatattatccttagataagtcttacatcatgaacatgtttgcaaaaatgaacaaaattcaatcaaaaggtcaaatttgtaattatttctttagttcaatttttttcccaaaacaatagttcaatttcaaggtgtaaaaaccttgtattataattttgggagtaaacatcctatttatttttatttcaaattggtaatattttgtaattacactcaatttatatgagtgttgataattaaaaaatgtaattagaatcccttgattatcacatatacactttaaatcaagtaattattttgaattacactaaatttcaatatctttattgattttgttttgtgcatagagatttctatacaaaaatgcagagttaattttggaataataagattaaatatgaacaggggctactgagcataagtaaagaagaaggtgtagtgaaggtactaacagaggaagcagagggtgtaaagttcatgttaacagatggattagatgtgtcccatgaagatggaatgatttacttcacagatgcttctcacaagtacaaatttaatgatttcatttgggacattctagaaggtaatcccaatggaagattgctcagttacaatccactcactaaccaaaccaaagtacttcttcatgatctttactttgccaatggagttacactctcacctgatcaaacttgtctcatcttctgcgaaacccttatgtaagtaaaccacccattctattctacttcacaatattatttcagaaatttttttaagtagggacgtcacttttgttcaaacagttggaatatttaggtattcagtaagatttaaatagtgagttgcacgtgtgcctgttttatcctgttgtaaattttatttcggtattttaaattattcaaaatttctcgaaaaagttataaagctccctataattttacgtactcattgattatattatatatgcaggaaaaggtgtagaaaatatcatttgaaaggagagaaaaaaggaagt

SEQ ID NO: 220938 - DNA, 4968 bp, Cannabis indica
tataacatgtgcacttaaaaataaaatacgcatacagaattccatcaaaaacttcattaaaaaaaaaaaaataagtaaatgtccatctaaataaaatgtagttgattaatatcacaaaaaaaaacgctaggtcaaatacaggtctaaaagtaatcttagggaaaccactaaagtttaatgttgtgtatgaagtaattaaaaagttaattactgggtcaaaagtgctcttatagagtatttaagaagtgctattatagcccacttgagctcaagtgattataggagagtgcgtgtgtgtttgaggtcctaagtttgagtcccaagttctataatgtaatatataaatgcttcaaataaaaaaaaaaaaaagtgttcttaataaaaaatttaagggtacgagcaattaaagatatctaaatgtagaattttttttaagaaaaaaagactagttcagataccttattgcctaaacagtttctaaacttcatatcgtatgaactaatgaaggtaataactcatttttaaagattacatgtatgacaagtattaattccaatgttaatacatgaatccatctcttttcttgtataagcctcatccttaattgtgtaagaaactaaggtttctcaacataaagtttactaattcaagaagttgatccatttccttcatctacctattttagctccaattattcttcaaatcaagccaaccaagccaacattgtcaaggaaaattgtgtaacaactcaactctagtatgtggaagatgagtaatcaactaaaaccaatccaattcaattatgataattggattggattaaatttaaataattagattttaattaaattaaatggcgaataacgttgttaaaatctagttaaaaatgacacaactcaattatatatacaatatacattaaaagatatatacttatatattgaaaagtgttacatatctatttatttatttataatccattaatattggaggtcaattactttgtactatgctcttccccacttaattatataaaacctaaaaaatgcatcttattattagtttttatgttgaattttgttggagacagtctaaatgttgccgacttttttatgcattaaaatcattttttgaagctttcgtttctaggtttctttttagttttctagaagcttttcagatatgtttccttgttgttggtttgagtttttacttttttctttaaaaaaatatataaataataagcgtttatataaaaggataaaaggtttgagtttttactctcataggattgctaccttttttcttgttgaatgaaaatttattttcttctttatttttttttcttattgaaaactcctttttaatcaaaaggaaaaaaaattgttgctgcctacttcaaagtgtgggtagtaaaaaaaaattctctaaatttggtattgttatattttttgggtttggatttttttattattattattttatttcattgtaagaggatcatgctacaccttattctcttgtatatttagctttttttcttgagccacttggtagccgtgattgtctaattgtttggaataaggttctcttcaatgggagaggtaaaagttgagctataattagtacaaaaagtgattttgtgacagttttacattaatttttactattgtgttttaatgtataattgtaaatctacaaaattgaatatgtcatttaatgttcatttaataatttattaaaaaatataaattaatactaataatgtaaagataaatataaaatttaataataataataatacaacaaattatttaatttaaaagaacttgttaactaaaattaataaaaaatattaaaaatagcaaaatgataaatataaaactatattatttattataatgcaaattgttttatgtgacatatttacatcataattttttctttatctttattttgtaccttataatattaatgaactttattaaataaaaattataatattgataaatttatgtagcatttaacttatatgattagtaatatataatttttatgtaaatcattttaagaaaaaaataataatgtatatattaaaattcactaactaaattaaaatctagataaaaataagtagggtgaattgaattgtagaatgattttcgaaatccaattggaacaaattaggacaaaaatattagattgtaatcattgtatatgatactcttcatatctcgttacatgaagaattgagagaagacattcgaaattccaattaatccaccattaatattacttaatcaatcacttttcataacacagtgtgtaataatcaatccacttactttcataataaactgtcccaagaattttgtgcgtgtgcaccaatttttcatctttcttttatctccaattcttcactatcatattctaatactactctattccagttccaggtatacctctctcactcactctatttttgtgacaaaatgtcattttagctttttacattttgattgattgtgagatgagacacaagtttttctatgattagtttttcaatgtaaagtctttgaaatagtgtttgtaactttatcataatggtgagttctgttgttaacattactaggtagattgggatgtaatatgtttttcaacttaaatacacaaatatagtagattaaaacaatgaatttgagtttgattcaatttcttttcttatgaaaactagaaagtatatgctttttttttatgtaaaatgtaaagacaatgttttagcattgtagtgaatatttccattccgatagattgaaacaattttatctttaattatttgatttgatgatacgtgttggttttagtgcttacaaactgtttgatataattcctcactgagttcttaaggtgttattggtgagttctctttctctttctctttctctttctctttaccctcttttcctttccacactcaaatctgattacaacaaacaaacaccaaacacccaatttctttgttgataaataaattactttcacaaacaaactaatgacacatgacaccgtgcaggaatgtttttgtattccttctccataaaatatattagaataattaaaagaaaatacatttaacaaacaaaaacataataacataaacaataataggaaaattacggttcccattttccagtcgcaatgtccagcgcaagccaccatcacctccttcgcctggccctttcatgtcgaaaaatcacggctcaagtgacgagcccttcctcctcttcgatcgtagctatggcttcctccaccgagcaggagttcttgtcccactaccgcgccaagctcaaccgattccctcgttcacacaacttctgggacgctaagatcgcctcccgcgttggtgagaagctagcctttcgtcttaaagaaatcggcgtcaccgccgtacagatcgaccttcgcgaggaactttctcgccccgcccactaccgcctcatgatttcgcccttattcgattcagtccgccgtgctggtgtcgccgttgatggagccgagaatattggggtcggcggcgcacatatttgtattgattctgattaattaacagtggtgataataattttttcaaattcaagaattttccttttattttttgttaatgaagttattttttctttcattcaattattattaatgaaggaatatacaatcatacaaaacatacatgtttgtatatatgccactaatttcctctaataatttctccagcatagatagtcattttcatggtttcaatttcaagtgattttacctaaagaaaaagaacaacaaccatctttactcgacaaacaaaacaaccttttcgaactataaagatgtcgtttttggttaaaagaaaaacacgtcgtttagtggctaaggcagtccaatgcaaattccaatacatcttcacttcacaacagcaaataaacactcaattaaatctttcttggtaggttcttctaattctccgggatgtggtcgcagcaactgttgccaacaccaactccgtcactgtttcctctttttaacccccaaaatgcccccttctctcagcatgttcttaaggtccaaaaggagggaagagtgagggcaatttcggcagatgaaatttgcccgaatgcggcgcggcggaagagggaaccagattggagaggagggttcagtttaggggtagaccttggaatgtctcgcaccggagttgcgctcagcaaaggtttctccgttcgtcctctcactgtaattacctttccaaattattccatgtcttttttttttttccatcattattgtttgtttaaatgatatattgtatttgttaaggtattgatattggtgtctcattttcactaattggataggttttgaaattgaggggagataaacttgagatgcagcttcttgagattgcacaaaagcaggtagaattagttctttgaaaactaaaatctagaaagtagtattttgtaatctttttgctgagaaaaagaaaaaaaatgtaggaagctgatgaattcataattgggcttccgaaatccagtgatggcaaggagacgccacagtcgaacaaagttcggagtgttgcggggaggcttgctgttcgagctgcttacaggttattcactttcattctttttctcttagcttacatttagaaggttttgtgtttatggagctaattcacttgggttgagaagcatattttgctatactgatgagtctcaactgtctgaacttaaattctcttttcgaaatgaaggggatggagagtgtacctgctggatgagcatgggactacacaagaagctgttgacagaatgataaacatgtaatctcattctttacttttagaaatcaaaagtttaaactgtcatttgaacttgtcaagtaaaatagcttaaactatttataggggcctcaccgagt

SEQ ID NO: 220939 - DNA, 2905 bp, Cannabis indica
ttttttaatgcaattaattaattaaactatctttatgtaacaagtgccaagtcctgacaatgagagatgtcaatattaacatataaaaagtgaacttattggtcaattcatgtttatcaacttaaaatgtctttgtctaattataatattccattatatatgtctctttaaatgaataaataaataaaagcagcataatttttaagaaactttatttttcttttttgaaaaataataagcaaataaaatgaagaaaatttttggggtgttttaatacttatttgacaagaaaaaaaaaaggaacgtggtcattaattatttgaattctactcaattttatcaatattataagtcaacctatataaacactcaaattaattatttgaatacttacaattcaaaatatatatattgaaaaaaaaattcaagcctccactaattaattttcaatttataacttctgtactaacaaactaattaattttcgattataattttaatgtcaacaatatttttgatttcttgtctataactttttttagatattttttgcttaacagttaaataatcactaccacaaaatacaaatttgtaaaaagtcaaatccttgtgaatcgttaggactttaattataattttttttaaaaggtaaattaggactttatactattattatttactaatgaaagatattggtttggcatgatttgcagtaagaaattaaatatataaatataataattttcatctgtgttggctttataaactataggtatattattcttcttattaatctgttgttgacttaacactccctttaattattggttggttaattttcacctttaaatttttgactattgactatttttactactacttttgataattaatttacttttattattcttatgtaaaacaccattgttatttgtggttattctaatttccaaattttttccttgtttaattttcgttttggttaattattagcatacaaacatgagaaaagagagcatggattttaaaaaataaaaaataaagcaagaacaaagtattaaaatataaatcttcaatctattaacaaaaaaaatatatattatactattaaatttattgtttcacattcatttatttatgagattttagaatataacatactagatatatcatgtataattcatgtgactatataataatattcttatacttcaaatttaccaaaactcctcttgagagcgattatataggcttctttaaaaagtaagcctattatagcagtgtcatttttaatgagatgaaaattttcgggaactaaacattaccccttaaccttctatatgaagctctattcccgttgataacctaataatcaaggaggaatactgaggaatgaattccctatagtcggcttgtggtcttttaattgtctaagactgaaatgatggagaagagatcaacaccacatgatctcttttctagtttgtgaaaaaatatatatattattatattaattttgaataagattttttatatcaaaattatttgctaatatagttaaatttttttaatgattagattttttaattatattagcaatataaaaaatactaatattcttgttgaaataacatgtataacatgtgatagctagtgaattatgatacaattttgcatatataatttatttgagtaataagttaaatgcaatccaatatcattaattaattgaccatataatttttagctctaaaaatgaaatttaatcctatgatcataattagtggagtgaatgctaatttttatatacttatatcatgaataaggcaataatactattactaatcaaccttgagtagctagccaatataaatttggggatttgacttcctttcctttagtaattaatttaatattttaaaatttagttagatagttttctcttgatatttatgttgtaataatatttaaatcttctaattttgcctagtcaagagccaacctaatagtcttgactaataaacccattagccatagctacttcatgtaccaactatttatgtaaaaaagttttcttcttcattgaaatttgcaattcgaattgcatagttgtacggccgttcagtcaatctttgtgtcaatataaaataataatatgtattaaaaaattaactcattataattaatatatatttaagaaaattacttattaaacatgtaatttttatttttattttttgaaataaaatattagcttttattaaattgaaaaattagccataagataatggcaaccaactcaagtgaaagaaaaccctcttaaatagtacgatttcggaaaaaaaataagaatcacaagtaatactgtgtaaattttaataaagtttaattatgtaaaatttatgtcttcttctaaagttctattcacaaggaataattgtaaagatgtaaaacaaaattattgtatggataatatataataatattttatatatgaaaaaaaaatgtttgaattagtttaataatttcctggttctttctcattattaaaaaattaaattaaattgactattaattctcaatcatcaaaattaaattgatctcctaactattgctttctagattatgtcatgtgtaatttgattttgatatctaatattgtaatagtttcctaacactcatgtcattttcaccatgaattaattataaaattgtaacttgtaaattaagttttaaaggtctttttaatttgttaatcttttgttttcaaagtttggtataataataataatccttaaaaagaataataattattataacaatagaaatccttttttgatttttttaaaaaaaaacggctaattagtaattctcccttccctcccccccccgcccccgtaactta

SEQ ID NO: 220940 - DNA, 1409 bp, Cannabis indica
ctaacttgtgtgacaagttattttacaaaaagatattaaaatttttaaattgacttttaagatcacatatcatttaactaagatagctaaattagaatttctgaaattggacaaatgagtaaaaagtcatgcaggttttagttcaaaaaatataaattttgccaatgtaagccatctggaattccgattggaatccaaaattcttgttgtaaccaatcctgaattctgattcccattcggtattcttgatcactgcagaattccttttaaaatgcgtgttaacggctataattggctacagttcacccctaacactatataaactccatttttactaaaacaattcaagttggttgagaatttatttcatatacctaacctattcaagtgattttaatgagctcccaagtttaaaatctaataaacacttttcagacactttgagctaaaacttgtgtttaattcttcaagtgtgcttgctaatcactctaggctttctattgtttcatcatacatctagagtgagtatgcttgtaatttcaagcatattaccaaattgtgattgatgtgaggttggcattggtattgtaaacaacctagttagagtgagattgtcactacaacaatctcaaaaagaggttgattgtaatagcctgtcacacaggggcaccacgtgtgtgcgcttttacaaattaatttatagttaatctattaatttagaaaaagtgtggtgtaatcaaaactttcagattaaacaaaaaatataactttatacaaatacaactaactacagggatcccctgtccataaacttttacaactagattcaaaatcggtttacaaagaaatagaaattaagcactgtaagactgaagaagagtaggtagatattttcacaaatgcgctaccaagaggaaagtttaagctactacgagacatgatcggagttaccgaaatgtgtaccgaggaggagtattagaatttgctacatatttgtacacaatttagtatagaaatttctatacacttgtagagaaaattatctaagaacttaagcgctcgtttaatacgccgtattgtattatattgtatggccttgtgttggattatgttgtattgtattgcattagtattatttaatacaatactatatttgacattaacttgtatttatagattgtgtaaagtcataatatattttcaatacactcgatcccaacacgaactacaggtttgggtctaggtccgtgttagagtttggggctcgggtctgggtctgggtctgagtccgaatctgtggtccagttccaggtctcggtttgggttccgaatctcgagtccaggtccgagtcctgatttgggatcgggtctaggtctcgggtctctagtctgggttcgggtccgggtcc

SEQ ID NO: 220941 - DNA, 2801 bp, Cannabis indica
caatgcaggtctggccagccaagtacagtagccaagtgtaggcctagcctaccaaggctagctcccatacataggaatggtaagtgaggctctacaattctacacgggtttgacataccttcaccataacctctcacacggtagagccagctagcccctatctctcaagaatctacagcctccccaaggagggttagtcagtccagtccccatagcaacagatccttctgtgcaagcacaattggaagatatatacaaggctagaagacccactaactaaccttgcccttttctaagttcaacattcaagtatggaagatgtataccgggcaagaaaacccactggctcacatgaaatactttgagatgcaactcgatctccagaagtttacttgtgatgtgcgatgccgcatattcccacccatattttttgagatggctcatgaatggtacttaaaactcaccccaagaagatttaactcttggcctaagttctcacaagaattctacacataattctcgtcctcaagacttgtacaatcgcagctaaaagaccttgtcgaagtcaaacaacaaaaaggggaaccttaaaggcttacattcgaaggcttatgtctgaggctaccaacactacaagaatgccaccttttgccagtgctattgagtaattgcactggaaaatgtcaaccaatgtcggcgcaagtcaacaaatgcgccggcaaaggaagtaaacaatttttcccacctcaaccttttaccggcgctgaatatcgccagcaatagccaatatagccagcgaagtacacgaattgcaccggcaaaagttggcaccaaactgccaaaaggtgggaattgttggcggttcgagcaaacatttttcggcgagcttaaatgcgccggcaaaagtttgaaaaaaggcgatcaatttccctcacagtgaaaaagcgtgcgcgtaaaagtaggtggggacttttgacggcgcatataattgcgccagcaaaagtggcaaccattggaccattggacacgttgcatcagggtttggcaaccattggacaacttcccgtccaaaggaaaacgtgtgtgaaaattttgtggaaaacttacatgcgtcgtcaaacgaacgtcccaacttaaatgaaacgcatcgtttcgtgcatttttattcaggatggacttttgccggcgcacctaattgcgtcagcaaaagtcgaaagtaaataaaaccagggacgaacccttcttccccattttcctcttctctttctctctctctgtgcattttgtaaacccaccgccggcagcccccttttttctcctccaaactccattttcaccatcccaaaatcttattttcactaccaaatcattgtttctctctttttcttcttttttttttctaaaaaaatatttgtaccggtactccgacgaggacgtgccgccgcacctccgacagtcgctgcctgaaccgtcagccgccagccgccagccgccagccgccgcacctccgctccggtagcctatattttctctattttagttttatttaatttattttttatttgtgtatatataataattttagtttatttgtgtataaaattgtgtttagtttttttagtttatatatgtgtttaaatttatatagttttatgtgtatttttataaatttgtgtgtatatgtgtatacaaatgtgtataatagtttatatatgtgtatttgtatatatatatgtgtatacgtataaatatgtggtatatgtatatgtatatgtaaaagtatatatgtatatgtaattgtatgtaaaagtatatttgtgcgtatatatatgtatatatatgtgtatatgtaaatatatatattacatatatataatatatacacatagtacaatacttttaattttatttagttaatatttatttttttgctaaataggtttttggtattcctttgttcggtgtttggcaaaaatcacttatcgttatattggaaggttagtatgcttatgttatattatttataatattaaaaaaaaaaagtttacttgaaatgcatattagtagagtttgaatatcttatatattcatccatagtaaagtaggttttgtgaaaaatatactgcggtcggatgggtggccaaaattaatatgtatgtaaattattttggtattgtgtttgtgatttttgtgtaggtattataaatttgggaatgatcaattgtaaagtgttatactgtcaaattttcagtatcataacattttcaatttgataatagtttttatttaaaaactaattagaacatcattaatatcatagatatgataataggtataatttaatatgcatgtaaactgttttggtattgtgtttgtgattttttttgtaggtgttataaatttgggaatgctcaattttaaagtgttatgctctcgaattttcggtagcataacattttaaatttgataataaatattagtaataggttatttttgaaaaataattacaacatcactaagtaaatttaaattaaaaattgataatttaattagttaagacttcaattgtaacacaaattcatttaaataacttggtaattttaaaatgtcacaaatttacttattactaaataataattagaaactttattaagttaaaaaatgataaattaaaaacttattaattaatttgaaaattttcatttatattagttataatgttacataaattgttaattgaaagaaattagataattggaaaaataattaaagttgtggcaaaaaaactatgtttatcacta

SEQ ID NO: 220942 - DNA, 1409 bp, Cannabis indica
cggggttttaggtctatttcttctctctctctctctctctctctctctctctcttgactccttgcagctggtgttggtgctggagctatgacaaaaacaagaggtagagggcgtgggaaggtgaaattgactgagatttcaaagaagaagggacctaatttagcttctgatgctcgaaaaactaaatccatggatgcggttttaggaatcgctcctattgaattctcgaatgtagaagatgaagactctgcagaagataatggagagactcctcctagatttcaagaacctgctcctctctcccctaagtcatctcttcgcccaattgtacagcaggaggacattcagaagaattttgctcatttcttggaggcatccaagcattgctctgctaagatatctcaaggtatggatgctaatcccctaaaccgagatctggttctgtcatccaaagtttatttttgagttcttcgattaataaggtgaagataacgaaagatgacattcaagatgaagtagatttctagaagccctcgatagtgtgttatgtgttaggagccaaccctcctcttactgtgttagtaggctttgtgagaggaatgtgggctgataagattgaaagggtaggtttgctatcttatggcatatacataattcgttttcattcagttgaagatagggactctgttcttcaaggaggatacattttctttaatcgtaggccagttgtcatgaaacctttgggagcccttaatcaatgtgaagaaagaagacattagggtggtaccaatttgggttcatcttgatgacttagacctaaaatattgggaggaaaagtcattgttcaagataattgggcacgttggcaaaccagttatggttgatgaagctactaaactaagagaaaaactgagttttcctagggtcctaattgaagtggccattaaacaggatttgcctgagcttatagagttagaggatgaaaatgggaataatacaacaatggctctaacatatgaatggaagcctatcatttgtgctaactgtaatggaattgggcattctacaagagattgcaggaaaagagagaccaaaaaaaaacagcaatattgaatttcgaaaaactcagggaagcagcatgctgggttaaaagagagtgagaaagcaggaaagtgttgatactgaaggggttcctaacctgtcattaaaggttggaaaacaagataaggaatggaaaatgttgcatcaactaccaacaactcctttaaaatcctgggggaaacagagaaaaacaatagtgtagaagaaatagagatacatggtaatgaggatcatgggaagaaagggaagcaatgggaagcagatgacacaggagaggggggaggtccctctcataataatggataaga

SEQ ID NO: 220943 - DNA, 1197 bp, Cannabis indica
taagtatgagtatggttgggtggtgcagaactcttttggtcagattattatggcttggatagtaagcaggatatgttcttgctgaagctatcgggaattaaggaggtgttgagttgattgaaagaaacaaggtagcatgatgtggtggtcgagtcgaatagtttggtcacgatccaagctatttgaagttcgttaaacacgacttctatttttgggttctacatttcagagtgtagacgaattttttctagtttgaataatgtattttttatttttatcaaaggatctgctaatcgtgttgctctttatttggctagagtttcatagttaaatgatggttgtaactatccagattttatgtttccaagtaatttacataataataaataacatatatttttatatttattttgtgtacagagaatgccatgagtatgaaaattcataaatctcaagaaagacaaactttgcatctcacagctaagtgagcttttagaattaaaaaggacggtgcaatagcagaagaaaacttgaagctatgcaccgtcccgagtcgcttgagctcatgatgcttgaagatcatatggaatgaccttcattgattgcatcaggagtatatgcactattcttttatttttttgagttgtgtaatttttttttttttttgttattattttgttgtgattgttatttgttatttgtagtttagtagtttccatacatgtttaagaagatgttttcacgagaaaaaaaaaatacagaaaatcatatgagcatttataaaaatatagagttccaagttagtaattggataaaacacaatgggatctgtcgatttgtgcattttctatttttgttttacatttgtataatatttttaatgaattgataagagtaattggttactgccacattactttttaaaataactggttaccaatttcgaagtagttatttttttttaaaaaaaataatgaggtagtaattgattacgatcatatcactaataaattaatagattaatagtagtaatgtcactacaactaatttgatactttttttttttttttgtacaaagtgactaaaatcaccggtgattaatagtagtaatgtcactacaactaatttgatactttgattaaacaaatcataaatatttatatttataaatcatattttacatggtatactaatttt

SEQ ID NO: 220944 - DNA, 1079 bp, Cannabis indica
ccctcaagctcctggaacatctttacgtgctcttcctgctctgccagctacagctggtgtggccttgttggcttcagaactaggaaccccatatcctcctagaatggctccgccacctgtggacaaacatgttgcaacaattgggtggaccccatctaactggaagtaccagaaacacatagaagagatacttaaaggaagtggaagaagggaaaatgtgtgcactgttatagtctcccgtgcagtgtctgaggaaaatgaatctcccaatcaccttcacagaagatgacgataaaaatgtacgcttccccaccaacgaccccttggtaatcgatgcacagattaccaaaaagagagtctccaagattctagctgacaatggaagctccgttaatgttttgttcaagtttgctttccaagtgattgaactcactgaagcagatcgaactccatgcccagtcctgttacaaggctttaatggtgatgccttaatgcccatgggaaaaatccaactaccaatcaccctcaaaggagacaacaaggctagtgcatttaaacactcaagcttcatgataattgaatgtcccacagcctacaatgccacattgggccagcctactctagtggactttggtgctgtaacctccatccgacacatatgtttgaagttcccatgtgatagtgggtgcataggcaccattaagggaaaccagtgaagtgagagaaactgttataatgtatcaactcgagtcgtgtacatggttggggaagcgcctgaagcacttaggttagagaacccaatggacacagaaactgtaccagagggatacaaggacgattaagatccaagagttagattttagtggaatttagaactgcggaagaaattgaggaagtgagcatcttcaaagaagaacctacaaaaacaatcaggctaggaaagcacctccccccgaccataaaagaagacgtaatcaacacagttaaggaaaaccaagacatacaagcccgcagtcattctgacatgactagaattgatcggaatactattttccatgccttgaacatccatgaagatg

SEQ ID NO: 220945 - DNA, 2943 bp, Cannabis indica
tgtgtcaaatttgatacacattttagatcactgttagagttaactttttataaaatgttctaaaaaattgcaatacaccacatttatagctttccattggggatgctcttagctttttaatacactttatttttaggtaaatatcatgttggactccgtattttgtaaaagctactaattagacattttattttattaaatgataaattagacctcgtattttttaaaatgatacaaaatatatagcactatcagctgattttttattaaaataaaatttaataataacccgatctagatattttatgacaagacaattggctacaatttttgtattttttcgtgctaagaattatcttcaagttgattatatagaaaaaattattaaaaattgagtccagggtcccaatttatacaattttaaaaaatgcatgcttcattttgtcatttgaaaaaaataaagattcaattaataacttttgtaaaatatatgatctaaaatgaaattagtcatttgttttttgatatatttttttataatataagtaaaattataagctttcaaaaataaaacaaaataaaataaagcaaaattatgacattaattatgaactatataaaaataaaatcacatttaaatatactacattataatatatgttgagaaatattgctattaggcacaacagatcctaacaccattacaagatgttgtataataaatatttaatatattatataatagtttttaaataaaatacataggaaattttgatagtatactctcctaaagaagttttatttcttatctttttagaatcgagaaactttttaaaaaaattttataattgtgtacattgtagctatttagaattatatatgaattttaaattttttttagataagttgtagtactgaagaaaataaatttcaaacaattacttaccacacgtaaagaaaaataattgcatgtacaacaaaatatttaaattttgttttctttaactttctaaaaatttacagtgtcctaaataattgtagaaatcttttactataggaccttcaaaaaagaccttataagtgaaggtaatccacaacgtataaaaaagtgacacgtggtagtttttttgtgtttgagaagtaagtgattattttttaattctaaaatacttttcgtttcttgcccttcactagaagattgggacgaagtcttgatacccacctcctttccgttgtgcctcatctccatgactgtatatgtatctttccacattctattccttatatttgattttaatctcttaatttgttagtgctacagatgacgatgattgtgtttatttactcatctttagtttatggagtttgatatcattggtgtaggatttttattccctgactgaccctacacatagcacaaaactaatcaaaagctaaggtcaattaagacctttctcacccagtcaaagcacctctgttgactccctgataaagaacctaaacgacagcctctagttatcaactacaggttgttttcaatttaaattagtaaccctaaaagcatcagacatatatatacatctttatcttcgcaaacatataaacaacaacccaaattcaatgtttaaaccctagctgtgagccctttcagcaacagtcttcttcttcgttgttcttctctgaagaacacgaagcacagctgcaacataaacccagaaacaacgcagcccagattaaagctaaaccccaaaatcgagacactcttctttgtggttcttctctgaagaacacgaagaacacaacaatgaaacccagaaaaacgagagatgaaaacaccttaaaccgattcaatacccaacccagaaatcacataaacataatatagaaattgcagaaaaataaaggaagagaatacaccagatttatagaggttccccaaaaaacaattgttgggtacatcctcttgagctcgcctcagatagctcgattccactataaagatcaaagagttacaattgttgattccaaattacaggtacaatctggtaatactttatgtttacaaattttgtttctctcttctctcactgtttttctcactatgtttaatctctaatcatctatctttctttgtttctccatgaatcaatctccctggtttggtgttgacatccgagctctaaccctggctccaaaactcactcaaagtaagtctctttcaactctccacttttctggatctgatcatgtgattatcctggtcttgatctgatctgctctctctttttgttgctctgatctctccatactgatctgatgatatttatatgtgttatagtggaatgcagtaaaaacatgagagttagttacaaagtggttaaatactttgtagctaacttaagtgttctgcctaggtatattagaggtcgaaggccacccaggaatttatttttactgtcttgtaactctctttgtaataaactagtttttacagtgtacagggaatgaagggagtttatttcaacaattggtatgcatattattattagagtttttggcggttaaacccttcaaattatcatttcacttgcacttaactctttcaagttaaatttggcgataaaactttccaaaccactcaactaatagcatatttaaggtgtcattcagttaactgtcaccataaactgcttatgtacgtgacatgtttatattggtacacctaatattatatttaaaaattatttttaaattaaataaaattataaaaataaaaaatataatatttaaaaataaaaaatattataaattttgaaataattttttttaaataaaatatttgatagttagaatttgtttgatcaggttttactattaaacatattgacttactatgggggttttaatggtgaaattattcttacgcttaattttttttttttt

SEQ ID NO: 220946 - DNA, 2414 bp, Cannabis indica
gtactttttctccaccagaggacacgtggtaggtggtataaagaggtgaaggaggttggaaagccttcttctgacaatgtctgcaactcagggcagttggtaatgtaaagtgtttgcaaggaggtgagttgtgaaagtccatttttgtccaagcctcttagttttgcaaaataacagataccgagatgggtaatagtgggaggcagtagccctttctctggaaatgattccatatcttcttcattaccatatccatcaataataagagtggtaagatggggtaatgttttccaattccattccatcctcaaaagtacaaaataggttatacaaagacaaggcaaactaacaggcaaaccaccttcagggaaagtctctatcaatggacaatttctcatttccaaacgctccaaagctgagaaggaagtcatcttctctggcaaccacttcaatttaggacaattaataatctcaaactcacttaacttgggagcaataagtccgccatttgggaaagatacaaaactaccacagttcctgatacctaaatatgttagttcctcaagagattgcccatcagacactaagatagctttaaagtagtggctgtttacaatttcaagatatttgagattgggaaataaatccagatggaatgatttgaaggatgatccacaattttctaacctaagagactgaagaggagggtaatggtagagtggagtgagagtggtaggcagacatcctgtgaaagtagaagtgcaacaaggatcacttggctttactgcctcgtacaatgactctgaattctccaaattcttaataatcatttctgtgacatgtggagatcttgggagacttaataagggacacaccttgtcacctccaatttcaatacttattaatgaaggaaggaagcgaggcaaatctccgatgagcttaggacaatcattgatccgaagtgttttgagcttctcatatgttgttgcctcttcagtttccattgaatgccattggtcccatgatgacatgtgcaaaaagcttaaactttccaatgatggaaatggctttcccacataactattcccgtaaaactcagcacccactgtcactacagaatcgaatcttgagatggaaagatgcgttaacagaggaagtttcccaaagggaggcaaataggagcaatgcttacacccattaagagttacttgagtaatgtttctaaacgaatcattcccaacccaatttggaaatttttcgccagggtagttaaaaattgcaagttgcttcaacactgtgttaggtgaaagcatttcaagcacaacctccccttgttttcgatcaacaacaacaccattaactccagtccatgccaaacacaatttttcaagttgctttttctccattacattgacttgattcgatgcttttgtaatgttgaccacattttctaacttcttaatggaaagttctccatatagactttgaagttctgccaactcttctattttagcgccgctatccttccccacaacaaaagttgtcaacattttgagatccttcaatttacttatttgacttggcatctctactaggctatttccactgataataagatgtctcaaattaatgagatgatacatacctttgggcagagctttaagttggtgacaattttccaatttcagtgtttgtaaattgtataatacagttatagattcaggcaacgtcataatcttggtgcaagaaagatctaaatagcgaagatgtttcagctcaccaattgaatcagataactcagccatatgaagaccacgaaaagatagaactcttaaacatttcaacatagaaagtagattctgcacttcttccttagaaatactgattccagaatatcttgaacttaataaaaacgttcgcaaacgtgtagctccaaaatcatggctagctatcttattatcagtataaagttccatgacacatccaaggtgacgtgccttcttctcaagcctatcaatgttgtcattttgctccaacaaacaactgtattttccagaaatagttctagccaaatcaactataagatcatgcatgacaaaatatgtaccactccaggtttctattttcacaaaaaatgacatagatactaaatcatcaaaatgctcaccaccaacttcttccattcttctattccctgcaggatccattacaagattttcagccatccataataagaccaactcctctctttgaaattgataaccttttgggaatattgaacaaaaagcgaagcaacccttcaagtgtggaggaagatagtaataactcacttctaaagcagcaggcagaaccttgctccttttatctgagagctcccaaatagtattctttgctatttgtacccatcgctcagg

SEQ ID NO: 220947 - DNA, 3706 bp, Cannabis indica
tacctcttgacccgttgccacatcaaccctcacatggaccccatcaatatcttccaaagtcgttcttctcctcttcgtatcaagaaccaaaagacaagcctcctcattgatatcattagacatttccttgttcgtagcaactggtaaaatatcttcaacagttataggatccccattaacatcttttgataagcctatccctacctcacgttgacccgaagtttcctgcactatcatcagacctgaccccagcacaccacgattcccctcaaccattgccctcgtcgaccgagccacctcaccacgagccgtggtttttgcttcatattcatcatccatggcagcattaaacttcttaagccatttagctcaaatcatgtggtttctgcgtataggtctcactcgcatccattccccatatgacttgattagctgatcctctccaacctcgaaccgccgtggacaaaagttttcagaatgccccataattccacaaataaagcagaaagtggggagatgttcatacttaaagatagtccagaactcgatcccagcagtattgtgaagcttcatatgtctctttaatggcttcataacattcaaagtcacacgaacacggagataatcctgccataaacccatgaaattcctttcatccgcttaaacaaacttcccaatatagtttgcgacatccttaacaaccgtagaagttttaaaccccaatcgaaggtcatgtaattgcacccacatatcaaattcattcaaggtaaccagtcttggatcctcccctcgctgcaaccttttgaaaattaacaagaacctattgaaagtccaaggacttcgattcatcatactttggatgtcaatctcatgataaaattgaaagagatagcgattagtatctaattccttgacaagcatccccttccccggctgccacaatgaagccatcatatgttgcatagcctcaaagtcaatttgtctttcaatcaggaatcttccaaccagacaccacctgtcatcatagtcattaccatctgtagcaccaacataataagacaagataacctcctcctcctcctcaataggaatatgcacccctgtactgtcttctataatcgtaccacaaccagcgaaaattttgaaagcaacaaagaaaacgaaacccaacaaaaaaccaaactagaaaaaactaagaaccatgtcaaaagacaagactaaagggaaaacttaattattttcaacacacaaaactaatacttctagccccataagaatactaattggaaaaacaataaagtaataaaaaatattaaataagacaaaaaactaaaaccaataaattaaacagaaaactaaaaatcaaactaataataatgaattaaaacccttcaagaataaatgaagtgatcagaatcgattaaggacatgaaaccttcatcctcatattaaaaccatcattgaaaactgcttaacaatggccgtgaacgaaacggactcaactcgccggactcgctagactcaactcgccgaactcgacacacctcaactcgccaggactcaactcgcgggactcaccaggtctcaactcgcctggactcagaatgcctggatctcgactggcctggtctcgactccctggactcgcctcactggacttgattgacctgatctcaactcgccagactcgcgtagactcgacgctcctggtaccgcagaagcttctcgacttcaaggactcaactcgacactcctggtaccgcaaacacttttaatttattaaatgtggtgtatttatttttttcttttttctctcaatactgggatagaagctatagatttttttgctatactttctcaataaatatataaatcggtatgttttttcatttttttttttaaaatatttgcattttttataatctataataaaaagaaatattctttttataaaataatagagctgtaaaatgtaaaaatagacctcagtaaagcttatgacacggtggattggggatttatggaggagttgctagttggattaaactttccttccaagtttgtcaattggataatgatgtgtttaaagggtacttcatatacgatcatgttgaatggtcggttgcatggtaaatttcaggggaagaaagggcttcggcaaggggatttgatgtcccctctcttgtcttttctcataatggagtatctttctagacgtctaaagaaggaaactaccaagactatctttaggttccatcctatgtgcaaaggtcttaatttggtgagcctctgctttgcggatgatctaatcctgttcagcaagggttctcctatgggtgttcatcatcttaagattgctttggaaagcttctctgaggtaacgggtttatttccaaataaatataaatctcttgtttactttggaggagtttccacaggtgataaaatggtgatcttggaagatttgcacatgggagaaggaacattcccgctcaaatatcttggggttcctttaagaccaacaaaatggagacgagaagactgtgagactatcattaagaaggttaaattgaggctggcaacttgggcaacgaggtatttgtcttatgcagggcgtgttcagcttattcattcgattttgtttgggcttcgcaactactggatgagtatttttatccttcctcaaagtgtaattaaagaggttgagaaactttgtagaggattcttatggggcttcaaaggagagaaaagtaaaatccatttggcattttgggatttagtttgtttgcctaagccttttggaggtctaggcttcaaaaatgggccaacctggaatagatctatacttggcaaattcatttaagcaattatggacaagcatgatatcctttgggtcaaatgggttaataatatctatatgaaaggagttgatttttgggagtatgaattgaagggggatgtaagttggtattggaggaaaatgtgccacttgaggaagagatatactaggttgaatgttttagctgctgtcaagaaggggaaatttatagcagctcggctatacatggggacaattcaacgtagcatagacaacttctacaagtcagtttggtgcaatgtttcgttgcccaagcaccgattcataatgtggcaggtggttcatggtaatttactaactaaagacaactttgctaaatttcatattgctcttgaatcttgcatctgtccggtgtgtggcatggaagaagaaagccatagccatattttcttcaattgcaggttgtctaaagaggtgttacaactggtttttagctggtgtggggctgaactatggccttcggacttcacaagatggaaggtttggctggccaactcgaaagcaagtgtgaggattcacctagctgctgccactgtgtatatggtgtggaaaaataggaactcttgtgtggataataattgttgttataccaagttgagaattgtaaatagtataaaagaaagtcaagtatagattgtatagtttaaagaataggaggaagattcatgttgaaaaagccttggttatgaggcttattgagtaggttcggctgggtttttttgagctggttttgagcggagccggttggttgtggcttgggtttgtattggttctgttttgattattgaattctcttctttagtcaaaaaaaaaaattgataaatatga

SEQ ID NO: 220948 - DNA, 2506 bp, Cannabis indica
tcttttgtcaaaatagctaaagtcctccattgttggttccccttgaacatattccatctacatcgcataaaatcctattattatgcgataactgtttggagttagttggaagggagagacatcgtaatgtctgaggatggccttcactaaagggtaaaaaggcagcatcacccgacattgctggataggaatcaagaccactacatcttgtgtagggatgatcgcaggatttgtgaagggaaagtgaggttgctgggatgccgatggtcttaaggtccctatgcaaactaaattcaaccgtaaaaatgtatggaggtctaatttcgtcaattgcaagaccatatcctcgcatgaaaatgctttgtttagttgggtattattgactgaatctgtttcgcttccttcaccatccccctcttccttaaaatcacaatcaggtacctcgaagtcctctcccatttctttaacctcagtgtcaggggcttgtctcgagtgaatgagatagtcctgggctaacaccgtggacttagtatcgcgtatttcaaccgtcacgggatcaacgagttctcaaagcatcctatctatctcattagtagatagcgagccctggcagatcttggcagtaggagcttcctcctcagatatcgaggtgggtatgaagctgtcacttctttctagctcatcagcgaatgcccctcctacagaattgagcatctggctatccgacaagtagctcatctgaaagatggaggatcttttcagtgtggtgaaagtgcgaaactaacaaagtgccctcacccgcacaagttcagaaatagaaaaaaaaaagagaactgaccagacatctcgagaaatagctgggtgtatctttgtaacataatggtcatattgctacatgagaattaagatactgaaacgcacccaccatttcgagaatatagtcaatcctcacaaaaagtaagtcgcaaagttaaaactaattgtgtacctcaagaaatggctggggtatcccagtatcccaaggggcatgcattccccacatgaacattgagttaatgggacacacccaccattatgaagaacctagtttgtcccaagaagtgactacaaggcaagaaaaatgaaaactaactgcatgtctcaaatggttgggtgtttcacagtgacccaaggaacatgcgaggtttcatgagcattaagttactgtgacaaacccaccattttgaagactcagatagttttcataacaaaagtacatactaaaagctaaaaaaccttaagaatcattaaattctagcaaaaaaaaaggttaaaaatgcttggtattggtttgagagagttatttctgggtatttgaatgttcaggaatatacgcaaacattcgagatactcatcaaaaacttgcgagtactcgaggtactcaacagaatatatacgagcactcaaagtgttcttcttgaaacctgtgattattcaagttttgggtacatatttcttagaaaaacaagtattttgtcaaaagacaaataacaaatcctattatctcatgcattttctacccctagaagcacataatacacataaattctcagagaaagaaaaatagctacagaagttctagtctgctaaccttgaagtgcagtctctcttcaaatgattctatggatatcaagaatttcaaaatccttctccgatgaagaaaactcagaaaaatgcaaattgattttttgagaattcaaaattttaaagggagaaagaagaggaaaatgaaaatgagagggaaatgaataaaggatcattttgtattagaaattttaaatactaatatccctcatttattgggatgaagacacgtggcaaaggaatccttaaggtctcataatccaacggttatccataaccacgcctgcacggacttcaaagagtattgattatgtggcacctaaaatggattaaaagtaataattaaaaccgtcttttcaaaatcctcgaaaagacaaccaaaagtcaccatctcgtgacaatctctcgcttgcctctcacttatagtttctcttgtgacatagctatcgatggcgaaactaggggcatgcgttatagtatgaatgtttcacctagaaactcgagaccaggctcccgtaaaaatgacacgtggattcactctcctcgaggagtgatgagctgtcagaaggagacaactgttacgaaaattatgaatactacgcaagtacacgcagtcaagtagtagctcacgcaagtgaggccgaaccacagggaattggactatttactactaaattatacttatgattctatctggcaaaataatactttttgtgaattcagtaaaataatttagaaaattaaaataacaaatgactattaatcaagatgagagaataggaagagaatcatgttgttaagttaccaatgttaatgcctaattgctatcctttacttgaagtgaatgacagattataaattaacctaactcttttcagatctt

SEQ ID NO: 220949 - DNA, 1649 bp, Cannabis indica
tagagctctgaaagctaaaatattttttggagatggggtttggtttggattaatttgtgggggtccagaccttgtctcggagatggagtttggtttgggttgaaggtggaggaggaagaagaagttacagggggttgggggttctggtcttttgagaagaaagagaaagagaacgagaacgagagagaaaataaaaagggaaaaaaagtttttaatttttatattttctaaattgttttttatatatctttatattatttttataatattttaataattaatattacgtggaccacgaaaaatttactgtagacagtacactatgacacttaactgaaattttttaacggaagggtagtgagcaaaacggaaactaaattcagtagattttactgttaaaattttaatttttattattacgtgttaagaaaaaattcaaataatttttcgtcaatattctaaaattaaaactcttgataatttggccacatagtcttttctattattatttttgttgtaaaagtcatctgcaattacaaggaaaatcaattatcaatgttagttttgaaggccaaatggattaccgacaatccaagcaaggaatggtttaaatctgtggaccaagatctcaagtccaagttaaggtctttatgagaaaaaaaaaaatccaagtcaaggtcaatggtgaccaaaacgcgtaaattatgcataactgcaataatgaatgagttaataatgctcattttcattctacaattttaggtaaaaaactatacacttaaatacaaaactgtgttaggtaaaagactatacttatatacaaaactgtgttaggttaaagaatattcggctgctcacaatttagctcaaatgtttttttaggttagttaacacttggtattggattggaagtgacccgttcacttgctcgctggaacctagctaacgggtcactctccccttaaaaaatacaaattgtgtcggcctaacttttaattttcgacttgaatatctccattctttaagaagtgcaaataattttgtatccaatttagcttaaaaaaataaataaaaattttgtatctaatttagcttaaaaaataactaataaatgttttatacttggtttttctaaagttattttttagtttgatttgtcttgatatcaaaatttaataatcatgttttgttggattcctctttagggttgattttaataattttggttcttacaaacggtttaaaaagacgaacatgttgtattgtcgaacagttaatttggcaactcacaccttagctaagtatgctttatcggctactgttagtaaggtttggtgacctcttgttgttgagttttttgctcatccaaggtggagtttcttaaacctttttttctaaaaataaacaaataaataaaacttttatatccaattaaatttataaaataactaagaaatatcaactaatttgacatacttttcacaacaccttaatattatactttggttggtataagaattttaaaataatttgattaatttaaatattgaaatgaaaaatatgattgcccggaaacaagactgattttagggtagctaggacagggtcggagtcattgcccaagaggcctccttgaatctgatcaactc

SEQ ID NO: 220950 - DNA, 1438 bp, Cannabis indica
gataagtctctgtgtattctacggtcttgatctgttcctggatccacaaagcttctttgtgatatagttcaattaagaggacttggctagtggctacttaaagtcgtacttcttttttcatgccacatgtctctcgtctgaaaatgtagacaacaccaaccactaacagtgatttgaagacgagctatcaaagaacaaagaagacaaaccaacaacaaaataaaactatgtcaaagacaggattaatcgcagtaacctgaacaaaagacactcaaaatcatgttacaaagacaaaattaaacgcaataataaaaacctgactacaaaccccgaccaatccacacgcttaaacacaaggagagtgcctagttaaagaaaaaaatacaacctatgacgatttaaaatttaagaatgaaaacccttaacaaacaagataaaaatccactaaaaaaaaaaaaaaaacccaattcaaattactggctcatataagagaacttacattgtaaataagtggaatattctatacgactttgtttagattttattcagagaaataaatctatccttcgtacccaagaaatacgcttatcaaaatctaaaatccggtctccctgatttcattccatttcatactagagagatcgaatccaatatcttcaatcctttcctgttttaaggaagaagaagtagaatatcaatactacgatgaagagggtcttcggtgtaaagaaggacaaggagccccctccttccattcaagatgcctccgatagggtttacttctctctctctctcttgtatttttttttcctcatgagtttctaattctttttttccatttgaaaggtgattcaattgaattgttaggttttactttttgaactttattggggggttgatggagttatagtggaacttgttgacggtagatgaaaccttgtttgttaccaatgaaaaggaacattagaaagaagaaaaaatggtggattatagatgtaggctcccgggtgcttgattccttaattatgtgtggatttgtattactagtttccgtaatttagtaattgtgaatataattccatatttacaaggtacatttttagtgcaagcagtttccatctgataagttttttaactagaaactctattacattgtgtactggaacaaatgacgggcctgattacctgatgtttcttcatagacagttattttgattatctatttgctgaataatttaatggcggttaacattttctgcgtcatattcaatttttactggttgtttccatttggagcgggctagttcatggtaatcttttgatatacttgatgatctatgtgatctgtgtatattcttcaaaagaagattattgatgcttttttttttgggtgtgtatgagagcgtgttattcccattttcatttttcaatcaactct

SEQ ID NO: 220951 - DNA, 6446 bp, Cannabis indica
attattgccacgtgaagtgcactttttcgaagtactttgtcgatgacagtgcatattcttaataattaaatcatgtgttataggattattatttgtattagacgtttgattcatacttactttttgctgattaatcttttaacaattaaaacaagtaatcaattaaagcttgtcaatatttcttgggactttccttttgaaagaatatagacattaagtaatatattttgcagtccatgttttatgattatatatataataagttgaaatttgttgatgaaactctgcagtctgcacaatgtatccatcaatggttatcttagtacaaattattattattatcttttcctttgtatttggagagtgtgttcacaatcacattcaccaattgaatgtgacttgttctgagtatgaaagaaatgctcttcttgacttcaaaactggtcttatagatccactaaacaagcttggatcatggaataatggcagcagcaacaattgttgtcaatggtggggaataggctgtaacaaggcaggagcagttattacagttgatcttcgaaacaggtatcataattcgaaccttagtggggaaataaggccttcattggcaaaacttgagtcattgagacacttagacttgagtaacaactccttcaaggggatcccaattcctgtttttattggatccttaaagcatttgaggtatctaagtctatataatgcagggtttagtggtttgtgtcctccaaatataggaaatctctctagattagagtaccttgacttagattcatcaggattgtatgttgataatcttgaatggatcacaggtttagtctctctaaagagtcttgtcatggatggagttgacctttcaatggggggtttagattggtttgagataatactaaagaagctcccatccttgacagagttgcatatgtcacattgtaacttgagtggtccttttccatctatttcttttgttaattcaacaacatcacttgctgttttagacctaagtttgaacaacttcaactcaaaaatacctgattggttggccaatataagcagccttgtgagtttggatctaagttttgcctctttgcatggaaagataccacttggtttcgcagagctaccgaatttgcagacctttcgtctgcagtacaatattaatcttggtgcaaattgttctcaattttttgggggaagatggaaaagtataaaatatgttgatttgagtggtaataagatgcatgggaatcttcctacttcaattgggaacatgacatctctcacttactatgatcttagcttcaacgatgttggaggtgggattccaggctccattggtaagctttgcaatcttaatcggttttacttacgaggtaacagattgaatggaactttacctgaattccttgaaacaacacatgataattgtcattctaagagtccacttcctagtctagaatacttgtatttgaacaataatgaattgattggcatattaccacaatggttgggtcaacttaggaatcttagtgagcttgatttgagctataacttgctacatagttcaattccaaaatctttagagtcattgcaaaacctttcatatctaaattttgttgaaaatagattaaatgggtctctccctgacattttaggccagctatctgagttgtctttccttgatgtttcttccaaccaactgactggtaatatcactgaaacacactttctaaagttgcacaagttaaaatacatttctctctcttccaactcttttacagtaactgtgagttcaaattggaccccttctttcaacctaaatactcttctcttgggttcatgccacttaggtccttcattcccaacttggctaagatcacaaaatacagtccaagtcttggatttgtcaaatgctggcatttcaggttccataccttattggttttgggaaagtttctctaatcttatgtcgttaaatgtttccttcaatcaattgaaaggccagctacctaacacattcaacataactccatttttatatgttgatttgagctcaaaccagtttgaagggcccattcctcttccaaatgtttcgacacaattacttgatctatccaacaataaattttctggtcctataccaaaaaacatagatgattccttacaaaacatggtctccttatctctttctaccaaccaaatacatggatcaatcccaaattctattggcaacatgttgtctcttagtgtccttgatctctcaaataataagttaataggaaaaattcccctaagctttggaaatttgtcaaaccttgttgcattggacctcagaaagaataatttgtctggtacaattcctgactctttgggtcaactaaattctctccaaacattgcacttaagtgacaacaagctttctggaagcatcccatcatgttttcggaatttgtcaagtttggagacacttgatcttggtaacaacagattagcagggaacataccacattggcttggaaaaagtttgaagaatttaagaattctaaaattgaggtcgaaacactccgcggaaaacccaaccctgccaacaaatttaagttcattacaagtgctagacttggctgataatgggcttaatgggagcattcctagtagctatggacatttcaaaggcatgattcaagtacaaagggaaaactttcttctatcctatggtagtttcatcaagtattatgaagaaagcatggttttgaatgtaaaaggccaagaactacagtacacaaggattctttcccttgttgtcagcttagacctttctgctaataatttgagtggagaacttccttcaaatttgacaacaaatttgttaggtttgatgaatttgaatttgtctaacaatcacattcgcggttccattccagaggatatttcaaacttggggcagttgctatctcttgatctctcaaataataggctctcaggtactattcctaatagcttgtcatcactttcattcttgggacatctcaacttgtcaaacaatgacttgtctggtaagattccttacaatggccacatgacaacctttgaggcttcctcttttgctagtaatcaagccctttgtggcgagcccctcgatgtaaaatgtccaagcggtaatccagtcaataatgaagatcttatggatcataatgatgatgacaatttcatcgatcaatggtttttcgtgagtgttggattgggatttgcagcaggaattctagttcctttcttcatgatggcaatgaaaatttcttggagggaaacttatttcggctttgtagagattgtgatagaaagaattccattctttgagcgaagaatgagagcaagacgaaaatggcctaggggacttcatcattgagaatgatacattcatgttgcacctattttaattctaccaagtttgtgtgttgtgtaacatatcatttgtatttcttttttcttctttgttctagttcaaagtttttgtgtgtggtgtgtcacatttacacacttttcatttagttggaaaaactttcaagaggaccaacatattggaactatcccttttgcaaagctattaatataacttaattcattcaaagaagcttgattaacattagtctaccctctgttgcatgatttgtttcttcaactattaatgttggattttataccaattctccatttggttcttattataaacttatagtgtttgagtcttgagtggagaacttatagattatcatatatgtatatataaaccagataataagtgatcatgtaatttagttctaattccaatcattatttaaagattgtcactgttaatttatcaatgtagcatctataacatcattctatttctaacattttacttatttattagatacttaagaatcagccgtaattatttgcttgtaaaaaacagagacaaacgacactaaaagaatgaaaaaaatgatagagtaaccactaaagatcacatcaaacaattatgttgatcctaatttcataatattatctaatgacaattgttttgtttggtgtggtcttcacttaataaatcgttcactctttagtgtaaaacttaaaagaaaaaagaaaatatatgaaaatttatataaatcccacattattcaaatatagtaagaacaatgcgtagagtaataatataaagagaacattacaacttcaaattcttaattacataatttacattaaataattcaaagtgtacttcagaaataatttttgaacaaacctaaaagcaatcactgcaataggagaacaatcgaacgagagacgtcccttgttccattaattttgcccgaaacatgcccttggccgatcatattctatttttgaaaaacatacaaaaatttgagagtcaatgcaaacacttacacatttagatcatgttaaaaatagattgagtgcaaacacttacaaaaagttgggatgggagtcgatgcaaatacgagcctccctaaaagttagttgggactgcatgcaaatacgagcctccctaaaagtttatgctagctatttcagtgttttttatttgatgttttatccaaccaattgacaggtaacatcacttaaaacacattttctaaagtttcataagttgaaatttttaactcttcgcacttgtgttcatgaccgttcatttgcaattttttagaaataaaataataataaaagttgtattatcaatttatcagtgtcatactgttataaatgtaattaagaatcgagttccataacaaaataatttttagagaatattgctaacctatcatgggacgctacctaaaaggtgctgaacactctaaattattgacttccatacacaagtatagatgtatgtatttggtgttgaaaataatgaacaacttttcattgacttgtatacttagaaatgctaatgatttatcatcattccttgtcgttctacagtttcatttgaattttacttttctaaatttcatttaatatcgaaaacaaatttgaatttgaattttacatttcaactcatttctttttctatataagtgaatcattattacaagttgagacttaattaattcatatattgctcaaaatttgtgtttgtaaagtgttcaactgatcatcatggaactctttacaatgtttggattgttgttaaaaattgcttctttgtattattaggagattattatgttcatagttgtttggaatctgatagaaatgctcttcttgactttagaattggtcttgaagatccacaaaaccggcttggatcatggaaaggcaacaactgttgccaatggcgaggaataagttgcaacgaggtaggagcagtaactacacttgatctccataaccgatatccaaacaacaggtatgacttctggaaccttagtggggaaataaggccttcattgacaaaactcaagtcattgagacatttagatttgagtttcaacacattcaagggtatttcaattcctcaattttttggatccttgaaggatttgaagtatcttaacctttctaatgcagagtttagtggtctaattcctcgaaatataggaaatcttctagattacaatacctcgatttagatcatttgtactacttatctgtcaatagcattgattggatcgcaagtttagtctctctaatgcatcttgtgatggatggaattgacctttcaatgtctaccatccttaacagagttgcatatgtcttcttgtaacttaaagggtccttttctctatgtttcttttgttaattcaacaacatcacttgctgttttagaccttagttttaacaatttcaactcgaaaataccagattggtttgtaaaaattagcagccttgtgaccatcgatatgagtaatggcaccttgcatggagggattccacttggtttagctgatcttccaaatctacaattcttgaaattttctcggaataatcttagtgcaaattgttctcagtttttcaaaggaagatggaagagtataagagtcttcgatttcgatttcaataagttggatggagaatttcctgctttgattggtaacatgtcatctcttacttacatgagattgaatgaaaatcagttagttggaaaattacccgaatcgttaggccaacttaagaatcttgttagacttagcataagcaataacttgttacaaggtccaattccaagatcattaggatcattgcaaaacctaacatatttagaactatcatacaatagattaactgggaatcttcctaatagtttgggagagctctctgaattgtctttcttagatctttccttcaatcaactcactggaatagtcaatgaaacacattttctaaagcttcataaattagaacatggatccctcctttccaag

SEQ ID NO: 220952 - DNA, 3184 bp, Cannabis indica
tctattactagaaaggcacaagaaagatatgtgcaagcaacaagagattggaaaggtggagcatggagacagaggtgagtacttttgggcaaccatcaaagttgcagaatgcaaaatattttgctaaaaagaagaaatccacgtgcatcagaaaatttacatagaagaataaaaaagatagttgtacctttaggaaacactctcctgtgcctacccacctgcaatttgacatcccaacagcaggaacctcccatttatatttccatttcattgttgacaggttatcaacctctacttttgataaaatgtgtcccacgtgtctactaaacgaactgtggggcataaaattcacagatatgaatgaataaaataattcaacagatttttagtgacaccatatgagaaaacctaaataaaatgtgacgtagaaatacctgtcactccctgttgcctcaacagcagattcatcatcaattcccgagtcatgttcctcatctgaaccagaggtctccatctcatcttcagtttgtttgtcactttccggagactcgtcaatttctagaaacagtaaagtatgaaagcagcaaacaaaattactggacaggaatagcacatttaaaactaacttaaaactcacaaacataatagatataaacaattctgtctataaagtcattctaccgcagataatttaaacatgagaaacaaaataaaattcatagttaggtattccttatctcaacttagaacttgcaactactagactactaatgaagttccattttgtagttcttgtcagcaattatactttaaacagatggtacaaaattagttggctttctgaagtctcaaagacccccagtagtgtaaccaaagaattaaaacataagtaaaaaaataaaaattacccactaaccaaaccatggaaacattttgatgatggattgcttctacaactcatacaagcaaaaatgcctggaccatttacaatagagttcaattattaaagtactcgcgctatttttttagccctgaaattgaagtttaaatatgtcttatgtacttcattcaattacttgtctaatatacaacatatcacacccaccccaccgccaataaaataataacacgaaacctcttttcttcctaattcatagactacatttcaataagaaaggttaacgtggtattgaccataatagagttgtgtctttgtatttttcttattaaaatccttaggttttaccttttgcatcattgtctaaatcctctggcaaactagtagtttcatcatcctcatcctcatcctcgtcctcgtcctcgtcatcttcctcttcctcttcctcttcctcttcctcttcctcttcctctgtgtcacttctaccttcttcttgtctttgtctgttcaaaggaaagaagcacaaaagaacatctcttcattattaataaaagatgggtgcttcattattaaaaatattctaaaaaaatcatgtacttctctattattagtctttttattaagtatgaattttttatatttcacaatctatgatttatttgagacttaccccttgatttccattgaaattttacatttttcatcaatacacgaaacaccccagacccaaataagttatcttaaccgtaacaattatacaagaaaattatctaatttccattaagctttatgaatttacctagttacaaagtttacgaggcatggcaacagaatctgtatcataatgcaacactaaattcagctgatttctgacataaagaacttctagtacatagcggaagatctgcttatccaaataaacccaatgaagagttctaagtaagcagaattaacagcttgctattgttccttacaaactggaaatccaacagagtactatcaggcacaaacctaatctattgtgcttgcagaatcaatgaggaagttcttctaacaaccatatataataaattcagcagtctccactaatacagttaaagtataacgataattctcttaagagtcaattacctctgtttattagcatgtgcaacagatttactagatgaactcagcaagttcaacaactcgtcatatgttgatgattccttatgaatgatttcttctgtgggagctacattttcattttcttcctcagatagttctcctgcacaccaaaagttgttcaaaaacttcaaatcttatatgaacttctccagtttcaataaaaaggacattagacagatcatcattgacaaccgatcatatcagcaatattaaaaaagaaaaaagaaatcaccttaatccaagaacactcttcaaaaacttataacagaagtgtacataacacatacctgaggagctaggtgatgctaaatgggcaatcttttcttgttcaacaccacgatttttcttggtatgccgagttgattcaaacttctgagtcttatttggtctctttaaacctgctttggaaaagaacgaagccaaatcataagcaaaagcaacagaactcactgcacattggcaccattctatgtatgaattcctttaacatcttagtttaccaccaaagaaaaactattacctccgtgattccgaaactgcttccccattacttaaaagatattattaataaattaatttctcccactttttgttcttcttcttcttcctcctcttgattagcgtactcgctttaaactctgcaatcaaataaataaaaagttgaaaaagatatttgaataaattccaaattctcactcatattcagttatgtcaaattgtacacgaaaaaaagccaaacacaataaataatatttgctaattgtttttcttcattcaaacaattaaacaaacaccttaaccacataagccaatctgaaaagctttacaacacaaaataatgaaggtggtgttgtgtttaaaatcacactcagtagttactaatttgtttgctttttctcagcaaaagaaagctaaaaaaaaagtagaagcacaaagctccttacagaggaggaaagttactgagtggcgcagaaagaaggaagaagacgcggcggagagaaagggtggtggtgattggtgagtgcagtgaggcgaggagcggcgctgagaaagcgagggagaatcaatgagtgaaggactcctttcgctgttttgttttattttatttaagctaattag

SEQ ID NO: 220953 - DNA, 2394 bp, Cannabis indica
ttctctctctacccgaacggcagaatttacaggtgtccttctcttctctcatcacaatacctgcctctgttttcctctgtttctaatttctgtctcatcaaaacttattctttaccctttcttattttttcatattaattatatttctttttctgttcatactgccctggcttccgacttttctggtgattctttatgagctctcattgtttctagagtttaatgtatgcctctattcatcatttaatgccttttttgtaatctaagtttggattttctgatctgggttcttattacctggcattaatatgctaattactgacccttttaatcgttctcatgatttctattatagattcgaccattatctgggttaaaacccagaaatcctaatcgcggattactcttcgattgttgaaattcctctcttcatcattttgtctattatgttttgtgtttttataattggtttattataaaatatcgtaagcaatgattagatatatgtatattgattttgttttatatatttgtttgtttcctctgttcattcattgtggtttcttgatgcggtcatactcttctgtacgattattaatattatttatattaaatttttgtctttttcttcctttaatgtcacgcaagctacaaattctatggttactccgaattaatctgaaaggttctgaaataacaatgcatcttatttaatcatttgttgctaaaaaagtctgattctttttcctattttctgtaatatttttgaagggtctcaattttctcaatctgactatcatcatcatctgttgggagaagtaagttttgtcacaaaactttggtatgtgaataagaatagtataatcagaactcatgataaggcttgaaaatggggtccgtacatatggaaaagaaatggttgtttcctctagctataagttctgtggtagccatagtagtcttggccactaccttgaacatgggtcttgtctctacgttaccttcaatcaatacgattctttcaatctttccatctcgattaacctctaatgaaacaagtccggttttcgcagagtcaaagcttaaccaatatcctccccctcctactattgtaacccctagatttgcctatctaatttctggctccaaaggtgatttagaaaagctttggagaactcttaaggctagttaccatcctttgaaccaatatgttcttcatttggaccttgaggctccggctgatgagaggctgcagctcgcttcaagggtccagaatgagaccctttttgctgaaattggtaatgttcatgtggttaccaaagctaatatggtaacttatagaggacctactatggtagctaacacacttcatgcatgtgctattcttctcaagaggagtaaagattgggattggtttatcaatcttagtgcttcagattacccccttgtgactcaagatggttagtctcctacacctagactagtatggcatttgcttatcactttgtgggacatgttaatgttatgggatttgtgtgctaaaataagcctgcttgtttgaatgtgcagaccttctttccactttttcaaatttggatcgaaatctgaatttcattgagcatacaagccagcttggttggaaggagtaagccctctctttttgtattaacatctgatacagaaacaaactcttagtaagaaattctctcttgtggtgtaacgttttttttttttttgattgtatctgaattgtacagggataaacgagcaatgcctttgatcatagatcctggtctctatctgtcaaccaaaaaagatatattttgggttgccccaaggcgggcattgccatcagcatttaaactatttactggtaaatacctgacaaacttctatatctgtctttgttgattgctttgattttgcatttgtttgatagattgcaaaacccttctgtttcctatgcttaatattatgaacaaggattcaatttcatatagagttagataagttcaagttgaaaatcacaaaaactactgaccctggacgattggtatattatgtgttaagtgattccagctatcagctaaatagtacagcgtccacctgttctctcttctttccattgatactgctttgttaaccaaatagtcttcatctggtctccaacttacacttttgtttcgcttcaaagaaattgtctcaaaacttatgacttactctgaacttcttcacagagttggattatatattagaatttggcataaaccctttacaaaataatcacttttatttgaagccccatcatcattgaaagtttttagttaacatacccccatgaaattaatttacgtaagttcttccagtcatcatctgtttgagtcactccttgag

SEQ ID NO: 220954 - DNA, 4050 bp, Cannabis indica
gatggaggctcatcatctaaggagtcttcttactcctgctccgtcaggacgacttttccttttcctgccacttgagcgatttgccaagcaactctctcaagttcctccctgatctggatagaccactcaacaggtacttggctgcttggagaagccttcttcccacttttactcagagtttcctatttgggcacagtttcttgtacgggcacagcctctttcgctttcttcgtagcctttggtacgaaattgggtggaaaaagtttatacttgacaaaattggcctcgatagtcaagagggagatattccgtgcagcagaaggtagttggagaatttttgtgccctcttcttgagctccagtgtgaatggaaagaggtagtaggacggcacctgctggaagctggtgtggacggtgcccattcctttgacgaggtagtattcatccataaagccccctatattagtcacctcagtggtcgtggtacccgtcaaccacttcttctcgatttgagaaaaatagaagtatcccaacatgttctgacttgacttcagattaaagagccagttgatgtcatgcggggatggctcaccccatccttgtgtggcgtagaggacgaatagggcagacagatacttgatacctttaggggtgaatggggtcagacttatatggtaatagtttgtgaccctcttgaagtatgggagcaagggtaacatggcaccctgcttggtatgaactgccaaccaggcacagtaactttcccttaggctaatcgccaactgattggggagagaaggaagcatttgacactccctaggtaaccacgattgagctgattttatattttggccatggtcaccacaaatggtggagagacccatcgatctcctagtgcaccttgcctccttaggggtatagcctcagtgtattcttcagtaacgtagtcttcaccggcctccagaacatagccgacctcaaatacaagttttccttcttcattgaagccaccaaatggcaacacctgagctactcctcttcctcatctccttcagcctcaggaggagttcagcctcaagaggagtagcaggaaggaatttgccttggtcctccatctcttggacttcagcgtcactagctgtgtcctcctcttcggtagcaggtcgggcctattttttcctaggtagggtggcaagacgggtgatgtgtgggttggacaatgaagatttccatacagtttgcttggtttgctccatcattatgcgcttggatagaattttgtttgtgtgcctggcgatagtcacagcaaaagaggcaacaggtttacctgcagcggtaaggtttggatggccttcgggcaaagtgtcaatgatgtctgaatggactatgtatgtctagtcagacggaagatagcttctccaccctttcttgagttcccaaatgaagcgaccgtacccttgatcttggatatggctaggataaaattgttcttgcacctcgggttctggggaaggtgtgtgttcactacttattttctaatcttcgaaactagagttagagaggttatcactggacgaggacagactggcacagagatgaggatgatcctagaacaatagttgaagcagatccagctcgatatggcgtttgcctccccaaaactcaccagggttcatccacaaaaggtaggagacaagaaggtgagaattggtaggggaaacaaataaaaaaataggttgaatataccgacttggtccaattaagggatccaaaatagaaatttcacttagaaacggaattttccacccataatttcgaaactttgaattggaatttgattctcactatataaacccctaatggataagtgaaaatgagtatcgtggggttaaaataaaagcccaattagaatcacacgtcgtgattaagcataatcgagatttctaaatcttaaacctagaatttcgatggttatcctagaacaagttcaagaacaagcaagatttgtagacagaaacccagaaaactaagcattcaaatgtataaaagaaagatatgaagaacttactcacttatttgaagcttttgatctgctcagatggtactggcaagaggttcctagaaattcttcaaagaatttgagagagaaacatttctttgctctagtttttcaagaataaaaatgactaaaatgattaattggggttttcaatcctatttacaggtagtccgaaaggaagaagcaatcatttcaaattttaaatgtctcaaattcccccaaaaagtgtacgttgtgtactcattgttggcatagtgaccgtcttcacgcgcggaaatcaagtcgcgatttgaggcaaaactgtcattcaacattaatgagctgaaattgaagagacccttggtcagggtcacatcagtttgtcatccgacgcctaagacacacgtcacccgtccgaataagattccgcgcagagttagggggaaaattttatctagttttttgaacattgatgtgacaagggggtcgaccgacacatgtcctatatttctaatacctaggtggaggtaaatgtccctaatagcttgcatataactcatcaacatctattattgttaattactcgagtagagtggtagataaaatatccgaccagtagaagtccgttatgccacgccacttacaagagataattacttcaaaatgatcttgttatgtccagacacgaagataatccctataattttgggattgagtcagagaaatatggtaacctgctttagtttcctatttcatatatcatagttatataataattgtaattttttattttatgcattgtaagcaaaaggaaaaccatcccttatgcgttaagcccctataaatagtgacttagcctcactatgaaggggatcaaaagaattacttcagagagagattctagagagaaaatagtgatctaagagagttactcagaaattgcatgtaagagctttcaaagggaaagaacactttgttcattcacttaagttaatacaatgcaaggggagtaggctattaccaccctcacggggccgaacctctttaaaatctggtgttgattttactttattatttttgttctcatttaattatattattcaatcgcttattatttgactcactgtcgttggctaaaagcgagatcaacatttggtatatttggtaatccaatgagctcttactctctcggtggtgaggattgtaatgataatactgagaactttaataaactttctatcactaaatgtgttcagttctctaggcagtggaatattcgcattgaggatatcccttttcactcaggtggagaggtggttaattagattttcaatccaatgttgtttgacgcttctgatattcaatgtaacaggaaaaaatatgttattttgttgctatcctttattaccaactctagttttttaggagcgagaactaccataatggagataggtggcctatttggtcagatcaaggctaagattaacgtagcttttcttaatcaaaagaagcttctgtcggctgggaaaaataattggggtgtggccttcagaatccaagatgttcactggggtcttccgaggccaggaaagattcgagttgactttgcaaataaggttggagttggggccgctggtactgtggtgcgagactagaatggggaggtcttagctttgagtgcttcgaaggtcaatattaactcaatgatttaaggtgaattggtggctgtacttcatggcttggggtccttccttagactaaacctttgtgatgttgatcttttaattgactatcagcgactttgcaaaagttatcgtggtcaatgtgtctcttcgttggaacttggcttaacttttttttttttataaaaaaaaaaaatggttattagatgtggtttcttccttgtaatgttgtttgacttccaaggaactttagtgcatgtttgacattataactaaaaaattgttctttgtttttaaaaacagtaaaattattttttgaaaataattaggc

SEQ ID NO: 220955 - DNA, 2803 bp, Cannabis indica
ctacttgattgcgtgcacttgcgtaataattaatagttttacggttggttaattaataatactctatacaaaatactatcaaatcataagacataatacttaattatactaatacttatattatgtcttagaaaattttagatatctctgttgttttttaatatttctcaaaagaaaaaaaatgttaataggtatcacttccaagtattataaaagatattataccgctattaatacatataatattaagtattatatatattagtattaaatgttatatatatatattaagttccagtaaaatatagttgtaatatatcaacgtttaaataaaaaaaaaatataggatattaatctaaaaaaattatagaccaccatataaatatgatgttgagtagataccaaatagcaatatgttgcacaaccaacaaaaatgagtgtaagaataataatatgaaaaagagattattggtttagtcattcatggcaattagtaccttccccttaaggtaatccttctaccttaaactattttggtaaacttatattccaattctggtaacctcaaccaatcaaccaacctctttgactcttaccttttcaaccggttatagccggttgctcaacctcaacaatttattaattattataataaaaacatttcacactaacaatgtacaatcactttcaaagctgtccacaactccctccatcttccaatataataatgacacgtgttttctctggaatctccttaatacaacccaacttttttgtgtggtcaatagtctgtcttatccaacggttcagattgcctttgatttcctatgaattaggaaaccatatgagatattttggaatttaatattattttatttcagatattattatagatgagaagtacacaaggaaaagtctatggtaccccaaggggctatttagtatttttttttggaaaagaaattggagagttatatttgcatcccacaaaattataaatacaccccattattaaaaaaaaatataaacttgaataatgtttaaaaattactcttaatatatttttaaatttttttcctcacattattttatgttaatttcaatacttattttgatttcatttttataattttttctatttatgtatatattttttttatttatttctaagaaaatttcatataatttttattttaatttttttgtcgtaatttttaaaatataatttaattttgtttgataggtatattttttaagaatataaattgaaagaaaaaagttaaaaatacttagtacaattaaagatataaattttatctaaaataaaaattattaaaatgggatgtacttaaaaattttgggagtgtaaataaaatttcttgggaaattttatttatttaagggtgaataccattttagacctcgtgttttacaaaagttattaattgaacatcttgttttgttaaatggcaaaatagaccatttattttgttaaatggtaaaataaaccatttgttttgttaaatagtaaaaataagacttgagctcaatttttaacaattttattttttaatataataattttaagacaatttctaacacgaacagatacaaaaatgtaattagttttgtcataacatctctagatctgattattattaagttttattttgaaaaaatcaattctgggtcctatttgtacaattttgaaaaatacagggtctattttgtcatttaacaaaacagaagctcaattagtaacttttgcaaaatataggatcccaaatagttttcaccctttattcaatcaaattaactattacaaaaagactaataaatcaaggataatatgtccaaataaactctcctaacactttttacaaaatgtagaataatattataaaaattatcaccaacaactgttaataataaaataacatcaagaataattagagtgaaaaacaatattagtagtgggatgacaaatccaaccaacaaccatagacgaataagattcaattttagatgttaaaaaaccaagtctagaaaacatcagaagacaaaatcgcattgctaacagttttgctacattcacctgaaactcactcaccatctcaactgccaaacacgcctaaaccctatttattattagcttggtattcaaatgattttttgagctatttagttagaaattattttaacttcatttttagtgctgtaaaatatttaaaaaatttcatcaacttataatggtatacaaccataaaaacaataaataaacaaaagagtaaatacttaagtttaatttccgattgtaaataatacctaagtttaatttttgacaataataatagataagatatatttttggaacttttataggtacctgaccattaaatttcaaatcattatccacgtgttatttttttattggtatatttgaattgttataaaaataaaaataaaaataatgatacgaactaattagggattgtcacatctaatttacttaacacctaataattaggtatctaaaaaaattttagaattataacctatatataattatcgtcaaaaattaaacttaaaatttatttacaatcggaaattaaacttcaactgcaaattactttgaacaaaaatacatatttttccttcaatataacatgaaacattaaatgatattattctactaaaaagtgttaggggtatttttatgagaaaattacactctataccctttttatattgtcctcttttacttttaccttcttttttaaaatctatcatttttacctctttt

SEQ ID NO: 220956 - DNA, 1041 bp, Cannabis indica
aatccaacaatctcaataatttaaaaatatttttaacgagattaaaaattctgggaacaaaaataataattaacctaaattaattgtccgggatagtcaaatgtcatcaatcattaatagaacaaatttcttttaatatgaaattagtaatcaattttattttcgtgtcctagtttgatactacaacatatatttttgaaaattttatttgcattaattgtttaacatgcctatgttgaattaaaaatctatatttatatagttaaagcaagaaaatatctataattatatattatatgaaccaaaaaccaaagagaggatatgaagaaggatataacttacaagtcacttttgtgttattgacataattaattaaagatttactgatgagacaactccttttgtcctttaatcgaaataattgcaatcttttttggctttaaatatattttgtatataatacatattccacacagtccttttgcatctcttctttataacttggatgaaaaaggattaaattatgacactaaaaaacgatccacaaattaaagcaattaattcttttagacgcaaagactttgattcgtgtactagaacgagcaatttaatgatatgaattaatatatattatatttttcagtgcagtacatatcaatgtcgatgtaattgtttcatatattaagacactgatacataccttctttaaatttatgataagatacactttgaataaaacaaaattattaaagcaagttggttgttattgactgatttgtgttaaaatagaataatataatgaaaaattgataagagataaaaaaaaatgtgtggacacatcgatggtgtctgacaattagtaatatttttttaaattatatataaaacatattaattatatataccaataataatataatggtaaaaaaatatataaaccataccttttaacaattcccattaatcaaatctcagctaaaatatcattacatatatcatatgcatgcaataattagaatattgacatataatatatattat

SEQ ID NO: 220957 - DNA, 2626 bp, Cannabis indica
acctaaaattaaagaaaacaagtgtaattctattctaaaaagttacaataaagaataaaataagctctaaaaatgacacgaataataaattaaaaattagcctaacaaacaatgaggagcagtagtggcaggtaattcaggagtttaggtgttgtttttaaacagacgtttagcattagtttctaacactgacgtctatactagctagcgacgtaaaaaaaaaagataattggcgttggttgagagctgacggaagttgggcattagcatcgattctcaaatgatgctaacaagaaaaaaaaaattaaaaatacaatatatcaaaccacacccatatcggtatttagtgacagccaccactacccaaaatcataccaaccaacaccaaaatagaaaaacaaaaaggctagatccattagcgacgacgacgaccaccacctgacattgccattgttgatcgcaaaattaaaacaaattagaaaaaataaaaaacagatctaaaacaaaaaagtcatcattgtcatcgatctgaaattaaaataaatccaagaaaaaaaaaacaattatggaacaaaaaatccaaagccaaagtcgtcatcgtccatcacttcggatatagttgtgtcccttcttcgtcgttgtttccatcattatcgagtcccatcttagttgtcatcatcatgcttttttaagtgtgcatatcttaaaaacaaaaacaaagatagattgagaatgagagatgagaccaagattgagagtgagggagagatagattgaaaatgagagacaatggagattggtgagaggtgtgtatgtgtgtgtttaggtttagggtttgtaaaagttagggttattttttttttaaattagtgtatcgattcataatggtcgttatcatgtaagcagtcattattttaaatcgacagtaattctattaccgagaaggacccactaatgcctatacaaaaacaaaacatgttttgatttaagttatttgttctttcataatcgacgctattgtctagcatctgttacaaatcgatgctattgattgcccaatagtatttttttaacatataacgtatttcatagcatcaattcttgaaaaaaaattgacgttttgggcgaaggtaatatctttttttgtagtatcctctcagtatgtgagcacactgaaaaaagttatggagagacataaggtcctttggtggggcattttatctgacgctctgccggtccgtggcctcctggctaaaagaattaccattgaggaggtgtcatgccccttgtgtggggatggtgaggaatctacggagcacctcttcctctattgtaactttgcataccatctttggcgagcgtccccttggggagtctttctggttcttgattcagggagccgagtttgggattgggtagcatttctttcgaacttgaaggcgaaagggggatgatgcggacaagttgttcctttatgcctcgatcgttgtggacactatctggaaaacctgaaatgataaagtgcacaattactctccaagtaacattaaattttccatagactctatctctaattgttatacagattacgctacttgcttgtactttcccctggcggtggatgtggtgtctcttgcctggtctcctcctctagaagattggatcaaaatcaactgcaatgttaaggttggtagtgagtccatgtgcgtagtggttttcgctagagatcactcgaggaaagttttattggtagcttccaacatactcaatttcacgaatcctctgattggcgaggcggaggcatgtcggttagcgttggaagttgatgcttcgatgaagcacgactttgtcctggttgagagtgattcggagaaggttatcaaaccgctgaaaggttaattcactccatttggaatattgataattatatttctttgtgtaatcaactctctaatcatttttttatcttataatttctcgtttatttccagatgttgtaattttacggcccataatgtggttgggtggggttttgcactgaatatctcaggtatagtagatccctcctctatacctaacattatcctaatgaccgggaggtctaattttccgttttcaatgaatgctttttttctaaaaaaaaaaaaaaagcctctcatgagatttaggacctagttatgagttactactagtttgtgtgcaatatatgaaatatagtactggccattgttatggaatattgttggagctcgagttggtaactgtggtactctttgttgaccccgtttgtgtatgaataaatgttgatatgtgaatttggttcgctattacattattcatggttatattattgtgaaattcagtgtgaattactgggaccacactatagcactactacaaattaggcctttagtgacactatatagtgacactcataaaagtgtgtgtcactaaaaaattaagagtggtttttagtgacacacaacattagactctaaatgttcggtgtttattacgcggaatgtgtgtcactaaaaatatggagtgtcactaaaaataaaacccaaaatatataattttataaaaattaaaaaaaaacatggcctatggtgacgtgccacgcgtg

SEQ ID NO: 220958 - DNA, 1955 bp, Cannabis indica
ggtcggccacttatgtaggatttatcatttaatatttttattattttaatgtcaaataattcaaacctaaccttaggtggtatactataaataggtagtgatggctttaggaaattaacatgcatcttattcctttcagagaaaaacttgagccatctttctaacctagccgccacatctctttccttcttcttctctgtttgttactgtgattagtcttgtttttgtgacatgattttgagtgtcttttgtttaggttactgcaattagtcttgtcacattgacatggttttattttattttatttcgttgttggttcgtctttttattcttcgatacctcgccatcaaattattgttagtggttaggaataacaagttacttgcgactgaaggggttgttaatgctagtagtgcaattacataccttacacaatagttgaatactcaagttaagggattgaatgaacctacaacagcaaatctactattatgtcttgagcagtgaagtaaactcaatataagtgttcttaaagttaattgtgacgttgcaatctttttcatttaattttaaccctaatggtatttccaacaaagtagatattctgattaaattaaaaattactattaataaaattatataatttcttcaaaaataaatgaataatagcttattattgaaagaaggaaggaagaagaaaagtgagtgggattgaagttaaatttggtgcatgggattggtacgtactattatgtattgtctcttctcctttaccataaattaataaagaataaactttcttttacagcataagcaaacaacggtcatctcatctcatcatttttggttacatttcaattcaagccaaatttaaattaaattgcttttttatttctttttattcttctctattttcttttcttaataataataaatttataattgttgttattattattgatgaaaaagaagatttgtttgggccaattgaattgattttaaaagaagcttctgctttattgggttggttggcccaatggtttttattacacttgttgggaatataatagattctattaaagaaaagtttggactcattctattttttttttttttgtaaaggtatggactcattctatttattcttctctttttcttatttgggttttgcatttaagtgtaacggtcataatccatttattgttaaagaaaaattttagttctaaaaacttttatgtgtcttgtatatatttacatatatagtttgtaaaaatatgaggattgtatttttctttcaaaatttaagagaatgttttaagaaactatggacaaaaataagtaactttcaaaatatagtcaatatagttgaactaaattttgtgaaaaaaaaaaaaaaacaactcttaacttgagaattttaacaaaaaaaaaaaagtcttgtaataattttttgtttgaaatttataattttctcaaaaataaataaagaaaagaagaagctccaaaatccccttttaagtgatttcatcatcattgaggacccttcattcatgaatataaataaatatatatatatatattgtataaattcaaaaaattattatgagtaatttgcgatatcaatatctcaatttaattctcaattacaaataaatatttaagttatatttttagaacttctgtaagtacctggttgttaagtgttaaataaattgtcacgtgacaatccctaatttttccacgtcattgaattttttttatcttttctaaaaataaaattagtttaaatataccaataagaaaataacacgtagataataactttacatttaacgatcaaatatttacggacttctaaaaatataacttaagtattattaccgttaaaaattaaacataattaattatttacaaccaaaaattaaatttaagatttataccgcaaattattcaat

SEQ ID NO: 220959 - DNA, 3548 bp, Cannabis indica
attaaatgtaaattttaattattcacgttttccaataacctcgttgattagcaacgagctgaatagtacattaaaaatcacgctaacacgcctatgctagtttggtggtacaggtaaaaatagcttttgatatcggaccggtaaatttatacttgttcgtggtggaaatttatattgaactgtcattttgattttccaccaacagtagttggagtaatgtcatctactaattggtgtagagtcggcatctaatatgcacatttaatattgatattttcaaaaataaataaaataaaaaacttgtagtagtgacaagaaacaatgcctcaaatgtaataaaataacattgcaaaataatattaacatggaaacaatataaacttagatttttaaaacatttagatggtattagaaacatttagaattttacgaatgctaattccatagtcacctactaaattttttaaaagagattaatttaaaaatgataataaatctgtgtacacaatagttttagtggagttcttatcttgttggacagttgagacgggtcggattaagactctaactgtcgaagatatgtctttgctcttaatattgctacatataactgatcatgtgaaaatacatgttgtggtaaacagatcccaacgtaatttaatatttttccctgtaacttatttatagtcattgtaaaactcttatgtgattggatactgggttgttttgagcagaaatccactatattcatctacatttggccaaaatggtacccttcgaaagaacattctttttccaatatggtgtcccatagcagtttcagcatctattacattttggtcgaatgtcgggcatagtaaacgggttccattacataaaccttcagaaggattaatgtttctaagcaccatgatgggacaattctttttgagttgtaactcatggggggaagtccattgggagttagattatttaaaaagtcttccattaccgattgctcagtataatttatcgtctcatccctactgtagcagaggtttacttctcatggaaaccttcctattaataatgaatttatttcatcaacaaagttgttctttagtgtcagtattgcaatattcatcatggtagacacattatttgaatattgttgaatattatggaaaacgttttctatcaatagattcaaagaactattgtcctcgtgataaggaacaagcatattagttgttatatgtatggtgtcattaattgtgtggggtggcatgcctttgcctactgctaacacataatatgaaaacattggatccagtcttgttcttatattttgaatgagttaaaacttagtcagtgtcagccacagctaggaataaaccaagctggaatttattcgctcttgtctcgttcttttacagaccacgagcaacacctggcaaaaatctcccccaaaaacaattacctttctgccaaagaattttttttgtatcgtttatatctcgtagcatcttatccaatgcttctatgtgttgtgttcttgtcattggagccttgtcccatattattaactttgtcgcacaaagtagtcttacaaaggcactttgtttgcagacacaacatgtgcttttttcgtaggcatcgagtggaagcttaaaacgtgagtgtgctgtatgaccacctagaagaatagaagctgcaaccactgacgaagcagttgcaagtgccacaatgtttagcgatctaacttttgcaaggatggccttgtataggaacatttttcctgttccacccggaccatctatgaagaacgcatggcttttgtttgacaaaatattttttatcactgcattaaagacatgatgtttctcagcgttaagtgattcaaaagttgcaacatcttcttctggaatatcaacagccaattcatcattgatctccctagattgaaattcatcatcaagcagttgatatgagttaatgtccttccccatggattcgattgtggaagatattgaccttagtacttcatatcttacatgctgtaaagaatctcctagagttttgaaataaattgacatttcttcctcaaagcatttccagagatctcttggattggttggattgcaataaaccaatttggttgcaaacaaccatctcaaactcgaaggcctttgatacaaggatgcttcatgtaaataatcttctaagcaactgtctacttgtaacaatccatgcaatggttcggcctcacgatatattggtgctaaaataccgccaactgtcctaatatcttcgaacgacaatagcccttttacatggtttagtagtatgcacaaaaaaatatctatcaccttcaaatggatttacggtaacaataccccctataactattttctcttttcgaggagtcaattttttattttgatggttccaaacataatattctggaatttatttgtacaataatgtctttgcattttcctttacttgatttaatgcaaataactctgtcaacatcgattttttgtaatgttcagagttggcaatgctacttaggtcggtattgctctaaatgtgactggatgttaatcttgtagatgtaaatagaaattgtacactgatggattcatctcattaacgataaacccctatattctccatattactttagtgttgttatcaaaaacgaaattaaatgcaacacgatcatggcccttatatatgtacttgtagaaatacttgatagcttttactgtgaagcaaattttaacattaatgtggcagtcaaatgttgcaaggagataagggttatatggcagtcaaaattcagatgatatactgattcttgatgtttggtcttaataatgtaggttagaagatccgtagaataaacatacataaattgatatataatgtaacatcctactaggttaggtgtctaacagtgttttctaaatactgtgcacgtctttgctaatcagatggtttattaaaaaatatgaaaaattaaaactttattaaataacttcactttaataattaaacataataatttacataacctaggatcccattttaaaagttacataaatttacaaactgtttatttttcaaaggttgtcgtctaatgaccaacaaaagttagccaacatcgtcctgaagaccctaaacactccaaatctaaccgtcttgatatgtacaatcttcatccttagctttaaactcacattagttcggttctagctcttacctacacatacgtgaaatagttgtaagtcgacagactcagtaagaaaagcataatcataaacataaatatatatctagaccgtaaacacacacccatacacctaatcacgatctgataactgggtcaggaacgttctcaacaaagtgtatgactaactgtgaatccagcctatactcagtattctagtcgtactgatgtagtagcagttaattcagaatggaggcctatcatatgacatctctgtgcaactctatgtacactttactgataccctgatatgcctaacatatatttgtcggta

SEQ ID NO: 220960 - DNA, 3061 bp, Cannabis indica
atacttttaaaagaaaaatatttcttttgagtctttggactggtagttagacgcaaaactagcccgtcttaacccaagcctgactgatgatgttaaaaactatttatgcgtaataacaatactctaaaattgaacaacagaaatcttcttacttggattcgaagataattcttctcagagtgaagagcctgaaatacagtagaaaggaaaaaatcgaccaaatcactacttgcttgagtgaacatgtcgacgagaggagtagaatggtggctggtcagccatcccacaacaccccacttagcagcttcacttgcattgtacttatcattagcttttagggcaccagttcctattgacacaaccaaaaatcttccgtactctgttggcttaatggggaaaaactcagggtttccttggtggatttcctttgacacttcatttatagccaccaaagcctgaaaataatagatgtatataaatatatattcggaaaattttacaatgtactacctgtctctttcagtatctcagacatgtatagttatttaaaatatcttacaaaataacagtaatagagttcaagatgaaaataattagactaaaaaattattttaacccttttaggagggtgtgttgtagaacacgcttttacaatgagaatctatttagttaccggattgttagcgacgacaccaccatcaatgaggttaaactctctgacttggccgtttgaatgcgtggtttcaaaattatgagccggaagataggtcggtgcagccgaagttccagtgcatatatcagacagcaacgcatctaagctaggattctttttcgcctattatataataattaacaaaaatataaccaatgaattaggtcaatagaaagaaaagaaaagaaaattaaaagtaagctagcattttggtattattaatttaaattaaaataaaatacctcgtagctagagaagatagttggttggagacgcttgatgtcaaatgttggaataacaacgttagtcaatgtgttgtgtaacctcagatctccttaatttttccttaagtaactcacgtaaatatttgccatcatattttggacctgtgagagctcgaattgtctccgcccgccccacctagtaccggaatacttctgctgcaattcgtcaacacatatataattcgtgattttgagtactgttttggaagtaactgtataattactatacgctagtaattacactagtttagaaaaaacaagttatgtttaaatataagatggtaattacatatgaattgaacgtaatacacagtattacactgagactttctaaacgcgctagttaagtaaaaaaaatgaatgtaacgattgactaattaattagagtaggtagaagtgttgggtgtcccgtattgggcattgttttgacataaatacctttcttgagggaaaatcttaggacagtgttgaaggtagaattggttgatatccttggcagcgaaaataggtcgattgttttcatcaggagcagtaagcatggctgtaacaagtccacctgtactagttccagctatcacatcaaagtaatcagctattcttgcttcctcaccatctagtctctgcatatatatatatatatatgcatgttattataatatatgcatgaattaataaatatgttatatttatgtatatggtacgacgtcgttttgtacgtacctggagctcagattctagataactgagaatggtaccaggaataatacccctaatcccaccaccatcgatgctaaggacagttatgacatttccataagttggagattgtaagaacgaccttgctctctccataaaagattaaagattttgttaaaagaggagaataaaagaaatatagagctccctttataggtaataatattattaatgttgtgttaattgggaatgtgtaagaaatgtaacccatgagtgctccttttataggttaaagtttttagggttagcattggacttttcttaatcttaagctctagaaaattgggatattcgtattttattattatatatggaactgttgatatattatgctgagtcaaaattattgtattattatcacctaacttgtgatttaggttgaaattggacccacatgtaaatacatccaaagtttgaatttgactctctttttcaactctccaattacttggcgaattatataatctattttaatgagtccaaaatatatatagttggataaatattattttgggctttgtttttgtaaaaattattaaatagattatttattttgttaaatgataaaataaatttttactttttaaaatgatacaaataagattattaactgatttttgtcaaaataaaattacttaataataattcattaataataattagatctaaaaatattatgacaaaattggttattttttctgtatctattcgtattaggaattgtcttcaagtcggttgtataatgaaaaattatcgaaaattaagctcaatatcttatttttatcattttagaaaatacaaagtctatttgatcatttgatcacaaaataggggatccaatcagtaatttttataaaacacaaattctaaaatagtatttacctaatacacttttaacaataactatattttatatcagaaaaaatgaaaaactattttatgagcttgaatcagtaccaattagaaaatttaaatactgggttcttccatacagtaccatattattaataaataatattggaaatttttatggtgaatcatctaaacatacaaataatattgtacttttgttttgtttttcaatattcagataatgtttaggataatattatgtgtgattgaaatttattgaaaaaaattaattttaattttttgtatgtcagttatacaaaatagttatctaagacatcttgtaaatttttagaaaattcagaaaaaattcaaacagtttgttacatacgtatttcttttattttagacatcatttggactagattgtttggattttaatttttatattgtaaattat

SEQ ID NO: 220961 - DNA, 1803 bp, Cannabis indica
aggcttggcttcttgcttaggttaatctttcttcggctgaggaaaatctttcttaaggtgcctaattaacccacattgaaaacaagctcttcgattacacaccccaggatgatgcttcttggaacgcggacactcagagtaggaggaagtctaacgtccccctttgccctaatttccacgatacttcttgctttgacccgaactacaagtagtcgaaaaattcttttcttctcctcaatggtaaaatcaccaccctccttaccaagaccagaaatagggagggtagtggtcccaccagcactaggggcctctcgggtctcttgtagaaactttactgcaccttctgctcgaagagcctcatcaaccatttcagcataagttgtggtatcattggtggtgataactaaagcatgcctgattttggcattcaatcctgccaaatacttttctttcttagtgaaatccgtaagtactattccggaagctagcttggccaatcgatcaaatttggttgtataccccgcgactgacatgttctcaccctgaaccaaatcaacaaactatttccgttttgcactacgaactgcctcattatagtacttagcattatacaaatctcaaaattcttccccagacattatggtgatgtctcgagttagggacaccatctcccaccacacgagagcgtcttcttgaaactgaaatgtgacacacgcgaccctgtcatttccagtaactcccatgaggttcagaattctctcaattaccgtcaaccactgctcagctttgaacatatcgggaccccaaaaatactggaggtgtctgtttccggaaccgctcatacagaggctccaggctccactacagttaccaacaacaggttatttgctggcacgcaggaccactaaagctagtggttgcggtggaggctctacaggagcatcccattgtctaagcctccatggtggacttattatatgtgtttttgtgaatgtacagaaacgaaaagatgcaagtggattatatgggaaaccatttccttattacaacaagctagcagaaatatatggacgagatcgagctactgggacaaatgctggtaatgctgatgatgatgaagaagaaatacgccaaaatgatgcaactggtgtagaatttggagttgatgataatatagatggcggtgaggatgatgaagaaatagatgaatttgatggtgtctcacatactcaacaaccaactaatatgcgtcgtagatctactgagagtactactagtaaccaacaacgtggtaagaataaaaaaactaaggttatggatgaaatttctacaaatgttggtgcattagcagattctatatctaatattgtcccgaagtttcaaggattaattgatgcaatatctgataaggatgtagctgagatgcaaaccaatttattcacagaaataagcaagattaatggcctaactccaatgcagtgtattcaagcaaccaacatattggctaaagaacctccattgatgcgagtgttttatgcaatatcagatgagatgaaactgctatatatcctgaatatgttgcaaaatgatgcataattttataattgctagatatttgggattttgtttatctttatgtttcacattagaatattttcatgtggagattttatttatggtttggtcagatattgtttaattgaataatatgaggatgattttttttagcagtattatgttaattaatttttttatgtaatcatttatgaatttatttatttattatataaattaatttattta

SEQ ID NO: 220962 - DNA, 6288 bp, Cannabis indica
tttttttttttttttaggattttctatagaaacaacaaaaaagtaacaagaaaactacaacaaaaataataagaaaattacataaaagtattaagaaaataacatccaaacaacatcaaaacaacaacaaaacaacaacaacaaaaaacaacaaaaagcaacaacaaaaaataatatacatataataaaaaatcaacaataaaataaaaaagaataaaaataaaaacactgtattttcgataaataaaagcataaaaatcgtaaaaatatttaaaatgtggtacaattttatttttgtaattttttttatttatttgtatttgaaataattccaaatttgaaaggtacggctatggaaattagggcacaaaaagccacttctgcgtttcatttttcccgctttttcctgattctcccgctgcttctctaccacgagattcctgctctgcactcctctccccgactaactgccgttcgctttctttgccgtgacttccgaccacaacaactttcggcggctctgctacccgcgacttcccagttgcgcaacataggaagatgggggagagagctaagagcttagcattgatgggtgcgggtattcttcttggctcagcttctaccttgtttcttctcagactcatgtcaaggtaactcccattcactttcgtttctaattgagcttcttaatactgattctaattccctatttattctttttgtaccaccgacaaaaatccaaggcaactttcatgtacgaaaaaaaagtaaaaataaattcaaggcaactcccattcacttcacttccttattcattgattctattataattgttttccattctacatcttttacaaccttcaaaattcaattgtgtgcctcttgttttgtcaatttttttcctcaaatattttatgtttatgtatactttcttacatatctgcacgagtcatgacatggcttagttatgcctttatttcctggcagaataaggaatttcagttcggactccagaaatcagattatcttctatacctaaaaaatggtggaagttttagtgttatgtatttttttttgggcactggaataattggttagttagacgctcacagtgaccaagatgttttgctttatattgttacagaaaggtggcaatccaacgcagcgaaaacgcaattgagttgaattgtatgtgaatcatctcatatgatttggtcatattatagactacttgtgattgtcttttcttgtaattttatttttgttttgttttttttttgtctaaaagaaaattgggtttcttcagcaaatactaaatgccatgcagttggtgaggatccaacttcaaatcatggaatggcttgtgcagacattttaagtgatgacatcgtttctgaacaattgagcaggtttccttacagcaaattgctttatgaaggttttcaatatggaagccataaaattcatcttttaaatgtcacgtatgtgttttcttgtatacttaggaatattcagtttcttggtcttgagtctcaacacaaagttattggatcatatgttgtggtcatcggccttggaggagtggggagtcatgctgcatctatgcttttgcgatctggaattggcagactcctacttgtagattttgaccaggtacatttggcctatgtttttagtttttctttagtaaacattggtgacatcacttaaaatagtattttatttttagttttactaaatactttgaattttggatatcctagaattacttgtttggtttcttttctcaaccaaatgtggggcttaatttgtagtgtcaaaatgctgagtaaattttttttatacgtacacacattacatgattttttttttttaaaatgttatgtatttgtaaaccactatgttggtctagggtgacactgacagcggcttgggaaatgtggtgaggcccaagttcgaacctaggatgaggctaattaggcaacaagtgtgccaatgaaaaagaacgtttgttttctcattgttgttatgggtagtttcagagattccaatctctttggaaacaaattttcaaacctcacatgattttatttataattctaaacaacatgaaagacattttgaaatattggtgaaatatagattttttgttgaatttttgagaatgaatatttgatttcaaaactttgatgatatcaattgtacattatagatattgtttgatatttcttcgacatttgatagaaatatggacataaatttttttcccacttaatagtttttgagtacaaattatgtatattaaatatgggatgcaactatagtaggggtatcacttttgtctctatcggtagggtcatttatgtttttcatcatttggaaatttttttaacctagttttttttaatgacactctatcgcatgcatctcatccatttttttgaaaaattctgaataatttacgataccaaaattagagttcaaaacaattaattgcacgcataaaaaaaaagaaagcacacatcaactaatgtttgaatattgtttttggcacattaaattattcaaaatgtttcgaaaacaggtggaatgcatacaattatataataaaatttgagttataatttttctaagtattaaagatgaagatgtctctattaatagggacaaaagtgttacccgcaccatagaattttattctatacatgtatttgtagtggctacaaatttatgttggtctaagaaatatttaaaatttaaatagtataatataccataaataaaagagaaatcgtttgtattatccaatcgaaggtagttcttattttccccattcaaaaatgagaatccatagtcaaaatattaggaaatctattttattataaaaaagtgaaacatattcgtaaatgagtagaagggttaccttgttacctttgttttctttcaagcctcaggaatcttttttacttcctttctttaagaattaaaataaatttgtgatacttagctaatgattgtgtgaaggtatctctttcatcattaaatagacatgctgttgcaacaagatcagatgttggtactccaaaagcctcgtgtctcaaagagcattttttgtcaatctttcctgaatgccacatagaggccaaagtcatgctgtatgattcatcatcagaagacgaaattctttccggcgaccctgattttgttttggactgcatcgataacatcgacacaaaggtaatttttgcaaataatcatgttaattttctataactttttattgcttacaaagaatttttagaaataataattaaattaatatgtggaatcatgaatcatttgcataaaatgcattctcatgtatagaaaagaaaagaatatctatgtagaaattttacgtaatctttgtggataatggcacccttaaaaccacctagtccatccatttgggtgcattttgttttgaaaaagagtaagaggccacttgtcttagactgacctctccctgatataaatatgaaaacctcacttatggcaaaggaaaaccgtggttacaataagataagcttcgtttactacaaaccgaaagtaaaccagatggaggccatccatttgggtgcattaaatcttggcaaccagccttccagtatcaacccaatatagattaaatttctgtaacattattttttatgaaaaagaaacttcgattccaatgaatggtagtgtacatagatatggttgctagttcaatattatttttttcacatagcacatcacaccatctatgtgaattgtatagagtagaaattggtgaatgattttacatcttttatttaagcaaattatatgtatttagacaagattagggagtctaaactaagaaactaggaaagagaatcgaaaactaagtaattaattcatttacaactaatatctagctaataaattctaacactcccccttaagctagagcataaattttaatcatgcccaacttgttacaaaattaatcaactcgctccccattcaaaacctttgtgaagatgtccattaattgttttccaaccttcacatatcctgtggagataaaatcttgttgaatttttttatgaacaaaatgacaatcaatcacaatgtgcttagttcgctcatggaacacgggatttgaggcaatatgaaaagcaacttgattatcacacaattttgctggtactgaagttttaaatccgacttcagtcaaaagcaatctgataaatctacactatctcacacactttgtgccatagctctatattctttttctgcattggatttagacacaatattctgcttctttctgcttcttactcttccaagagactagattgccccaacaaagacacaataacttgaagtggaatttctttctaccttggaacctgttcaatctgcatctgagaaacactcaacttgggatctgggtgtgctcataatccttgtaaacaacacctcgtcctgtgtttctttcaagtacaaaaaatttgccctaatgctacctaatgatttttttttttgaaaaggaggaggagaccacttaacaggtctcccttgcaaagattaaagcctcacttatggcggaggaaaaccgtggtatataggatgtaaaacagttacagtgtaatacaactatgagtggcccattaaaacaaaaggatcccagaattttacagcataacactccattctctgcttaagtctagaaaagaaaaaacctcaaaatgtttggttttaaagacccaagtggctgtccaaaatttaattctctcttaaacaaggtctgctgatttctccaccccttcgaaagttctgctatttctctcgttccacacaacccatagtaatgctaaaattgccgtcctccaaagcttaactctccttttgcttcccatcggtttacttagtatgacttgtgacaccaaacaaggtagtacccagtgcaggctaagttctttgaatagtaatgaccaaattttttgagtatatgtgcattctaggaacaaatgttcgatcgtttcataactggctttgcaacagatacaccagctcggagataaggccatgaatggtcttctcttttgtagcacctcgtggacatttgctttccttagagccacaaccaaccaaaaacttttactttaaccggtacacaacatttccaaaaagttttagtccaaactaagtctcttgagccgtgacttgaggtaagccaatggaaggcagatttgcaagagaaagagcctccatattctggcttccaacacctacggttgattgaggagtgggccaaattcacgtgttccaagcgctgcactagatccattagacttgggatttccctgtctaacaaatttcttctaaaataatgctacctaatgatgaattgttgagatgacataaactgactaacaacactaactgtgaatgtaatgtttggacgagttagataattcaactttctaaccaatatgcaaaatttcttaggatcttcaaatgatttcccacttgtaaggtgcacaactggattcattggagtactataaggttttgctcccaatttttgtcttagttaacaaatcaagtacatacttcatttgagatagaaaaattctttgttacctcaagtgacttcaactcctatgaaatacttgagcacttccaaatcctgtgtgtgaaactgggcatgaatgaaagatttaagggaagaaatgcccctagtatcgcttttagtaataacaatgtcatccacatacacaaccaacaaaatacaccgacaattgatcttttatagaatacagaatggttggacttacttttcaacatgccaaattgctcaacaacttaactaaatttactaaaccaagctcgaggactttgtttcaaaccatataaatatttgtcagacgacaaactcgctttaactccctctgagcaacaaacctagagggttgctccatatacaccttttcctaaagatcgccatgaagaaaaatatttttaatatcaagctgatacaatgaccaatgattttagttgccatggaaataaatagtcaaacaaatgttagtttaataacagaagaaagagtatcacaatagtccattccataagtttaagcatgacccttagcaacaagacaagcctttaatcgagcaattgatttgtctatattgaccttaactgtgaatacctgtttgcaccctatgacttgttttcctgaaggaaaatcaaccaagtcacaagtaccatttg

SEQ ID NO: 220963 - DNA, 1830 bp, Cannabis indica
aatggaaaaattattttgtcaactaacttgccaaaaaaagactttacactcttgttgcaaaggttttaggaggtcttatgtactatagaaagagtgtgagtcaatggaatgatatcttgcaaaacaaattgtgggattcaaaggttgtcgaggaagagatatttgctccactgttgttaagttattatgacttgtctcctttggaaaagtgttgtttctcttactgttcactctttccaaaagactatatatttgaaagagatatgttgatcgaaatgtggatgtcacaaggttatgttggtgattcaagaacaggtcaagagtgtttcgagagcttagtcatgcgatcattttttgatgattatattcaagaatttaatgcatttggtgtttttgatccaagacattattaccaaatgcatgatatagtgcatgattttacccaatttttagccaaaagtaaaactattgtcattgaatgcgacattaataccaaattgaagtctttggagcacaaaatctgtcatttgaatttgctaaatgtaaaatcaaattcctcagacaaagttctcactttgaaggaaatcaaaagggaaattcaaagaaaattgcgtacacttctcatttccacagaggaaattgaggtagtacttgattttgatttccttttctctaatctaagaggtcttcgagtgctaagtctaccagctcttggtgtgaccaatctgccccaacatattgccactttgatacatttgagatatcttgatctttcaaacaattccaatttgagagaattgcctgagtcattgtgtgatttatgtaacctacaaactttaaaagtagataattgttataatcttcaaaagctaccagaaggaattggaaaggtagtaaagttgagatgtttttataactacggttgctctgagttaaaagggttacctaaagggtttggaaaattgatcagtcttcaaaagatacatatgattcccatacccaaagaaaacaaagaagcatatttcccatttggggatttgaagaatccaaacgtctatgatcattttcaagggtttcttcgtattaaaaggtgtgtgaatttagccaatgtgggtgaagctgaaaagttaagccttggaaagatgaaagagcttgaagagctgagtctgaactttagagtatttgatggaagtagtgttgttgaagaggaagcaaagccacaaaatgaaggtatgatacttgaagccctaaaaccacatccaaacttgaaccttttaacaatcagtcagtaccatggagttaaattcccaagttggattacttcattgatcaacttgaaatgtcttactcttgtggggttcgataattgtgaaactctacctcctttagggaaattgccatgtttggaatcacttcagttatccataatgacaagtgtgaaatatgttggcactgagttttggggaataactcgtgaagaagaagactcattcccgaagttgaagaacctttggtttaattacttttcgcagtggaaaaaatgggaagggagtgaagaagcagcattagcagcgagaagttcaaaagttatgccgtgtctacgttcgctgcgaattacgtattgtcgtaatttggaaggacttcctgggtttctgcgaatgacgccattggaggagttgagaattggtgactgtggcatcctagaacaatgttgcttaaatgaatggcttcacatcccaaatattgaaattaactactgtcgtgtacaaaaggatggcataaggatttagtgaacactccaccattatagaaattcaaagtcacatccag

SEQ ID NO: 220964 - DNA, 4813 bp, Cannabis indica
attgggttttaattattttttaaacttggtttatataatcaaatttagttgatgataacaaattaaaataaaaaaaaaaaaaaaagtgtaagctaataaatcaaatccaaagtgaattatgtattttatatatgtagcaaaaggcttccaacaatattgcatattttaattaattattatcaagtttaagctaaattaatgtaattaaaacaaaaaaaaaaaactattttaaataggaacagtacgaacagtacttgcaggagtaggttccatctccccatcttcattctcaccagtcaactcttcaagtgattttccttttgactctggcaccaaaaaggtaaacaccattccaagaaagtttataactccaagcataattaaggcatttttaactccaataccgggtgggtaaccagcttcggtcttcgatggatctttatcttgggctgcgtacaagaacccaaaagctcccactattgctccagctttccctgccgcagctgatatcccatgacacgtggacctcagtcgtgctgggaaaatctcagccgggacaacaaaagtggtagcattgggtccaaagttggaaaagaaaaaagtcaaagagtacataatcacgaacccgatatggttttttttccaatggtggtaaggaaaggctagggcaaacatgaacaccgtcatgaaaaagaaacccattagttgaatggcgaatcttcccatactatctataaaagcaacagtaaaccaataacctgggacagtactacacaaggcaattagggtttgggctcgggcgattctaaatacttcttcaatagcattcattgtgttggccgctggaatccaaccaatggcggtgaaaatatccttttggaagagattcgagctataaaaggcaatatctaataaaaaccaggtggatgttgttccaacaaggtggaggccatggcgacgagcaaattctttactaaagagtccataggagttacccttttgggataatttctctactttctccacatcagcttcaagctcaacttgtaacaccttagacatgtctgcagctgcttgtgcagcatttttagcaactagagctgtgtatcgagcagtttcaggcattttcatacgccaataataagtaattgcggctggaaaagcaccgaacatgagaattatacgccaaacatagtcagcttggggaacgagtgaccctgttctatcttcaatgtaagcaggaacatcatattttgctttaaaggcacctgggtcatgagtagtcacaattaatctcaagagtaaattaagtaaatttgttcataaaattattattactatgtaaaaataaattataaatagaactcaacttgcaaattttaaatatatttacaaacatattaattctaatatataatttattattattagaaatgaggattctctattgttgttccttgtggcttgtcctccatttaaatataacaccaatatatatatatacagtataatttttatctaagaatacacttgagattaagtaaattatattctaattgaaagatcataactaaatagagttatatactaggaaaaaaaatcaaaacaccaaaaaagtatcaatataacaacaataataataacaattcttaatattatatcataataaaattatttttgagtaaatataatatttttatacatgtattatagttaggaataaaaattatttattttacataaataaatttataaactatatgtatatattttattaagatataattattcttatatagagatatactttcttaatacgagacttaaaaaatatatagctaattacaatttagatgttatttttatttataattagcctaaattcatacataccagagacaatcaaagctatgattccacccccaagaattccaaacccttgcatggcgaaaacagcagctataaaagcaccacgtgtcttcttattagcatactccgacatgatggtggccgagagagggtagtcaccgccaataccaaaccctagccaaaatctaaagaagcaaagagtcgccatgacggccttagcatcttggccaaaggaaagtcccgacgcaactgaacaaataaccataacaagtagggttagtccgtacaccttcttccgccccatcttgtctccaagccacccgaaaaagagttgaccggtcaatgttccaacgaaagcaacaccgtttacggctgctgcaacgttgggaggcaagtttcctggcttatctgaggataagtccgtgtagtaaatacgaccgagaagttttgtgacgagagagatgcagaagagatcgtatgcgtcggtaaagaagcccattccggcgatgactatggcggtgaaatgatagagttgcgtcttggccatgtcgagtgcattaagcactcccatttgttcacccgccatggctagctttgttgatctccttgatcagtatagtttgtgtaaaaatttcctgttacaattaattaattagcatatcagttaattaatatattatctctcttaattagaggagtagttagttttaattagtttttaaggtcttttgttttgaatttttttttattgaaatataattgactatgtcaccataatttatgtacatgtgattaaaaatttgagaaatgtttgggcaaacactaaacactattttaagatgatgatttatgaatggtttgtaatattttataataattattaaattaaattgtaaaatttaatatttaattatgtagttaaaaactgtaattagttcttttaggattttttttaatttaaaatactactaattaataactaataataatgttattataaaatattaataataaacatttcaactaaagtagccatctgtttatttataagtggctattcactcattcaaaattttgatgaaattacaaaaaatgtattaaattaataaagaattaacaaatcatcagctctatatatataaactatctttcataaatattttataggatatatatctaatattattgaggaaggatattcatcatttttctatagctatacattactttttaatttttagtataaatatataattcattcattcattcattaatagcacaaaaatattcaatctactgcttgtttttacctgctaaatagaatatattgcaggcgaaagaaagctttatgtttatttatatatataaatatataataatgaaattaaaatattattataacatgcatgttcactcttgtcttattaattttaaccatgcgtacgtataatactataaatttaatatatgaaaaaatttgaccaaaacaactaataacttttgttattactcttatcttatccatgcaaatacaaattcattaattcagtttaattaatatataaataaaacaacttttgatgatgatgtcgtagaaaataaattatttgcagccaattaaataaatgacttcatatcatgatagttatctcatcatcaaacgttgattgcattaattaggtaagaaaaaagttgtattgaataataaaattataggaactcatctaatcttgtaatttacactaattttcaaggcaaagaaggaaacgtataatgaactgtttttttaattattattatttttagttattttttgctaaaacagaaggtacgtaattaattagacataacatgtataatatataataaaaaaaagaattatataatatatataaaaggaattaatatatatccacgtgattaaaatgagaccatgagtggattatctatatgaacgtaataattaacaagacattgcttcaactaataaatattgaataattagagaatatatattaatgaataagaggtagagaggaattttaatgattaatactaattagtattactgacctgtttatgttggattaatatctgaaaatgaagagatcgaatgggtcaaggaatattaaggaattggaccactatatataatgtaaggaccttaaaagcatcttagtatataccttaattaattaattaattaattaattctcgtaattaatcagtttattagtcaacgttttcaaattaagagtacttaattaaacacatcacactattgactatactactacatcttttggttttgtgtgtcatttttctttccttcatatattttttataatttatttttaatattaattaattaattaattaattaaccaaagctatacacatcttttcttcttagccttttcttccttattttatagtgccatgatgttggcattgcatcatattaattataaatgcatttcctagttaataattatttgcacaaacattaatgatattattacttcaattttttaggggttttatttgcactcaataatttattagtatacttcattttaataatttttattttacataaaatatatatttaattatattagttttttttttattatttttgaaatattaaattggataaataatattcctttcggtacaaattagaacacttggcaacaaatgctagtattttgggtatagacacatacaaatgcaaaaatttgaagtcattgtcttattttctaatgcaaaaattttggtcaacaatttatacgcaaaatacaacgaaaactctatttatattataatgtttattattttaataacattcttagatagtaaccttctttaagaaaaagaaaaaaataaaaaaaaataaataaattatgttagtgttatataataaaatatatatattatatat

SEQ ID NO: 220965 - DNA, 2519 bp, Cannabis indica
aaaatgtgttttattttaaaaaacaattcacttttgatcaatattattttaaaaaataattcacttttgatcaatattatttttagaaaatactaaccgaatgtgacttgtgttttgaaaacttcaaaagctatttttttgtttttatttctaaaaatacttttttaaaaacaaaaaacagaaaataatatcaaacatgctctaaattgttatctggtttctaattcactatttattgttttaaacaattatgttctaatagttgattacttcatgcattgcgtatgttatacatgaaatactatacaatttactgtttcgataatcatgcatatgtagaaatatgattattacgattgtcgtatatattttatgtgtattgcatttagtgaaatcaatagcataaaatattagattcttttaaatagtttaaaaaacttaataattcacaccaagtgactttctcctaaagtaagtcattattttaatcagtattttcaaaattgttttcaaaaattaaatttgtaatatgttatgcccatatttcgactcataaatatggacaagacacatggacatgaatctcgaacgtcaaaagaggatcatgattacaacagttatcttgccttgggagaagcaaccataaacatatatacctatcttgtgctatgctacaatattactaacacatgatgagtattgcgagatgacaacattctggggtcatctcggagctaactaggatcacttaaaagcatacaagaacgaaagtaatgttgttggaaagggtagataacgagttctttaagagcttgcgattcattgacccacatactcgtgagtatgttaaaaaattaagggaatacacaaaatgtgacttatctcaggattcctaaagaatattcttagagttgacataaaaggcaatagtgagggcaaacatcttgactagtatcgcgtggaatacgatcagtcattcccaaacatctttgaagaatgcaagctatattttagatacgctatctcggcaaaggaaactacttcctgataaggacaaaagcagttaccagcagttattttatttatctacatgttttaaatatgaaatgtgggggttgtccacattttatgagcggttacctagataaactcaaaagagaataaatgtcattcctaaaaatcctataaatagggacagaacctataggagaagggatcaatctttttttggaaaataaaatttgtgagattgagtgaatacctagagaaattcttttgtaatcaagaatcgttgtaaagaaatactcaaaaataatactgactcatggagttgtagattttaactataaaatcacgtaaaagttcttggtgtttcatatatatttattaattataaatagttaatttttatttacaatgcttcatttattgttaacaaaaatataagttaatagattggtactttcattgagagcctttgtaaaaaaaaactcgaaacacattttcctttgtttaactagaccataatattatggagaatactcaacatgatgaaccagtcatggaagaagagacagtacgttgatcgagaaaagagccccagggatcacaaactcaaactagattgaactaaggaaagggtcctactgagaagaactccaacagaagtgaccctgaggaagaattttccaagagaagagagtttgatgcctacaatcccacgagatacatccctattgtggagttagaaaatcgacaactccgttggaggctcatagaatccaaccaaaggaacgaggagttagaacgggaaatggctgtagctagagtgactccaaatgatgcaccaccagtgtagaaggaacaacctatccgatgaccgtatttacaacgacaaggattgatttataaatctatataagatgtaattggaacacaactaaaataaaaatccaaaaaaaaaaatgataataaacaatcgcaattctcgtgcataggcattcacacatttatgggtatgatcatgtcatcaaccaagagcacaagtagcacaaaagcaaaactttgaattttttcatatttttgcacagtcttgaatagatataaaatggtagatatcaatttaatttcatgacaaaaaattaatatattttttttaaatttaaaaggaaaaaaataaaactaaaaaaaatagatacaaacttatttacaacgacaagaaatagtttataagtccatatatgatgtatttggaacataactaaaagaaaaaaaaacataaaaaaaattcaaaaaaaaaaaaatcacgatcgttttgcagaagcgcccacacactcgtggaaatggtcatgcggtgcaccaaggatacaaacaacacataaataaaactttgaatttttccatgagatttgtacaatttttagacactaaaaaaattgatggatatcaattttcacataaaaaaagattaatatgttttcttaaataatattcttaataattaaaagaaaaaaaatatt

SEQ ID NO: 220966 - DNA, 3650 bp, Cannabis indica
acgtatttaaaatttataaagataattttaattacaggtatagtaactaatatgtacgtattttttttttggagaaaatatgtatgtactttttacatatatatttaagggcatagattcagtaaacacaagttttgtcacaatttgttaacacaaattttagaccttaagatgaaacttaatccaaccatctatattaaaatacatataagtactaaattaaatataaaaggccttccatttatttatttatttatttttctttttaattctaatcctaccatcaaattgaatatgatgattcaaaatgtacatcgtaagaattattgaactatttttctctccccttgaactcactgtccatgaaaactagaatcatattggacggttttaccactaaaggtgatattgatatactatgctagacaacaatgccactcccaattgcattctataataataattttaattcaaaaattttatattaggattaagttttatctaaaagtttaactttaaaaagattaatacttgttgggtagccatttggattctttgatttctttctataaaactgaaggagagagacaaataatgagcaatgatgtgtattgtgtatttaatttaatcctacgcgcttagaattaaaaaagaaattaaataaaataaaatattttttttttcttaatttagtacttatatgagttttaacatggatggttggattaatttcatctaaagatccaaaatttgtgttgagaaattgtgtcaaacattgtgttcatataaatcattccataattaagtaattgatttattatgatactattttgtttaaatttttggtgtcactatagacggtggatgtggttattgatgaaacaatagcttcggatccaatttcctacaaattgtcaacctttctccaaaacacaaatgttgaagatcattcttgtttcgctttcctcaccggcaaaagcttatggagatatgataaaagaattgttaactcaaacattcttggtaattgtactatattccatataaactaatattttttcagttttcctatattttgtagttagtcctataatttgcaaagcttctaaatggatccttatagaagtttaaatgagaaaatgattgagatttctaaattataatgtattaacatgtagatagtataagattatgaactatctttgatgtgattagattggtacaatggagccatctctcagccacaattggtgttaggagatctgattgaggcattatttcctactggaaattacaccacaacatattttagaaatattgcaaaggtgagtgcatacataaactatatcaatgttaaaatcatatatccaatttttatttctatctcatattatgtttgaattttaaaaattaacatttaaatcataacattcaggatgaagctgtggtgaccattggtcctgacaaatgcgataggaatgtttccaccgctatggagcctacaataccaccatgtataccataaacataggcttcctcatcatattctaggacaataatactaaaaccataaatacgttaatatattattacttcaactctagcatataaaataatttaatatcatttaattgaagttgaaagcattattagtttgttcttatgtttatcacgagtgatgagatgaaaaggattatagaaataaagaagtttctatttgccaaccatgggtttaggttcccggacagggcagtgtcacttccattctaggagcagcacaagatagaagcttaaattgtccaaagacttccatgtttcatccttcaatagtctaagcaaacaactcaattatgaaaaattagatataaaatatgccacagttatgtcctgatgtactaaaccaattttaggattacaatatacctagagggtacttaggtagaagtcagcatcctggttgacatcatataatcttggacacatgacaattaatgtttaggttttcgaaaacatcttcaaaccatgaatcctcaaattcatcaaggaacgatgtgtataatagattttttgcatctagtggccaagaggggaacaaacccaaatcaacgcctaggttgatagtgtgcactcactaggcgcccaagttacctaaatcgcatctctaagcaaatcatctttgatttagacaattaggattcacatgcgttctttcaaataggaaaataatgagatacgaaagaagaagattccaaaatagttcgaccttgacccaacatccaggttgatatatgttgacttgggatgctttctacatgctcataaaagatgttttgcagtcattttctttgtattcatcaaataagaggatacaatcactttttgatattaaacaaatcaatctagtggcggaaacatttgagtggtgcccaggacgacaaccccccaggttaccagtgattgggttaaaatatgggggtaaacctgcacaccgtgaagctttctaacaattccacttgagtaaacctcaatgaacccttgttccaagaactcttaggtgttgtgccttcccagattgatcatcagctgcaagtagtattttgccttgcacgctggtgatgcacacctacttaccagtgcctaggtttatatataacctagggcacgtggttttgttactcaaatacatgttcggtatattcaaaattgtcaccttaaagaaattgtaattgacatcattgttttgtgttatccgtttctcccatctcgacatatggctccccacggtgaagttcatagaattaaactaacccatcttaagtctagaaacaaaggataggatttggcctacctgctatctctcatgaaccaagaacccaacaccctaaagccactagatggtccctacttaaagacactgagtcggaaaagactgcttcaaaatcagtctctggatggcattaaaaggaaaaagttatttcacaagttgggaacaccaaaatagctagctacatccccacttcctgggtcaatgctcgaggatagaataaggagtcaaggccaagaccttttgcccttggaaactgatttgagaaccaaacctcctaccaagagctaactccttccaagaaagagccttgtagtttgggcatgttttatgtaacagctcaggctactttcccactagacacaattctaaaacgatcccaccaaatctgctgattgtctcctttatcttctatgaggaggggtttttgcaaaatggtacaattataatagggattgcaatggccactactttgacatcattgtttccccatgcaccgaacggaagctcacagatagataagtaacatcattagtactatgaaacggtgtgtcacacctataatttttgacattaagtcttgcctttaaggcccaatagctttaatcatgtaaataccccaccattgggcttcaatcctagaaaaaccctacttatctaggtcaacctagcccggtttgcatgtttggatataaatatggcatcatgctcaccactaaaggggttcaaaaccttgtctttacagagccagaaatctgcttaaaagtgttggtttttacagtccatatcagagttgtaaaagctgaagtgggatttgataaaaaaa

SEQ ID NO: 220967 - DNA, 3695 bp, Cannabis indica
attcataaatcatttaaaaattaagttgtatgacttggaaaaaatgatgaatatgaaagcattgttaaaagactaaactcaaccacttcttctctagaaaagggagaaaggaatataaaattaacatataacctgattaaccatccaatcaggcaaaaattgtcatacatatataattaaagactttggataaaccaataataattatctcagcctaaaggccataaattcaaaaaataataataataataataataatataaactaagcctcctttgtggcagtgccagtgcccatcgaatttgatgagcactgtcattttcttatggcagtggtcggatatggaccttataaagccttgggtgaattttttcatttgtgtttgatacatatttgttgaaatataatttggtcaatgaatcgtttttcttatgcaaaggctgaccattatcattcccttgtggcaatgcctatcaaaattgaagagcactaccattttggagtagcagtgatcggctacgacataaggaaagtggatttattggccaaattatatttttaacatccatgtattaaatacaagtgtaagaaacaccacccatggcttcccacaggccatggtcgaccattgccactatctagctctaactggtagcagtggtctcccattagggttcagacgtcaaaatgaggtttttgggtcccatgacccccaaaatatgactcaccatagaaaaacaagtgaaaacacatccctgagggtctgagaacatgcatgggtgagcactgccatttggccatgtcagtgctcacaattggtataagtcagcataaactgccttcagtaaaacagtcataactctctcaatttttatccaaattacatggttcaacttgcattagaaagataattttaatatggatttaagtgaatctcacagacatggctcaattatgaagttataaggtccaaaattggctcactagatagattgatacattttactcaagaatcggataatgtggttaagtgagggttgttggaggacactgccacagcccatgtggcattgtatgcgagcactgacactccaaaacacatgttttaagtacttatcaccaatatcatgcatttctagctgagaggttatatcccaccactctatttcaaattggtgcatcctcaaccgaaaataacaattttcccaatgtttgtgagatttttgcctaaaaataatgagatttttatagatatttattttcttgtaatattttattcaataacaagagtggtatacaggatttgttagtgagataccccgacatgtgggggatcactaacaaactctacaaccaatataagaataagtagaaggctgagatgaggacttttagactcttcttcttcttttttggatcttcttcttcgaaaccttctccttgaaacttacttgacggcagccaagaacatcacacttattctatcatcttttctattgagtccaccatactcagtcgacaccagacctcaaaacaccattgatacacacatttctttatactttattggtttattgttccccagaactttacgaccactagtttagatcagatttatgaatatcaagtctcccatgagtcttatattcatgaatcttaattaccatttcacctagaaatcctttgatgtatttatatccacacactcgtgagaatataactctggaatgtcagatccaatcaaaaaaactaaaagtagacgtagccccattaccatcgcgacatgggggtgaactactataaatccttagtgtctatttaatttattgtgattttattagtcaaattaatttactgtggtcctcttttattttacgatcttcttaaatgagttaacgaaaaaccgcatcaatcgtgtaatttgtaaaaatatttttaaatattatcatgcggttatatatcttacaaaacatataaaaaaaaaactcaaactattttattaaaattattattgattccaataaaactttttaaaaaaatgaatggaaaaaaggatacgaagatttgaaaaaaataataaataacaatgaatttcttcttcttcttcttcttctttcttttttttttttttttgcttaaaaggagtaatgtaattgaaaatgggcaataataaaggacttttagacatgtcgttagccccttaaaaaatgagaaaattatccttactatgggattttaaaagttcttatgttaaatatgacacttttaagtttgaccaatttatatgattttatttttattttttatttttaggtctttttatggtatttgatatgccatatatgtgtaaattagatttctaaatctcatatttaatgttactatttgtttaggtagttttatttgtcactaatgccaaaaaagttaccggagtttactgtcggtgccagaaaaatcaccggagtagctgtcggtgccgaaaaagtcgtcgaagttgttgccaatgctaaaaaattcgtcagaatcggcattatcgtcgaaaaaatcattgaaaaaattcaccaacaaatttttgggtgatttctccggtgacaaggccaattctgatgacttttctgacactgatagctacttcggtgactttttcgataccgacagcaaattttgaaaaaattatcgaaattggcatagtcgccggaaaaattatcaagaaactagtttcttggtgatttttttggtaattttttctgacgacaatgccaattccgaggatttttctagcgtcagcagcaactccaacgacttttctgacatcggttgctacttcggcgaccttttcggtaccgacaacaaacttaagaaaattcgtcggaattgccattgtcgccagaaaaatcaccgcaaaataccaagaaactggtttctagtttcttggtgatttttccggtaatttttctagcgataatgccaataccaatgactattccggcatcagcagcaactccgatgacttttccgccgctgacagcaaactccggtgccttttccagcaccggtgacaacttcggcgatcgctgcagttttatttgtttaaaaaaatatatgaagggattttaatatcttttatggtaattcaatcccatatatattaagtttttattttaaataccatatttttcctattaagcttcattaccatatttatctaaactagctttatttttccaatatttatggaattatcccttgaaaaagggaaatttgactaaatatgcttacataaccttcaaaatttttcctaaatttataaataccaatatttgtaatctaggccaactttaatgttatctccaaattaccctccccatttacatcacctccctctctctcttttcttcccattccttcttcctcatcggaccccgtctgaccccatatcggacacaatcgaaccccacattggacctcacatcggaccccatatcagaccccatcggacctacgtctcctacctcgcaaccttacatattcattgaacccctcggaccccatcgaacctacatcgaatgtgcatcggaccttgcccaaatcacatatctgacattctaaacctaaatctatcctaaatctatctttaacagtaaaatcacaatgaacctctgtgcaccgtcagttatgggttgggtctcactttg

SEQ ID NO: 220968 - DNA, 2815 bp, Cannabis indica
caatcttcctttactttctttctactgtctctttgtaactttctttcaatccttctttctctcgttcttgctctattttcattgtttgtcaattcagtcatggccaagagatacaacatgtatcagagccttttcctccctttacagcaaacatggcgagcacaagaatcgacaacaatggcgatcaaatcaactccaacaccagtagagctcaaaatcaacaaaatggagcctctaccttcaatcgatcgagaagcaactccgacgatcttaatcctacgtattttaatcacaatatgtctattagattaaatgatcacaattatcttttgtggaaacagcaggtgttagctgcgattcggggaaatagactactgaaatacattcaggatcgagctccaccagtacctcagttattgagcgatgctgatcaagcttcgaacacattcaatccagattttctcgattgggaagttcaggatcaacttctggtgagttggctgttatcatcaatgaccgaaagtctccttacacgcatggtgggatgcaatacagcacgacagatctggaacgcacttgaaaagcattttacactacaagtctcttccaagatcttggagtttcgaaccaagttacagaagcttcgaaaaggatcaatgtccctcaatgactatcttctgaaagttaaacaacatgttgatcttcttgcatctgttggagaagttctaagttcaagggatcatattcctgcaatcttcaaaggactacctagtgagtatgacactttcatcatctcttctaacactagaattgaagaataatctgttgcagaaatcgaagctttattacttgcctctgaatctcagatagagaagacatatcttgatcaagattctgacctaagtgctaatcttgctataattgatcttgatcagtcctctgaggtcaatattgcttaccagaaccatccaaattgtggcaccaaattctcaaactacaatcgtactccttctccctatcccacatctcgtcgtggaggtcgtggatactcaaatcgaggagctttcacaggtaacaattatggattgcctacctttactaacaatcgtggtgtctctactgtcaacagaggaggcaggttcccaacaccagcaaatcatgtgcagtgccaactttgtcataagtttgggcacacgatcattgattgcttttgaaggttcaataagagcttcacaggggtgtttccaggctcaaatccccccacaaatcaagctaatcttgcacagaaaactcaaactgaggacaccagttggtatccagactcgggtgcaacaaattattgcactccaaatgtgcaaaatttgaccattagcacagaatatgaagggcaagatcaactctatgttggagatggttcaggtctgtcaatcaaacacattggtcaaacttttattaattccaattcttccacccctttgtcctaacaatctcttacatgtgcctgaaataataaaaactttgttaagggtgtctcagtttgcttatgacaataatgtcttttttgaattccatgctgacaaatgttttgtcaaagaccaggtcactcgagccatccttcttactgggatacaccagagtgacctttatacctttaaaccctcctagttcaatgttcaagtcacaccaacagatgtctccctaagtgtttacacagcaacattgtcccagaataatgagaacaatgcatctgtctgtactaattgtaataaatttcatgtttccgattatgagttgtggcataataggcttggacatccttcagaaaggattgtcaaatttgtaatttagtcatgtaatatccaaatcagtaataaaacacctctttcagttagttctgcatgttgtttaggcaaaattcacaaattaccatttcctaaagcttctcacactgcctatgctgacccctgcaacttgtagttgctgatttatggggcatggtatacacacatttgttaatggatataaatataacatccaatttgttgatgccttttctagatttacctggatatacatgctcaaacacaaatcagatgccttgaaaaccttcactcagttcaaggcggaatctaaactccaattaggaaagcctatcaaatgccttcaaactgattggggaggtgagttcaagccctttactgaccttctcaaacagtttggaatagtacatagacatccttgcccaaccactcatgagcaaaatggtctagttgaacgaaaacatagacatgtgttggaaaatggcttcactttacttgcccaagcatctatgcctcttaagttctgggataaggcatttcgaacctctgtatatacttgtctaacagactccctactcctgtcctacagaatgtctcacctatagaaaagcttttttatataatacctgattataccaaactcaagaaatttggttgcaaatgttttccaaatataaggccctataataaacacaaattgcaattcaggtcatccccttgtacattcttaggatatagcctaaatcataaaggctataaatgtcttgacacttctggccgtatgtacatatctagagatgttatttttgatgaaacatctttcccattttccacattacccgaacaaaccacacattcttactcatactctaaattttacacctctgttgtcattcctacaacaactaagtcttgatctgttggtagtaatatcagacctgtaaccactaaccatgttgtgccaaatctggcaagttgttcctgttgggttttat

SEQ ID NO: 220969 - DNA, 3142 bp, Cannabis indica
ctttgattctggttcttatatagagtagtatagtcggttgatcaagatcttaggagttagttacactttcagttgtaactaactgctaagatttgatccactagaggcgaagccaccctaggactgtttttgtttacttgtattttattttcttttgctgatgtggatatatattgtaaagggactggttataagtggattttaaccaacagagataaatctgttggagagacactactacaaaatagatttttggagtactataaaaacaagtttcagtgactcacgttgagtgactttaaaaccattcaatgtcctttcactacgcgtcactaaatccatctccaatggcacaccaaaaacctatatatagtgtaatttttcccacaaaatgctccaaccaaaccctaaaactcatcccattttgatgagagtctacagtgtcccactaataatagtggacaggggtagatccaggaattcatttagggtgccaaactataataaaactttttttaagatttttttaaattaagatatattattaaattcataattaacattaaaatacagaacatctctcttgcatgtcacaaaattcatctacaattaaatccatactaaatttttcagcaatttctcttttaatatacacttgcaaactgtcacttaaaaattcattctccatatcttgttgcggagtgtagattttactaaaagttattgctgaaaatgatcactctgttgtagctgtagaaactgaaagtgtaagaataagaattatcactttatatacaagtgagaaaacttttgcttttttagttaatacaagccactaacatatatcattaatagttgttaagactataaaatcatgaagattttgcacatgatgaaaatgttcaaatatcatttcatattctgtgaaatttcttaagtaaaatttttgtaccaatttacaaatatcatcattctcaatgatgcgcgcatctctctcggatctagagttgaactaagaatgagtaactctactgtgttgtcattaaatttattgtttaattcttacacttgaaagtctattattgcattaaaaatatcaactctttaataatgctccactataatgacatcttgttgaccacaagctctttttcttttaacaatataataatgagcaatattaaaattaggctcaagaatattaataggttcaccaaacaattttacctcatcaattaatttattccatccatcttctcttaattttttaatgagaatcttagtatataaaacaagatgcattgtatttaaaatatctatttaaaaaattaaattgaagaagtaattgtattatatattggaagatgtataattaatgctctattaaagctattaaaaaaattaaattgaagaagcaattgtattatattggaagatgtatatatataaaatatataattacgaattatatgataagaatgaaattatatattgaggttatacggcttattcaaataggaataaggatgagttgttgtggtagatatatatacataaagattttaattatctcaatttgaaaaagaaaaaaaggccaaaaacgtgatgtgttatgtgagatttgatgttattatttttaataaaagtaaggcttgtggcttctcttctcttctcctccacactactatatatacatacatactttgtttctctcttacacaaacacataatattatagttatctctttcttttctctatatcttccatatataatattataatgaagtcaataattgtagtgatgatgatgaccactatggttgttgggtgccttggtcgaataatggatgtagccatttttatgaatccaactccaaataggtgttacacacctggtgaatattgtgctcacattgagttcaaagactgttgtcaaggactccattgcgaaggaggtgccttcagtggtacctgtgttcctgattctcattgtctcgcaatcggggaggtttgccttgctggaatcagcactgagtgttgctaccctaaccattgcaagtctgattttgcgagtatcaacggatattgtactccccccgacactttgcccgcttctgaataataattacgaggacttcctagaaggtcaccgattctagtactaatttatctcataatacattagtactagtatataatctatatgtttgttttgtgtgtgttaaaataaaataagaggaaattaattaagttagggtttgatgaattaattaatttcctgttaatacatttacgcaccaccactatcactaccttagtagtactagtatgtgtgtgtctgtgtttttatgtctctacttctttattaattaataagtttgtacgtatttcctttacttaattactacatctttatattcatatatatatatatatatctcttatattacaatatttatagttattagaggtggaagattttcttgctaataatcctacaatccaccagtaaaagtcaataacagcggggtctaccgataataatttgttggtaatactacattgctaaaattgagtattagcagcagactaacgcccccgccgctaaaactagtatcagacacataaactgatattattaatagcagcagaccaaaccgcctctattgctcttttatttttattttttttattacatgttaatattgattaattaaaatttaaaattaaaactaaaacaaaattaaaaatattatacatttagataatttagataatatttactaatcagcaacactcaatactacataaaagtatttataatttaacattaacatatacaaacattttagtaacaaattaataaatagcaaaataaataattatctattgtaatattttagcaaacataatatttatcttcaacaacaaatcagctattttatcaaaagcaatgttcatctccaataacaactgcacaattgatatcccaatgttcatctatttctttcgtatctaatttaaaagtagtcgacctttcatcttcaacaggttcttgaaattcgcagccttggtctaattttattctgcacatagcaaataatcaataaagtttatcatataatatatgagcttgagttc

SEQ ID NO: 220970 - DNA, 1469 bp, Cannabis indica
gtttcttttaccgttaaaaattagtattttcaccccctaaactttgaccatactacaagaaactaaacttttgtcggtgcatttgtccaaatgagccgacaaaagtttctggcataaaagggttgttgaatcgataacatgtttcagccacaatttataccggcgcaataatgtgtcagtaaaagtatatcaatactggcatatttggtgaattatgccgataaaaccacaaaaatgaaccgccaagaggcacgaatagtttttatcgtttaataggctttcatcggcgcattaatgacccggtaaaagtccataaaaagagagagaatttttaccgcatgtaaataattttggaggaaaatttcccctattttggtaaattttgccggtgcatatagaagtgcaccgaattttgttttttcaacttttaaagacgctttttcgcttttcctgatgcatatatgtgccagcaaaagttaccaaaaaaaggagaaattttttgtgtggtaagaatggtaggtgggaaaatttttaccgatgcactgttgcgctgaagtcttcctcaaaatgcgtattttattttaggttaatttttgaacttttactggtgcatttttatacttttaccagtgcaaaaaaatgtgccggtaaaagtgcctcgacaatatgaggccaccgtccccttcttccccgtttcctcaattgctctctctcttctctctcttctcttcactctcttagctcactcccctctctctaatctcattctcaatctcattctctcattctcactctcactctcaatctcaatctaaatctcaatcttctcttttcattttgctgcctccgccaccggcaccaccaccaccccaaacgacagtcaccaccaccactgccaccaccacccattccaatctgttttaaggtatttcataatttttatttttcttaaataataatatttatatttttatctatgtttgttaaatgtatatatgtatatgaatatgtatgtatatttatatatgtatatatatgtatatatgtgtacgtatgtatgtatatgtatgtatgtatgtatatgtgtatatgtgtatatatatgtgtatgtatatttatgtgtatgtatgtatatgtatatgaaatactctactagtttaggcatgttaacgtgatttttaacttaattgtgcaactcgttattaatcaacgaatttatttaaaatcgtgaataattaaaactttatttaactaattataaataccaaaatagcatacttatgttaaaccggaatcccgtttacaaaaatatttataaaatatttacagtgcatatcacaaaagtttgtcatccaacgactatacaaaatgagcctcgttgtcccaaagaccgtacactccatgcctaaccaccccgacatgtacaatctctatatgctcaatcttacggctgctcaaccttagtcttg

SEQ ID NO: 220971 - DNA, 2437 bp, Cannabis indica
tcaattatcgaaaattgtgccatcataattatgctctttggagcttgtccactgttttgttcgcaatctgtacttccattacaaagggatcgtttttgggaagtggatatgattaacatttacttgttgaaagttattgtgggttcccctacccgtggtacttttggctttctctcctctatgtccaaaactgttttcttttgttcatactgcaaggctcaggtatacttttctctagctttgcccgagtctccagcaggatgtgaacccccaataataacttgtaaatgcccgtccactagtggaggcatcaattggttttggttattgtctgtttgggcgccctctgattctggttggccttaacatacttttgcaaatgcgagttattcttcctaatcaaaaattcaattttctgctttagattattgcattcgttcgtgtcatggtcgtagttcgcatgaaaatggtgaaacttagacatgtctcttttactcacgtccttcttcatgggagagggtttcttgtatgggaccatagactgagtcgttgcatatattgtctttaggtcgtttgttaggacagaaaaagtagtaaattttgaagcattgtccttggggtgctgttcggcatttccaacaaacttgcctttctttttgttgccttgcatgctgtcgttatcagacctcttcccattttagttcaaactgcaaggatactgtggactctgagcggacgttcctgctgaggtggtacgtggctgactcttcttttgtctgacggtttctacacgccaaaaaactgcttcgagcttaataaaccaatctgctcggtccagaaattcaaccattgatcccacaatcaacctcttaatatccttccacaattcaacaagtggcccaatgcctcccagtatagcggcgaaccttccttcttcaatcaacccttaacctttgtagcctttatcataaatctgcttatataagctctgaggggttcccctagcatatattttacctcgaccagatcttctagatgtgagggaagttgacaagaggaggaaaactgtgcgtgaaattttgaggagaaagcatccacaaattaaactgccttggaggcagcttgaagtaccactgctgggcggcttctgtgagtgtagcagagaatattctacatctgacatcacctcgtaccccctacagatcaatcttcatctcaaagtattttagatgtgataaaggatcctctttccccgtatacatctaccaagttggcatcttaaattttgggggtagtttaaggatttcaatagtccgaggagaagggtgatctacatgcctgatccagctcaagatcggtgacgttttgggctagtcaggccttgtaccatgtttttatgtttatccaattgtgcttgcacaaatggatgaactagtttagcctgttgaccgacctatgtcacgttaggttctctttgaattggatcctggatgcggatacctggctggacatctagtgggatgtactgttcgtccaggccccttcttttgtttaagtcagtcttaaggtcatgtgagacacccatctattaaatatcgaggcatcaagaggtcttggtgtctgaattgtttggcctgtaggttggccagagatttcagttggggtgaagtttttaggtataactccacccaatggacgatcaggaaggatttggctgtctaccgtttggcccacaggttggacttgtggccgtggattggatggttaactattgtgagtttgtacggtatgctcagatccatacccttttgaattgcccaaaggaatactagatgcggtagctggttgttgattagcgacttggtaggccctccttatcactatggtggcctgccttatgcgatcatcaatggctgcttgctgagcccttaaagtttccatctccctatccttccattctataaactgatgtctctactcgtcaaattcaaggtttatagtggcacggagatcctcctgatcatggtgtaaagcattattattaccttgcatgagtccaatggctgttcggaggttttggatctcagtattgtctctaattgtcctctaagcattagtggtggatgggacttcactgttgggagtggaatcggctgctgaactggtgttctcagtctcttgcatgcctggtgtgatcttagccagaggggaagtcaagccatggcccacaataagtggttgtgtattggtctgtttaaggtttgtccctggtggtcctcttgtattcccaggggtttgcaagttaggatctgtcaccatcgggtcgccctgattagccatgcctctatgagtttacacttccatgctgtacgcctgctaaaacttaagacaaaaagataacttgggttttcgctctcaatgaaagcaccaaaatgct

SEQ ID NO: 220972 - DNA, 2255 bp, Cannabis indica
gaactttattaatctacacaatcaaaaataatattatatgtaaccaactctatatatattagggtattgaaatatatggattaaataatatttttattaaagatacactcacgagcctccacagaaaaatctcattgcgtctagagtgagtggaaaatccataaacacattgtacctgtaaaccccacattattcaacaaataaaaaaaaaatacgattacatattgattttttaattaattttttatacctttttgtaacaccaaagtcatggcaaaatgtacaccgatcgagtttaagatcagttttgtgaacaatttttttcccgtcagctgaaaatgcagagggaccaagttcatgtaaaattacaacctttcctttaactacttcatttctaatctataaaaaaagatgcattttataatatttattgagatagctttatagttatgtacctgaaattactcctaactcaacatagggttttattgcattcatcccaattataacaagctccccggtacctggagctttctgtatacatatgcatgtagtgttcaaatattttacaaaaatctcatatacataaacataaaataaagttaaaatttacaaatactgttgtataattaaggtaaatgatgtaaccttaggatggcttgcaaatggtctattccaatgattggagagatcccaatcgcctaatgtttgtaaggtagaaatgtcaatttcttgaggtacatgattttctgctacggaatataattttccggagtgttcaaacacattggtgttgctcatgtatttgtccactttgccaaatctcagctgaaaattaattaaaataacttattaattaattttatggggtatatatagaaaatggatatatacaaatacataacatatatacgtactaaattgaggagagaagcagctattagagcagtagagtcgccttctatgatgggaaggaagatggcttgtttctttgtttttcaaggttgaaagtttgggtttcaacataacggttgttgtagtgaacactccagttatcatttttgtcttttgtaaaataaagagcatgaagcattccttctccttctacccaaatgcgacttgactttccaaatatagattttgttgactttagtcctccaaacagaggatttgctcctgccattttaattactatttattatccatcatatattgcggaattgaacaaaagaaaatgaattttgttgattgtgaatgaataaaattacaagtgaatgtttttctatttatagaatacaaagaattgttaaaaaacttaaccaatatgcctaactagcttaacataataaagaaataactaatcttaacagaactaacactaaactaatggctataaccaacttacaactaacacactaaactgaaaatcaaaataatcgaattcctattagctagccaccctccccaaggtagactgtataaattaggattgaacattttgacctgatttgattcggatccggccaacctgtctggacccaacccagttaactcgtaaaattaaagaaaaccattctattcgggcgaatcggatccaatccgatacacttttaggcaggttcgtgagttgatttttttatagacatcggattactggtggccattttttatcttttatttttattacatatataatataaaaaataaaaaaactctaaaatttaatcattttatttttattacatatatataatatattaaaaataacaatatataatatataatatattatataatatagtttgaaatttgatttgtgtattttaaatttaattaatgtattttttttattttaatttaacgaatattaattaaagtgttataagtttataacttaaatgtttaattacttttttttggtgtcaaacatcctagtgggactttatttcactaattttttataccaaacttagcataaatcatgcatctggagataatttcaacaaaatcaccacatgccaaaaagggaaaatttctttcaaagcaaacaccactgttactataatcgtcacacttcacagccaaacgccaagaaattgaagacaaatatacaagataagataatggcaaatgaagttcaagtacaagtatattaaattggcaagttatcgtctcaaatattttagaggctctattctaattttaaaaagtaggtccctaacaaaaaaaaattataatttgcaaataatactttt

SEQ ID NO: 220973 - DNA, 4697 bp, Cannabis indica
gagtttttatacgattttttgttgcaatgttgcattagaaatttctacataaaaattcgtaaaaatacacaaaaaaaaaatgttttaaaatgtaaaaataaaaaaagcgcttattattattattattatttgaaaaagaacttcaagttccaagaagtgggatgataacacttacaacttgactaagtctagcttcaaaggcgaggtcattaacaaaagaaacatgtttgaaaaattagaaagaaaagaaacttaataattaatattgtgagaacaaaataaatacttaatttaagtcttccttatcaataagcatgtttgaaatatttgttcaaaaaaaaaataacatgtttaaatatgaatgttctttgataaaaaaaaaaaaaaaaaaaacgtgttgaaatgtcaaaaattaaataaaataaaattaagtatatattgaaatgtaatgaatatgaaaagtaaaagacaaaaaaattaagaaatatttggatctgaggaaagagttttcaacttcaccagaatcaccaccacaaggagaacaaaaatagtagcaccaccacgtataaacatgggcggccgcctcacctgaaattaaaaccagtcttaaactatttgaaatctaaataatttcttttgtgtgtttatacaaataattttctagtcaaataattttcacaacacttcaactttgagcctcaaacttaagtttaagtttgcttgcttgctttctcaactggccaaatcctctgttgtttctgtcatttcctcgactttgttctcggggatggctctaataatggaaccgtcacctgccactacactctcacttgcaagtacattagcagtcttcaacacatcgatggctcccgaattaggggtactagaaccagaagaaacatgctcttcggattggtgtggcctgtttaaggcccgacaatgtgggcaataatatgtaatgaatgggaaatcttccttcctagcaagtcctgtgcaaagaaaaaacccgaggccagtccacttaactggttagttaaaaaaccaaactagtagtaggttaaacgaaaagtctcaccgttgtgcatatggcagtttccacaaatgagtgcatacgattgtgttggatcttcaccgacaagtaatgctgcaattcgagcaatccatcctccgtcgtgagcagaggatccttgagtaggattgtaatgactaacaaccaacgggctctgctcagaagtctgggcgggatcctcactccctggagattgatgtgtaccttctccggagattgagtgagtgttggaatgtttcctattccgaagtccaccagactgaacaaggtctacatctttgctctttcccattgtagcttgaacattaggttcatgttcatctcccaaaaacattttagacctgaatctgcacccaactttgatgctaaaacagttgccgcagctgcttttgctgctgggtcagggtcatatctctgcattaaggagattaccttcattatcacatacaaataatagagcttccagtatataatacatcatcaaatgacaaatatgtttgtataagaaatgcatatagaccaaccacttcagctagccccaagtggatagtaagtttaaccattatttgcaggctccacaacagtgaacccagtttaggaacagaaagcatttcatagacacaatgatagtaaaatattatatgtcacatttaaacgacacttattttaaataagtgaaaaatgtatcgatctttctgaaaataaagcaaatgaactaaattttaacacattttcaagatgttgacttggaaattcaaaaaattcagaaacaatttgtcccggggttggccaaaagtaaccttatctgaaactcaactaaattaatccgaccgaaatatacaaataaataaactaatgactactgcttcatgtttcaccacgatggaacatcgaacaaaacaacaactcgggcagtacaaatcaaacaatcatttcacctgaattagttgttgagtggtgtaataattagttctttctttaagctcatcaattttcgcctgcctttctgcccgaagcttttccaaagtgttttggtctttgcggtcacctgaatcatcaaatcataccacaaaatatcaatttattgatatgctaatactgtgaatacaggatgaacagttaatattaacactattagaccccaggattagtatggtgtgctagaataaataaaagggtgggtgactcattgcattgagagttagttagatagtatatatagaggtgaggctaaggggtgagtggggtatgcaagaattgagtagtaatactctttgcatcacaggggcctaagggatccaatagtttggaaccttgtttctctagttcaatagcaattgcctataatttctactgtttggctacttactgttttattggttttcttgagtttagagtatcggttcttatcacacacacacacagacaaacaacaacagccacaactgtataagaaaggaaattttacattgagttgaatttccttgctaaaacttcatgggacaaagggtggtgttggttggttggttggttggttggttggttgggtgagggatttagggttgcaaagtacttgctttctttctatttatgtcaaaattctcaccataacactatgcaaattcatttctgaaaataagactcagaataataaatccactaacctatggaaccctatcaaattcttaatgcagtcaaaataacaaaatattcctaaaccctcaaactcaaataaacatttagctattatttgggcacttacacatctttgtgaagcttacaaatgctgaataagtaacagaagagatagcaggcaaaagaaatataggcaaaactcgaaatgctctcattttccaattcatatccgatgttcgggttgttacaatagcgtaaccaattgcaatagcctgaggatcaaaacattccaattggttacttatttgtaagaacaaacttaaaacagaaaacatcagatcatctacagaaaactgaacaaacaatgcaagttacagtggttaactcaatagaatcaaaaacatgctagacttgcataatcaggtgaaatttatatttcatatcttcaacaaatttagtaagcataatggccctatgattagttttttcggaaaatttccaaacaaacgatttcaacgaaatttttcaatttcatacaatgtttggcataatcaagatacatagatttggaatgttacctcaaaaatgagagaaaatataataaggtatctaattataggcctccaagtttgggatctcctcttgattctagcaagaacagtggcttcttctttagaaatatactgaagtcgcttctcaaaatcatcaccatttattctaaagattccattccaaattctggaaaagatacccttacgaaccttcttcttcttcttcccaccctcactcgccgtcgccgtcgtcgttgttcccgattctaacttttcaccttctccaacgcctttatcgtctcccatctctctctctctctaccaaaattacacacaaaatcccaaaatcgataatcattaacaaaaaaaaaaaaatacagatttcaaacattaaccgtatgaaatgcataactaccttaagatttatgaatgaagtaataataaccgatctgagaaaaagaaaagcaaagaaattagatgatgaacatagattgttccatcacctgtcgtatcggatctcaaagagagagaaagatataatcaaacctgttggagcaaccgatggattgagcagaaatgaaatcaagtgattgatttggttatggttagtgagtattgataatcttcttcttcttctaccatcaccattgaattctctgttgctctggttatgatgaccaaatcagagtttaaattactaacaacatgctttggtccaaatatttgactttttatgtatatatttttttttgatagaaaactttttatgtgtttattgggttaaaattatttccccaaacctaagttattcctaataggttaatatttcgtaaaactcaattttacctctttgattttaaacacccgaccgaacctctctcttcctcccttttctctctctctcgctcttcgaccttaccccaaggactcgacccacaatccacaattcataatctcgattcattctctccacgaccaccgagaccacagatccaatgattcacagacctaatgatcactgtggacccaataacttctccatcagtactatcgtcaaaggtaagcagtagcggaactagaatttaaagtgaggaaattagggagcactcaagatttaaaatgagggggtgtaatgaaaaaaaaaatactctatttgaatccttaactaatatcttatatgtaatttatcttaatcattacactaaaactaatattatgtctataaatattatcttttattacaaatatgtatcgtaactaactaaattacatttgtttctcgattattttttcaggaagtgacggccctgcttcgcttctatgtgggtctgcccctaaaggtaagtattaatttttttttggtatgatttagggttaaaatatataaaattattgaaatgtttatttaaatttagaattaaaggactgtgattttctagttt

SEQ ID NO: 220974 - DNA, 3450 bp, Cannabis indica
atattttggactctgactagacctggactcaaatctctccacggccctaacgccaaacccgacctctgacccgaacccaaatccgactcaagacctagacccgacttaaataaaataaaaaaataaaaatgaaaatgaattttacagaacacacttttagtttctgtttttaaaattaaaaaataaaagtggttacataacacatttttatttttaaaaaacataaattttactttcattttgtgattaaaaattagaaagcaaaagtgttatcaaacgacacctatgttaacacgctaaggatatgtaatatggatcaataattttaaaattaatttagtgatttttaataccattaggactcgtttgatacaccgtgttgtattgtattatattatatattacactatattgttggattgtattatattagtattattttatacaatacaatggtgacttgtattaatggttgtgtaaaaatatactatctttattatactctacctaaccccgaccccgacctcgacctcggcccttaactcggaccccatccccaaacctcatcagggtccaaggttcgtgtctgtgtctaggttcgggatcgggatttaagatcagggctcgaaccaagtttgggtacagggttcgaggcaaatctaagtccaacagggccaaagtttgggtctagggtccaggtccagggtcaggtttaggggttgggtctaggtccaaggtctgaatctcagttcggggccaaagtttaggtccgggactgggtttggggtatagatttgggatcatggtttaggtttgggtttcgggcctaagtttagggccaggtatgaggttcaagtctgaggctgggatctgggtctagagtatgggtctaggtttggggttgggtcaaagggtcaggggtccagggtagggctcttaatttggttctgggttttgggtgcggacacctggtctgggtcgggtctaggggtccagatttggggttgggatctaagtccttaaacctgatcttttctaaatattataatataagttaatacaaataatttataatgtattaactaatacaatttatattgtattaaaattaatagtcggaataattaatacaatataaaaattttatttaaatatagattttcttgttatttaaatacaatacaacctttaatcggttgagtaaaaaagctttaaaatgcaaattttattgatgacattaactttcacatctagcatgttattcaggaataccataccaaccaagttaccaaccaccaaccctgcctacctaaaaaatgccactttcattcctttactattcagctgacttgattgctagtggtggtcccaaaattaatttgtaaagtaaacttagttatacatttaattaatataatttaaaataaaaaatagaaaaattactttatatactattttttttaattttttttttaaatttacagtttgagtttctaaagtggttgcagcgctagttgcaacagggtttctatacaattttttgttgctattcaggttacagcgctagttgcaatagagatttctatatagaattccgtaaaaaaagcaaaaaaaaaaaactatatatatcttttgaagtgtaaaaatgaaaaaaacccccaaaaaataactagctaaatttaagtggaatgatgttttagcagcatcctcctattctagtggtcataagtttgaaccttatactttatttgtttttttaataaataaaatgtagatacagagaaaatttaaaacatcttaaccaattattctatttaaatactatgtgtatatataaaagtaataattgtatattaatttattttaatcttagattgggctttaaccctccctcaacacccctagatcataccatgccaatattatatatctgtggtttttgaaatttatacagcttaatactacaatgtaattagaatttaatggtgtaggcagaaatttgtttttgttttctattttcttacataagcagtttattccatgcaacttgtattgagaatccaattaattttttattccttagatattttggaaaaaagaattatccaaaatgctttcgattgaacattttttcttttgtaaagtgttttcaatctactctgaaaataattaaaaagtgctttcaattcaatcttatgttaataaagaacacaatgatcaaatggtgttgtggtgtgtcttacatcgcacatgcctttcttttttttttttcttgtttaagaaactatatcttatttctttaaaaattattgctagggcctaggggtataaatttttgtctttattcatttttgtttttagtacgtaaataaattaagataaaattatagtacacctcttaaaatgatattttagtagacactttcgattaggggtgttcataaaaatcgaaaaaccaaaactgacaatcaaatcgaccagaccgtaaccgaattttcagttccacgtcatcaccgaatttgacgatcggtttcagtttcggttcgtttgacatggcggtcggtttcaatttttgaaaaaaaaaataatttaaccaaaaaactgccaaaatcgctcaaaatcgccaaaccgaaaaccgtcaaaaaccgtacggtcacttttatacggttatattttctaaactatcggttacggttttcgtaaaataaaaaccgtaaccgactggtcggttataaaattataaaaaccgattttcacccctactttcgatattaagaagagttttttagtctattttttatgatcgtgtatgttatagttatataaaattatatttaaatttttaaattttttttgaataatttactatgctgaaaataaagtttaaatattttgttgcactagcgactattttttcttgtaagtaactgtttaaacctagcttattttcgacgttacaaactatttagattttttaaaaaaatttacaaataatcttaaatagctataacataacgattttgaagaaaaaaaaaggtaaggaaataacttttttaaatgtcaaaatggataaaaattctactagaacgatgcttaaagaaagtgtactactagaaatttttaataaattatacttcatttttaatttttatttatatgttgatgtatattgtaatgttttaggatctttcactaactttaataaaatttcaaataatttttgctatcagaaacaaactttaaaataatcaatttcatacataaatttcaaaacataaacacatgttattttgtacgttcatgaaataaaatgttttgaaatatattttaaataagagtatttattggaccacatcgaatgttattatgcttattcagatctaatttaattatatattgagtattagattttacaatccgatctaattcaattaattttaatcatccaat

SEQ ID NO: 220975 - DNA, 1535 bp, Cannabis indica
acatatagaaaattattcacaaaatttgtattagtgaggcaaagcttatcagcacccttttagcacaacattttaaattgatacaaagacacacacctaagacagaagtagagaagatgtatgtggatatagcaccctatgcatcatgtgtgagcagcctaatgtactacatggtgtgcactaggcttgacttggtctatgcactaagcatggtcaacagattcatttcagatccagggaaggagtattggttttttgtgaaatgaatacaggtatctaaaagggataataaatgtaggacttatttacaacaagtcaaaagatgaaactaaagtgaattatttatgttatttctcactatgcatgaagcagagacacaaggaaatcaattataggatatgctttcacagtcttaagttgatgtgttaactggaaaatctaatctccaaaatgtggttgccctgtcatcaactaaggatgagtatatggctgcaaaagaggtcataaaagaggcaatttggctcaagggtcttacaaaggaattgtggtttaaatcaaatgaaataataatgaactgtgacaaccaaagtgcactgcatttaatgagaaatctaatatcccacgagaggtctaaacacataaatatcaaactgtacttcatcagagatatcataacagaaaatgaagtgtctatgaaaaaaattggaacaaaagagaacccaacaaacatgatgaccaagtatgtgagtttagctaagtttagactttgtctaaacttgctaaacatcctcatgttctagttaagggaaaaagtccagtccaatcccaagtctctatggctaagtcctcacttaatgattaagggggataattgttatgtttggtcactaattaagagacatttcctaagctacccatattaactgtctgttatgacagttagaaccagttccaaaccttataagctataaataactactcatttgtaattctaggcactgacatagagagggaatctcatagaaggttagtgagctatttttgagagagaaaaagaaagaaatggaaggttataatggcatagtgtgtatctcatcactatagccacaagtgaggataaattgtaattgatgcaagacttcattgagtcttgagttcgagtattcattgagtgaattgatttccaactctattcttagctcaataaagattctaaagccattggagttgttctggctagagagtaggctggtgatgtcaacttcatcatcttattcgaacttggttaagatttggtgttctgttttatgtctcatatattttgttaaattcagttcatcattttctttttagcattgcacttgttctaattcacattgcatggtcttgtgtttttacaacactaactaattagaagaatataaactttagtagcatatggttggccttgaacggtactactacttgttgccttgtacctttacacaatgaaaattgctaataacattttaagttggccgatatcacgataaata

SEQ ID NO: 220976 - DNA, 1337 bp, Cannabis indica
ctatttgaaacgaatagataattcattttagggtaagttcatttaggaacaaaactagaggtggaggcagttccttcctagtttatggacttacattgtctaagatggtgtgcctgatacattacccacaagttgggaaactctaacagttagagatctccctatagctgagactgctattaccgttgtcaggcactctgagcttgccatagctaagacgaaatagacgtgtcgtagggtatctcctcatgaccctcacattgttgagttcatgatgagagagagggtccataatttacaagaggctgaatagccctaagctgaccagcttgaggctgactaggttaaggagcttgcagtcgagcagccaatagccggcaaggatgaggagacctcaaccggtcatgatagtgattttgatgctgagcaggctgaacttgttgctggaaaaagtactgctaggaggcattacaagacttgcatagtggttttgggtaatcccctaggctcttatcatgatgctgggaggcatatggtaaccttgggtcatccgtcaaaggtcaggattgaccatgttgctgaagaagcccatgaaccgtggatccttgagtatgggaaccaacaacgatggatatctcctttgtcttctctgtcagccaagaaacttgaggagattaaggcaaggggatttgtgggaggaatccgatgcgacagacccacaagagattaattagcgcatgactagcatacaactagattgtctggtcgagtcatcacattgagcaacaggttttatttcctttgcatccttacatcagggacatagccaacttcttcaggctatgtctaacccaaatcaccttaaaatgtatcaagtatctttcagtgctcttctttccttaagtacagcatggctagccacaaccctcaccttatgaggttgggtgttactttgagctaaaatctattcctctgtagggtaggtccagatactttttctttatctaattaggctatcagtggctcgataacaccaacaacatggaagtgtcaaaagattgggaggtactcccggagttacatccttgcctctggcattagatatgttagtcactgctttaagacggtgccaacatacattcgctccatccctactctctagttgagggatagggccaatcacatcttgtctcttctagtggagaggcgtgacatactcaggctggcttgtgaggaaaatttttggaggtacggtgtacaccctcctacgcctagtactgagagtgctggaggccctcccgaaggtcctagcgacactcttatggtagaaggagcta

SEQ ID NO: 220977 - DNA, 1574 bp, Cannabis indica
actgaaattgtatcgcccaaatccaccgaagcactacctcaaacaataatagttaaattaagaaattgaaaatgatgtattccatatgctgaaagagagaaaaagatcattaaattataaagttattactctttcttttaaattactttattaacattttatttttttattttatctcaaactttgatataacaccattagtaattctatttctttttacataatttaagaatacttccatcaacttcactactatgtcttttaaaatatctcattattttttctattatacttcaaatttttacataacactattaagatattatcaattactttattttttctttacataatttaaatgttatatattttatgtatttattaatatagatgatagatgatatgaaagaaagagaaaaaaataataataaaaaatatttaacaaagaaataaatcttaactaaatatgaagatgcatttttatgagctaaaatagagaaatattataatttatctattggaagttctcaactataatttaattttgtacctattatactttgtaaacactacatttttattaacctatctttctaatattgatattgattttaagagtttagaagagttattttaaaagctttgattgattgtgttaaaaatagttgctgcaaaaaataaaaagaataaatttatcgaattaactgtatcagagctttattacatgatagagaatttttgaaatatcacatttcatattcttattactatgatgatctagtgtatgagtcattacccatccacacaaaattagtactccttaaggctgaacctaaattctaaatttataccttaaatacacttttaataaagtatttctatctcatgtaagactctattcactcacttacacacttcacttccacactttacttcttattttcgtaaaattttacatagtttcaatagatgttgtatgtatgaccaaatggcgaaaagatttagttcgaaagaatacagattatttttttttattgagaaaaatacatttgctaagaaaaaagagattaaatatatttgtatctttattaggtgtatcctactgtccatggcactaatggtctttcttgtttaatcaataaacaattgctgaatctaagccaactaagagagagagacatatacagaaatattctagtggtgagtattgtaatttttgcttaacactgcattggcttggcttggcttggcttggctccgactaaagctttcctcaattctgagccgcacttttatttagtttttttcttctgaaccaaatccctctttattctacttgtctaaagaaagggttaacccttgcaattaaaagttgttaaagggagaccaagaagaataaaacaaaacaagcacttttattttagtaaaatattataagagaattagtaaaaaaaattattagtgtctagtatttttttcggtattatatcgctattagtgtaattaagtatttaattttatataatttaaaaaataactttaaaaaatatagctaactgttaggctatttttag

SEQ ID NO: 220978 - DNA, 4716 bp, Cannabis indica
tgggggggtgaatatagatccttcactgaatctttacaacaggctggtatattacatagaaaaccttgtcccactactcatgaacaaaatggaactgctgaaagaaaacataggcatattgttgaacatggtcttgctcttttggctcatgctaatctacctttgaaatattgggatgaagcttttaggacagctgtataccttcataatagactccctactcctatcctctctcacaaatctcccatacaagtcctgttcaacattacacctgattacaatgcccttaaagtctttggttgcacttgttatcctaacattcggccatacaataaacataaactagatttcagatcctctccatgtacattcattggctatagcttaaatcacaagggctacaaatgtattgatcaaaatggcaggttatacatctctcgagatgttatttttgatgaaaattcctttccttccactcatcaaaactctcaacttgactcacctattaatgtcatgtctggtgcacattctaaaattcctactgctactacttcttacactgtcagttccttattttctgatgatatttctatggcaccaactgactcatctgctccattgctttcttgttctcacatccttgaggatgatacaacacacatttcacaggaatctggttctccaacagcttgttctattccctctgctcagcctgttcaacagcagactactgtcattcctagttatgttcttgagcatcaaaacatcagttctacagttgctaactcatctgctgcatttgatcccgattgtcttgttgctgatcgtgaaactgtgcatcatgatcctgctgttgttactggtgcagctactacacattcacttcctgcaacttctgttactggttcagctcctgttgcagcaagtaatactcactcaatgcaaactcgtgccaagactgggatcaaaaagccaaaagcttatcttgttactcagcttcctacctctctcaaacaagctttgcagcaactaaagtggaataaagccatggccgatgaagttcttgctctcaaaaagaataaaacttacactcttgtcaagcttccacctggtaggattgcaataggctgcaaatgggtctatcggattaaagaaaatcctgatggtagtgtcaacaagcttaaagctcgattagttgccaaggggtttcaccaacaaccgggtttcgatttcacagaaacttttagtcccgttgtgaaaccagtcaccatccgtgttgttcttactcttgctctctcaaaaggatgggacttaagacaacttgatgttaataatgccttcctaaatggtgatctacaaaaggaggtgtatatggtccaaccccctggttttgaagaccctactcatcctgatcttgtttgcaagctacataaagctctatatggcctcaaacaagctcctcgagcttggtttgagaaactacacagctgcttgctcaatttaggctttgtctcctccaaatctgatcatagtctctttattagacacacaccattatccatgacaatcatccttgtctatgtggatgatattatcattactggaagtgattccaatcttatatctcactacacagcagccttgaatgcacaatttagcctcaaagaccttggcaagcttcatttctttcttggtattgaggttaccaatactgaaacaggtcttcatttatctcaggctaaatatattagagacttactccacaaagccgatatggatgaggcaaagccatccaacactcccatgatcagtagtctaaagctctctgcctatggaagtccaccagttgacaatcctcaacaatatcgttctattgttggggccttgcaataccttgtcataactcggccagagatttcttatagtgtcaacaaagtttgccaattcatggcaaaccccttgcaatctcattggaatgctgtcaaacgcattcttcgatatctaagtggcacaagggactacggtcttcatctaactcgatcaccacattatgaacttactgcattttgtgatgcagattgggccacggatcctgacgacaggaggtccacatctggctttgccatctattttggctctaaccttgttgcctggcagtgtaagaaacaacacacggtctttcgaagtagcacagaggccgagtttcgaagccttgctcaaacagtcaccgaaatcacttggcttcactcattgttcactgaattgcatattttgctgcccaaagctcccacgatctggtgtgacaaccttagcacaatccttctcactgcaaacccggtcttacatgctcgtacaaagcatatagaattggatctatactttgtccaatgctaagtttgaggggtgtgttagggatagttggttatagcttactgttgagttagttatttctgttttggttgttatgccacctgtcattagtttgttcagctggcagctttgttttctctcatatataaactcttgtaatctcacacttaattgatgatgagttctctttgttcatctcactctttctttgcctttctttgtctttctctgtttccttcttctttgttcttgtttgttgttcatggctaagaggtttaacacctctaacatggtatcagagcaatggccgccattgcaggcaaacatggccaccatagatcctgtaaactcaaactctcatccctcacatcaaagagcaccagctgctgctacaagaaatcgaaccagggaaggagatgatgcaactgtctacttcaatcattcaatttcgattaaattgaatgatcacaactacttactttggaagcagcaaatccttgctgtaattcgtggaaatcggctgatgaggttcattgaagacactgctccaccgccacagtacatgaacgatgctgatcaagctgccagaaaactcaatcctgagttcatcgattgggatgtttaagaccaattgcttgtctcttggctcctctcctctatgacagagagtctccttacaagaatggtgggctgtaattctgctagacagatctggaaagcccttgagcaacactacacactgaaggtttcttccaagattcttgaatttcgaacaaaattgcagaaactaaagaaaggtactctgagtttgaatgattaccttctcaaagtcaagcaaaatgtcgacttgttggtctctgttggggaaattctttcggatcgagatcatattgctgctattttcaaaggcttacccagcgaatatgatactttcatcatctccaccaacacaagaattgaaggatacacagttggagaaatcgaagctttacttcttgcatctgaatctcgaatagagaaggaggatcaagaagtagagttcagtgctaatatggtctctacagatcaagatccagctatggaagcatttcttgctcaatcaaatcgaaatttcagaccatttccctctacccgaggtcagtacactcccaacaatttcaatttctctaacttctcttctcctaatttcaacaccagaggaaactatcgtggatctccttcacgaggatctagcagcaatcaaccttctttcatgacaagaggaagaggcaatcggttttctcctggccagaacaagatccagtgccaattgtgccacaaaattggtcataccgtaattgattgcttttatcggttcgacaaaagctttacaggagttttccctgctgcagaccagtctcaacttcaagctaatatagctcaaacaacccaaggaactgatgacaattggtatcccgactcgggagctaccaatcattgcacaccaaatggccaaaatattatgacaccagctgagtttgagggttcagaacagttgtatgttggaaatggagctggtcttcccatctctcaaattggtaatgcctatctcttatcaaattcttgcaataaacctcttgttcttaccaatttactccatgttcctgaactcacaaagaacttgcttagtgtttctaagtttgctgctgacaacaatgtctattttgtgttttatcctaatgtgtgttatgtcaaggatcaggtgagcaataccacactgctgactgggagacatcacaatggcctgtatacttttgatcctagccaaattcagctgtctgctaccccacctctcagtcatgaccaacctgtccagccctctgtacatgttgctaccactgcctcttcccagcccaaccaaaatatcagcaattcctctctgtgttttcagtgtaaaactagctgtagttcatttgatttgtggcacaatcgccttggacatccctctgagagggttgtcaaaactgtattgacttcatgtaatatacctcatatcaataaaatgtccaacagtgtgtgtaaagcctgctgtttaggaaaaattcacaaactcccctttccaaaagtttctgaaacatgttacaatgcccctttacagcttgtgcattccgatttatggggaccctcattcaccacatctcacaatggctataaatattatatacactttatagatgcctattctaaattcacttggctataccttctcaaaaataaacatgatgcaatcaaagtgtttcatatttttaaagctgaagttgaattacaattaggcaccaaaattaaagtgtttcaatccgattgggg

SEQ ID NO: 220979 - DNA, 1434 bp, Cannabis indica
agatcctggtaaaataatatccaacaaaaccaacgtgaactcaaccaatgttaaaatatgaaaaaactgaccatattgttatttatgagagccttgtgttggattctatatgaaatacatgcaaataagactaaaatcattatagcattatcagtttgtaattgtttataagtcaattattggagcgtcaataaaactgatggccaactgtaatgcaactacataaaaacaaaaaaaaatcaagacaatgttgccagatccatggcacaagatgaatacaaatttactttattcgccgcgatcagaattgaatgaatctaagattgaaagtccaaaaaataatgttaatgcaacatgtatactattagctactgtagtgatacatattttttgaattatacctgatttagattgatcgggaactcgagatctatttcttacaagtctacatcttctgaatctgtagattgaaattaaattagttttatggaatttgaatgaagttttcagggttgattgtatgtttcaaaatagtatttctatagaatctttcatcagtcagtaatggatgattattggtttgattttgtttttcgtctcaggtgatgtcattagaattaatggcgtttctttgtttgctggcattgattcattgttgccgatgtccttccatcataggaaggcttcgtttctctaatgcgtggaacgtgcaacttcaaggttagaataaaaagtatttttgttatttttttattgagctgtataaatatttagtagaaccacccacaatttttatgtaatgttattgacttttttagctgtaacagaaaaaaaaacactacatttaatatgaaagtatattgaaaatagaaaagagatgaaagaactcctacaatattatttttcatacctatttgagttttataacacaccgtttattatataaaatttgtaatttaaatcaaatgcacattaaggaaagtatcaaaagagagaatggtcttctactattctctctagtggtgtctgtctttcatttcgtgtataccatctgtaagcgtcctcctccttctttctagtgtgttccttctgtccttaccgagtgtgtgtgtgcgttttgtcctctgtgtgtgtggtgtccgtgtctcctgtgagcttgggtctttttgtattggggtggtctgtgtggtgttaggagtgtcctttcggtttttttctgttttgtttgggtggagagtttgttccctgtgtagttccctttgttttgtcttttgtttgtctatttctgagtgggtggggttggttagattcggttggtgaggtcttaacttccaggagatttctttattccttttgtcgggtattaatggagtcaatcaatgcttcaaactcctctcttaaaggcaaatgtttttcttgccttgaaacctctgt

SEQ ID NO: 220980 - DNA, 4127 bp, Cannabis indica
ttgggtttgattagtgtattttttagctttggaattactttaaaatgtgttaaaatgagcaagatatagttttaacaaattgcatgcttaaaactctttttcaaaatcttggcaaacaaacatttttttaagaaaattttaaagtgtttaagctgacatgaaaaattatgaaaaattaatgtggacttcgaaaatatgaaattattacctataaaaaattagatttttactcaaaatagattggtacaaaaattatgtaaagctagggaaaaaaatttgtctctagacaacaggcttttcccttggatgatgcttcttacagcggggacactcaacataggaataagcttgacatctgcctctaccttgattcccacagaacctcttactctgacccaagtcacgtgatattaggaaggtcttcctcttctaatcaatattggaatcaccatcatctctagctaccataaccagaagtaggaagggtggtggtcccaccaatacttagaatccatcgaggcagttgcagaaattacactacacccttggcttgaagagccttatcaaccatcttaacataagttgttgtatcatttattttaatatccagatcatgtctaatcttggcattcaaacccgccaagtatttttacttcttactaaaatttgtaggcactatacccaaagctaactttgctagtcaaccgaacattgttgtatattcgtgttttaaccctaaaataagtcggtgaactctcttcttttcgcactaagaactgcctcaatgtagtatatggcattaaatagatcttgaaactcttcccaagttattgtagtgacatcccgagtgaaggacaccatttcccacaacacaagggcattctcttggaattgaaacatggtacaggtcactcggtcattcccggtaacacccataaagtttaggattctttccattactgatagtcgttgttccgccttcataaaatcaggacctcccaaaaaggctagagacacatttgcgaaatctttcatacaaaggctccaaacagttgccaacaataggttgttctactgtcctcattggaaccaaagcagttagtacttgatgagggggcatatcacgcagatcctactatattagcctttggaactcttcctcttgttggttaatttgggcttgcattactgcaaactttttctcccaatcctcccattgggatttggaggattttgatctccctcactgccttcggtctcaaccatattaccttgactccttgtgtttcattaggtttctatattataggacttagcatgtgaacccataagtcatgtaggtcagacaacgatcacatataatctaaatactacatacatgaattctaggcaaatcatttaaataattaaaatattattaacatgctctctatcatgcttttctaatcaaataaactactaaacaagaaaaggcttactgaactatgagtcaagcttgcctctgacgatgattgtacatatcttgatgatcttcggtaaacaacctgacagctctgatacaaaaattgtaacatactaatgcttaggcacactatagtgatctactatttattgtgcagtcctttgctaatcaaaggttttttcgaaaattataacaagttaaaactttaaattacttatatatatcgatacaaaaatttgagatcccatctttaaaatttacattcatattcaaaatacacttatagacatgtcgcactgtgactacaaaatgtaggcctaagtcgtcccaagactgaactatccacgtccaactatcctaatatatacaatcatccccgagctctagactcaatggtgctcagccttagcctttcatttacatacacatacagacaatatttgtgagtcgacagacttagtaagaaaaacatataacatattaccgacttgtatttaggcgctcatgcacctatttaccaggcgtagatgatcaagaacgttcttaacgaaagtgcaaactttgtatcccatacgttaagtactcgtctcatactaatgttagtagggctgaaccgtaccccgagtaccactaagtgttgttcgacatgcactacgtactcatcccgtactagtgatattaacacttgatcataccctttgaacatcatatactgtacaaatatactccgtaccgttaacgtactagtgttcgtagtatctgaatcgcttaacacagcatgaaatttacatacatacacatataaatatacatgttttataccaatcttatctcgtttcaaaattcaagtgtgttggtcgacctgaatgaaaaatcatgcgctgaatggaggccctatgttacaatcacataaatgggtaaacaacttgctaaaaccttctcgggtacctaaacttaaaactagaagtttcactatcgatagatagcatgggaataccataaatatcgaggaaataaaaaaattaaggctcttaaaattgctaaaatcggtaaactggatttccaaaatggtaaattattttctgggaattgcttcggaaaatggttaactatttctggagaactggttaaccgttttggtgactcataaatttagactagacttttaagccacaactgctcgctagattaacgagaatgaaaaaagtagttaagtaattaagagagacacaataaatttatagtcgctcaccccctatatcgtgatagtaatggggctacatcttcttcgagtttttatttctcacgagatagtaattatagcaatagaataagtgtcaaaagctccaaataaagacagaaaatctagagagagaagctctgaccttgtgggtagttttctgaatgtgaaaaatgatctaagggaactctccttttataggtgaaggaggaccataaaaataggggaaaattcaaataagatgcttttaaccgttgatgatgatctaagagtgaaaattagctcttggtggtgatggccattttttggagcctggtgggtcctactgcgagccagatcttatttttataactctcttgggggtgaattttgacaacgatagctttaaaattacatctggagtgtgagacatgaattgatagagcattaaataatcttcaaaaggcaagtttgagttatggctattttactaaaggaagttcatgacctaatgcccaggttgacatacaacgcctaggttgacatcccagcacccgggttgacatatgatgtcaacttagacgttgcgtaagtgtaaaaacttccaagagatgtactttaagatacctaagtgatattttgacacaacttagtccatttatattttatggtaaagttggtcaccaattctcggagatcttgctattttgtagatatgagagatacggaactcttcattttcgggtgagcggaaatgagaaattcaaagttgtgaatttaatttatctaacttcatagatcattgtaattatgaaaagtagatgcaaaatcaaaatgacatcaaattcggataagcaagcaaaacccaacccagcgcaccaggccttttgtcaacctgggcgatgggccatttctcctgagctcttgggatttcgtttttgatacttccaaggcttctgaacatgaggatgaggtctcctacccaatttttgaccattttaaattcaggggttgcatttgatttggcatttgatcaaaaggcagcatccgaggttgattgtcaacctgagcacttagcccaaccctatgtcaacctaggcgctgggccctatttccaaggacacaggattgtcgttttctccctgaattttcttgaatcttccttattttcaatgatggaaaaattcctacaatactttttgctgaacttgatcagaaatagcccaggttgataatatgtcaacctgggcgcagggccaaaccccaagcgtcaacctaggcgctaggtcctccttttggcccttcgaaaatttcgtttggtcccctaaaatagttgaatctcaatattttctgaaaaataatatgtttctgatggattttattttaccaggatcttagatctactcacaagtatgtttattaacaccttaaatatgaactttctaa

SEQ ID NO: 220981 - DNA, 1576 bp, Cannabis indica
tgaataagattcattgtattgctcacttttcaaaatttacaaccatctattacaaaaaaatcattacatcttaagctctactcaaaaactcaaaataatcccaaagtttttgttttcattttaaaatagcaataagtccaagaatatagacgttttttggctgtattttcagtttccaatatttactattgtatttttaaaaatgagaatagaaaattattttttgtcattataaaaattaaatggtgtttagctgatcagactttttaaaactatttttagatttttttgggtaaatatcatatcagaccacgtgtttagcaaaagttactaattggaccctctgttttgttgaataacaaaatagaccctgtattttctaaaattgtacaaatatataggaccatgaactgttgttttgtcaaaataaaacttaataattatctaatataaagatgctatgacaaaactggttacattttttatatctgttcgtgtaacaaattgtcttaaagttggtcatattaaaaaataaaattgttaaaaattgagtttagggtcctattttgaccattttttgaaaatataaggtccattttgtcatttaacaaaacagagggtccaattggtaacttttacaaaacacaaggtccaaaatggtatttacctatttttttactaaaaaatattcaatattctacaccataccatgacatgaacacatcataccttgaactgaactccggactcagacctagaccccgaccctgaattctggcccgtacctaaacctggacttggaccctaatccaaaacccaaactcgaacccggaccttggaccccaaaccctagctagacccaaacccagatctggaccccaaacttggggctaggtcagaggttctaggtcgggtctagggtcgagtctaggtttgaaatctgggttcgggtcatggggtttaggatcttggtccggatttggggttcgagtttgaggtctgagtctgggtccattattcggggtccgattctgttgtttggggtttcaggtctggggtctaggtctattgaccaaggccttggttcgggtcagggtgagagacctaggttcaggtctatgtctagagtccaggttccgggtctaggtctagactttgagccttgatatgggttagaggtttgagttcgcgtccattgtttaaggtttaaggttcaggtttggggtctgagtctggatctaggttcgttattcggggtccgagtgtgttgttcaaggttcgggtccggggtctaggtctgttgaccaaggccctggtttgggttaggatcagggtctgaggttcgggtttgggtctagggtctagggtccacgtcttgacttcatgccttggtacaggttcagggtttgagtttgggcccgttgttcgaggtccaaggttcgggccttaattcaggtctaggaacagggtttgggtctaggtcgaggtccgattctaggcaccaggtccaagtctgagttcggatccagtgtttgggtacgtatgtgagcaaaaatgtaaaatataacatgttaga

SEQ ID NO: 220982 - DNA, 1622 bp, Cannabis indica
aatgtttctatttcatctcgttggaattaatggttattttccgacagttttggtgttgttgtggtggttcggtttgtgggtgtcaaaggtggaggcctcattttttttttttttttgtgtgttgaaaggacagggtagtataaatataatttttactgtgtggccgtaaaattgtaaatatttacccgaaacctagtatttttgttataattgtagattagttatttcatcattatttttatttttaattattaatttagctataaattttgtaataattatttttataataaatatattataaattaattttaggaaatttatttttattatttatataaatatgaatttatatatactttgagggaaaaaaataataatgtttttctaaatttttcgtggttcaaaagttaaacatgtatattttttgtaatttatttgtaaatatttatctactaaaggagaaaaaaaattcaatgtatatatccactacatatacacatatgtatatatccactatttaaatatatattttttttattatatgtacataggtattactatctgtaaatattatttatacaaaattttatatttatatacgtctaacaattttatatatgtaagtgtcacattgttaagaaaattttaattctaacaatttgtttaaaaaaaagctacacatcctcttaaaataataaaaacaaaaagaaagacatataaaaatatgtatatcattcttctacaagtacattaaatttaaaagtctcacatggtttataaattactttaagtgttatacgtataggctataaataataattttattatgtcattttgatttgttcaatagataatattttatttatgggtgattgattaatgttttacccattaaaattttatttttcatcaaatatataatagtatataatctattatttatatatttacatatttatatatttataagtaataattttttatgatagtatttataaattaaagagttatttgtagcataaatatctaattttaactttcgattataaataaatacctaactttaattttttacggtcaataatacctaagttataattcttgaacttcgtaggtacttgaccgttaacaattgatgcaagtatgtcaaaagttattttttgtgtcaaatatagcataatttttacatctttcgttagagatgatttaaaactcattcagtataaaaaattagtaatctaaaaagtttataatttttgttcaacaccgcgcgaagtgcgaattagttctctagtaataataataagcacttataactgattgtttgaatttaattttactacggtaatgttaagatatttttagcttattatttatgttatttttagagttaatttttttttttttcatttatcactttttggaacagaattatgattgttttcttcaattttaagttttgacacttgaaatgtataaattggttaaatctcacaaaaagatgatctataaaatagagaaaattatgcaagaaaataatgttaaaactttaagcctaatttagactatgttttgatcagattttggagaaaattgaaatataaaagttctagatctct

SEQ ID NO: 220983 - DNA, 1849 bp, Cannabis indica
aaaatagcaaaccatttctagatcaagtacagaagtcttgccaatgtggttgctgaacttgcttggcttaaatctctatttttgagctccacttacagctgccccaactttcaacagtttggtgtgataatctcagcacagtttttctcactgcaaatcatgttcttcacgccagcactaaacacatcgaattggattcgtactttgtctgggaaaaggtttagactcaacaatttgctgtcaaacatattctagtagtagatcaactagcagatgacctcactaaagctctttccagtcaaaacctctctttttttcgatccaaactcactattgttgatgccaatgtgagtttgcgggggagtgttaagggttgtttgttgtaacagttagttaattcagttagaccgttatgttagttgactagcttcttgttcatttctgttagtttgttgtctttttggttataactgatcttaattagttgctttcagcttccttgtacaagtactgtactaaccgttctcattcaatacaattcaactctttctctccatctttgtaattctttcttctacctttctctctttgtttccaatttaagtgtttagtgctaatgttcattctttgaataacaatgtcaaggtaattcaactctcctaacagagagttaagattagtttaatgatcatgactacacttcttttataatataatcaaaacttgaagtaagtagtacttatatatttatctttgtcttagtgatagtccttttcaagtcttctaccaccatcactttgtcaaatttaattatttagattccatttttaacactgctaggcacttcagatcatattttacaaatatagaaaatttaaatgtttttatatttaaattaaaatatggaagacataattttaaattcaactatttataaattgtagtatgcaaattttaagtgggtatattcagactattaagaattcaaatgtattgtgccttacaacacacttctttaagttcttatgtacaattacaaaatattttttcgaatgaattacaaaatatttattagttgtgataaaatgtaagaacttacaaagaaaaaggaatctatacgtgttattcattattttactgtcgatacaacacactaaaaataaataattaatagtattagaaaaatggtaaggaatagtttgaagtgtcaagcattataagagatatcaaagtgttgttggtgtaatttaatattgggtttcacatttttttaatttaataaataatataagaaaccgttaaccattcacaacgtgcctcatctgtatggtgttaagcaccttaaagtgcctaataacaatactaataaaattacaatgaacaaattcaaccataaactacttatgtaaccacataaaagaaaaaagtaaataccttttcaatattatatttagtaaaagttaccgatcaaactcttttttttttaaataataaattggaccatgtacatatttcataatatggtataaaatactaccctaaactcaatttttcgttatttttttttttaatataactagcctaattttctaacacgaacatatgtaatacaatcagtctggtcataacacattgagatgaacaatttttaagttttatattttttttttatgaaaattgagttcagggtactattttgtacctgttatagtgcgatttttttcctagaaatgcaatacaatctcgtagatagttgacactaggggtgtgcagaaagtcatccaatccaatcccaacaaatctaatagaatcagatatccaatcacaattggatcggatcggatgtaaa

SEQ ID NO: 220984 - DNA, 2369 bp, Cannabis indica
gaaggactggttgaattagagaatgtcaaatcagaagataatcctcctgatgttgggactaaggtcttaacattaaacaagttcaagcattacttggacttgatcaatatcagaagttagtatactgagatttttggaacaccaaccatgatggctttattctttcttcatgccgataattttttaatttgaagaaactaggttaaatttgtggtataattcctccaaatgtaaaggtctccaaaagttgttcttcttatggaaagttagaagtcattcggaaggctgttcctaaaagtctatcttgtccactctagaaggagtttccaaggaaagctagtcttcttccgaaaaagagtttttgatggatatttgtttctcctgaaagggagttccggatagttgactccagttgtcatctttcctatttgggaagtcctttcagcgtatgctctggtcttcctttcaagaagcgtatgtctcatccagaagcgctctaacttaagtttttgtggagactctgttacgataagtttgttatgtcgtaactaacttaacaacttaacagtttcagccaccgaatttggaatccatatcccttatttataaataccaccaatacttatcatttatagtaagtgataaacatacgagttttgagaggtgatttcgaagagagagattgagaggtagagagagtttgggtttgggttttgtttgaagaagcttctatagatgaagaagtttcttgggtaagagtgtgagagataattaaacactttgagaggatccaacagagaattgatcttgactctaatgtactttgttcttgctcattcaataaagaagatttcggtggtgttccagaactaaagtagagtcatagatcacatcgatttataagacttgaaccaatatatatcttggtgttgatttaaatgagttaatcgctttatcatttctggttttagatactctgctcatccctgtttttatctccaattagcatttgtgaattgttactcgtattattgttaattatttgttgattaagttttagttgatttgattctgcatattagttgtaatattcccacacatacattttatgtaatgatatgaaataatcaaacacattctatccttaataaacgagtaataaaaagctactacttatcaattattatacaattttttctggattagagtcagaagaattatgtttgagtcgaaaatgggtcgacacaattattataaaattaaaacaaatcaaacacgacacaattcacttaacgcaaatttaatacattttttttttaataaaataggataaaaaaattcctaaatctaggctagctcaagtggccataggagggtgcgtgtgcattggaggtcctggttcgagtcccagattatgcattgtaatatataaaacgcttaattaaaaaaaatatatcttaaaaatacttaatttttatgaaaatatataaataagctatacataagggaaatttgaaaaactatacattaaaaaccctaatattttatgcttaaatcaatacatttcaaaataaaaaatatatgacacttttatcaaaaatccaagaataaccctcacataacaacaccccaactctctctcttcctctatctctctagcttctctctcaaccgaaccctcaccattctctctgcccacttcgcacgaaccgaaccccccaccgcccaccatgagtcgagccccacttccgaccgagaccagttcgacggagacccatagccgcaccactccgaccgagacgccgacggagacccaaagccgcaaaaatttcaatttttttgggttttaaggtcgggtccaatgggcccgatcggacggggcatcgggccccgatcggacggggctcttggacccgaccttaaaacccaaaaaaaattgtatcgggcctatcggacccgacttcaaaaccccaaaaattgccccatcggatgggcatcgggcgggcattgggccccatcggacccgacccttaagccctgaaaaattgaaaacaaaaaaacccaaaaaaatttcagagggggcggtcgggtcatacgcggtggtgagggggtgacggcctgggtcgtacgcggctgcgggtctccgtcagactggtctcaggcggaagtggggctcaactcgtggtgggcagtggggggttcggttcgtgcgaaatgggcagagagaatggtgagggttcggttgagagagaagctagagagatagaggaagagagagagtttgggtgttgttatgtgaggattgttcttgggtttttgataaaagtgtcatatattttttatttgaaatgtattggtttaagcataaa

SEQ ID NO: 220985 - DNA, 1958 bp, Cannabis indica
ttgattacaatatctataattggtaagaacatacattacatatttagaatacatgaaatgggggattgcgacaacttgcgtatctctctggcatgatcccataattatagggattacttttgtgcttgagcttcacgatatcacccttggaatgattaagtcttgatacacggttcggatcactctttgcttggttacccttgccctgctcggtcaagtaggctttgtgtgtgcagatgtattacttggagtcagctcagaacattcctccagctaagtgtaaagaataaagaacacgtgtcactagtacatattgccatgtcatagtacaaaaatgggataacattatctaattcatgactaaaacacgagcatcagtcagaagtcttgagactcatattgggcagctagcaagttttgtaaagaaacaagctcaagggaattcgcctagcactagtgaagtcaaaactaaggaacactgccaagcaatttccttgagaagtggtaagaaatatgaggggccaagagcagattagtaaggttaagaagggctttaggatcaacaggcaccgatcaccaaggagaagaaggctagggacgaacaggatattgaaaatctactagaagaatacaagtcataagtagttatcatagactaccacataaaaatcccctatcgtaaaaggccttgctagaacaacctcgacaagaagctctaaaaattctaggaaatatttaagaagtttcacattaatataccctccacagaggcacttgagaaaatgccaacttacatgaagttcatggaggatattttagcaaagaaaaggaagttggaggattatgagacagtgacacttactgaagagtgtagtgcaatattacaaaagaaattactgcccaagcttaaagatctgcataatttcaatatttcatgctcgatattgggttcagttaaaacaaaagctatatgtgatttggggaaagcattaatttaatgcatctatccatcttttgaaggctaaaactgggagaagctctccctacaacagtctctttacagatgacagattgctccatgttgcatcctcgtggaataatagaagatttattaataaaggttggtaagtttatcttccctactgatttcttagtacttgatatggaggaagattcaaccattcccgttttcttaggaaaaccattcttagtcacagggcgagcgttaatagatgtacaaaagggggaattaacattgtgaggtcaagatgaagaaatgagtttcaatgtattttctccaattgacattcctacctgttgtaaggttgaattagtgaagaattgcaaagtcaaagttgataagaaaaaagggaagcccaagtaacagttttgaactgttcgacatcgtatcaaaagactgaagtgtgggaattgttaaggtgaatttagtctcatggatagcttcaacattggcaacattggaggacagttttcttcatttaatatgagggtcctattggatgcaagaggtggacttgaaccaaagatgaaattttataaaggaaattagcgcctaactatatgacgttaacgacaacactcttgggaggcaccccaagtaagctctcatctctagcttttggtgtaacattggggacaatgcgacaatcatgttttggggggtcaacttaatttttctttttagttatgtgttttaattttgtctccttaaattttgtgttaatgtcattgaaagccttagtgattgaagaataccattagttgttattcatttgatgaaacttcttaataaccgtgtacttggtctaattgttcttcagtttaatttttaatgcttgttggaaaatttaatatgattagtaaatgtgaataattgaactttgttatacatgattgactagggttagacgatttattagttgaattggatagaactt

SEQ ID NO: 220986 - DNA, 2865 bp, Cannabis indica
ttaactctatctttttttttttttgaaaataagcgttttcatatattaaaataagctagacctcatggtcgttacataaaatgttctccggtaaggagtggattggaatagatccatacatttggcggttaaaagcccatttggccacattatgggccgcaaagttactgttcctactaatgttcgaaaagttacaacatatgaaataaggggaagacttagtacaataggagacatagttgtcaagagcccaatgggtcgccttcccattaaaagcgttgatagctagtcttgagtcactctccacaataataaacttatactctagctccatcgcaacagaaaccgccaagcagcaggccgcagcttcaccacaaagggcctcagagagatccaaccgggacgtgtgaatgtgaatcaccctccccatatgatttctaactactaccgctgtgcacatactctccaggcccacacggacatcacaattcaatttaatccattccagaggtggaggagtccagcactccttcacaggcggcaaaggagaaggcaaaagagaagtatgtaactcggtgaaagaagcacggatttggtcaatacatttcaaaatattaggtgagctattattgtgaaccacatcgttacgcaatcgccagatattgtcaacaacaatagaggcataaagaaagacatcctcaacctggatacccctattgttaaggctccaaatgaacttcacccagtcccaaactcgaataccagtatcacacacagggaaaattccccacggagaggaccgccacaaatgcatcgccacatcgcatgttagaaaaagatgttccatggtttcctcccgaagtccacaaaaagggcatctagtgtcttcaatttgaaatcttcttccgatcactgctcgaactggaagagcctgagagaggatacaccaccagaggaccttatgacgctccataatgttgctattccacagtttgttccaaagagctggagcgacatcgcagtgaggcgctctttccgaagcttgagccagatacgccgatttacaggagaagtgcccatcactttctaaagtccacatccaactatcctttccaaggccagcgggatttccatctttcagaatagctgagacagtctcaaggtcgaacagactgttaagcttctggatatcccacccacccctaggagataatagatcagccacacagttgttatccattaacactccttcattcggtttcgggacgaaaccttttaaatgagggatccagggatccctccaaatactagtatctcttccatcagtcactctcttacaagcccctttccggaggatagttctagcttggatggacaataatatttttccaaaaccaggaatcagaatctttataattacagttgagaaaatcccttcccctcaggtacttcgcttccaggatcttgcaacataacgattgatcaccattcaataatttccaaccccacttagccataaaggctagattcatttcctttgtcttccgaaaccctagtccccccaaagacttgggaaggcacagtttatcccaagctctaaggtgaagaccatggttccctttctcaaagccccaccaaaaatcacgaatcatgccatcaatcctattcacaaggcggttagaaagcttagtagtttgcatggcatagataggcaaagacagacctaccgatttaatgagggtagcccggccggcttttgataaagttttggccttccagccctgcaatttagaagtgagattatcaagaatgaagctgaagtcggcatctttttgtcttgatctgaacaggggcagccccaaatactttatgaccccttcaggcgtatctatacccaagatttccttaatacctcttctcattccagccggggtatttttgctaaagaatattgatgttttgagtttattgactttctgtccagaccactcacagaacttctcaagacaattccaaaagcatttggcttcatttaggttggcccgacccaccaggatgaggtcatcagcgaagaaaatatgagatagcaccgggccccccctactaagcttaatgcccttaatagtccccttctcaagagcctcttccaaaagtctagaaaacacttccgctgcacaaatgaaaaggtagggagataacgggtccccctggcgaaggccacaagacggcatgatcttgccaactggaccaccattaaggcaaatgttgagggaagtggtggaagtgcactgaaaaacccatctacaaaacttttgagggaaaccgaagcaatcaagaacatgatcgataaacttccaactcaatttgtcataagctttaacaaggtctatcttgatcgcaaagaagccctctttacctttcttcctattaaaggaatggatgatttcttgcaccataacattattatcttggatattccttccaggcacgaacgctgcctgagtaggacaaataagagaggggaggagcggtttcattctatttgcaatgattttcgagataaccttatacagcacattgcaaagagagatgggcctaaagtggttcggtctctttgggttctgcactttagggataagcaccacatttgtagcatttacacctttatgcattctacccttctcaaaaaagtcagtgacagcatcacaaaaatcatccctaaccgactcccagtagtgtttgaagaaaaggacggacataccatcaggacctggagctttatgattactcatggcaaacagagtatttctgatctcttcccgagaaggacacctactgacctcgacctggttctcaattgaaatc

SEQ ID NO: 220987 - DNA, 1774 bp, Cannabis indica
cagcttacccggtgtttccccatgcctaaatatgatatttaaaaaaaactaaaaatatagaataaatcaattatagaggaggaataccataaaaaaaaaagtatgatttttttgcgagatagcaactacagaagttgttttttttattaaaacgaaactatagaagttaaagcaatactaaaaataattttgttaatgcaataagctaagaaattaattaattatacataaacgaaattaatttcttaatgaaaaaatcagttataaataccaaaactcatataaattttacatgcttctcagaagctctaagactcgaccatcaacccaccaccaaaagtaaaaccaacacaataatcaaattaaaatcagttacaaacttctaagaagctccaagattcgaccatcaaccatttaccaaaatagtcaatatccactaagataaaaaagaaatagaatgagaatatttatcagtagagttgtcatcattgtcagaaaaatcatcaaaaaagtcattagaattgtcattattactaggaagtctccgaagttagacatccgagttgtcaccagtgttggatgttggagttgttagcggagttggacattggaatatgagactgagaaactaattatatttaccagctagttgaaaatatgacactgaaaaacaaattatataaatttatcaaataaaaattaaatcttagaactaattacgtaaaataataaaaaaaataattacatctaaacctagttttataatacaatcaactaattatatgatactaaacataataaaaagataaatcaaatacgaaattagttacttaatttatatatatgtacttatttattaaatcacacaagccaattatattaagggttcgtttagaacgtcgtattatgttgtattgtattatattgtattatattgaattgtattttatgtaatatttttatgtaaaactatatgtagtattaactttcatgaacacctaaatatataatattttagtataaattaaagtttaatatatattatataaaaatatgatatataattcaattcaatacaatacaatacaatacgacttaatacgacgttccaaacgaatcctaaatgccttagtaaaaatctaacacagaaaaagcggatatgtaaaacaattaaattaaaaattaactcacataaatcagttacctaaataactaaaataaaaattaaatacaaaaaccaattacaataaacaaatatttaacaacccacatattaatgtaatatgaaaatcatctaaaaaataaatcaaagaaaaataacatgaagaaaccaatatccaataaccagtttttgaactgaatcactatagaatattatataagtagcctacaaaaatagttacttacatacgtctagaaaatagtaaaatctaatatgtactcatacttaaattcaaaaatctgttaatgttatatattttgccttttttttttattgttatgaaacctgttttttagtttaagaaactcgtttctgtgatattttgatacctttaccttttctggttgtgcttcaaagagagaaagaagctttaaaaacattaaatatgagatttagaaaatcatttacaacaatatgacaaatatataaaaaaggttttaaaataacaaaataccataaaaaaggataaggcgagcatgtttggtattattttctgttttttgttctaaaaaattgtttttagaaatgagaacaaaaaatagtttttgaagt

SEQ ID NO: 220988 - DNA, 5438 bp, Cannabis indica
tcttctcacgccagatgctctgcaaaatgtctcaaaggaagacttaattttcactccattttgggttcaaatctaccgacttcctttcctaagcaaatcaaaaattttagctgaagcacttggtaatattataggagaattcatagaagtgtttgatgattccactaatgaaggttggggtcccttcttgcgagtccgtgttaaaatctgcacaaataaaccattgctgcgaggccaaatgatcaggctgcccaagattaaggatgagttttggattgacttttgctatgaaaggcttcccgagttttgttttaaatgtggtcgtcttggacacccttatgagcgttgtgttgctttcatggaacgtatggacaacagtaatgatgacgatttttaatatgggccatggatgaaaggtgctaaactccctaccaatacttatgatcgatatcggactaattttgcaaaaggaaatgcatggcctctactcactagattgtccagaaccacccttacatccactcttccatccctccaaactcgacaccaagcctgtcctaaggttctctttgaaggggaatcatctagcagtcatcttcacttgcatcatcaacattttactccaactcctttatctaacccaacaaccaaccacacgaacatacatcacctccaaacttctgcaactttagatactgatttccaaacaattctatctcccaatttcctaacccgaagccatatcaccactcccacaaccaattaccacaataattctgtccctgtcaatccgtccaacatctcccaacctccacttatttctagcaattatccttccacaccaaatgccacttgcaccaacacactctctaacaaactatgcccccctttcactcactgtccgaaaattcagcaaccccacaacactgcaattccatcaaccaaaccaaccttttcacctgtttgcaacaccaacattcagcacgctacaacatccgcttataacattagcagcaacctttcacaccagccccttacacacccttgtaacaacaaaaataaacaacaaattctcactcccagcagtccaatctctacccaggcccttccttcatcttgcaacactcaaaaccagcaaccaaaaataaatatgagcaacccttcacacgagcaatccatcttgccttcagtatctaattagaatcactctccaagtaagtctattgctgacctttcacacctttatgtgcctgatttgcagaatcatacatttgctacatacccaccagcgcttcatcccattcccattaacactaaactcacatctctaactcttaccatgcctatgaaccaccttcccacttacacaaatgctaatgtttccactggaaaagaaaaccagctgccttcatgcactttcaaaagacaaaatgattctctatctatgaggaaaattttgaagagatgtcgcaacaaccatgaatcatcatcctctcctttgtcaagggacgatgatattgagactttagtttctgattttgagatttctaacttctccaatgactcaattgcggaggttgcaaggcaaccctgcgaatcatcatgaaaatcttaagctggaatgcacggggcttggggaactcgagtgcattgagacacttatattgttgtccaacaacaatcgccccaaattttgttttcaatggaaacaaaattgcctgtaaattcaatttctcgtttgcgataatttcttcactttccaaacggtttggagtctccacgtacaggtcttagtggcggtctcttgcttttatggaaagatgaagtagacctttctcttttgaactttggttccactttttctgactgatacatcacaattgaaaatggccaacgtctcatttcacatgtttttatggtgctcctgaagttagtaatagaccaacctcatggactctacttgagcgacttgcggatgttgcacctcaccttccttggcttgttattggcgacttcaatgagattctttataatagtaataagtccgaaggagcactccgaaatgaatctcaaatggatgcatttcgaaaagccattgacaagggttgccttcatgaaactccggtggatggtgatcctttcacttgggcaagaaactaaactgttgttaacactattaaggagcggcttgattggtgctttgtgaataatcattgggaatctttttatcacacacctcaagttcatcatcatgattatttttagtctgatcaccgagccataagtgccacattccatctgctttcatctcagcctagcaacactaaacgcaagagtcgattcagatttgaaaaactatggctctccgatcctgatagcaaggctatcatagctgaattttggtcgaactctgcctctttggaaccgatcactgctgttatttccaacttaaatacatgtgctgaaactctccaactttggcacgataataagtatgaaaagatgaagaaaaccatcaaggcttatcaatctaaagtggagaaactcaataactccctagatcaaacaagcagccactttgatgatttgaagcatgttgaaaccattcttgacgagttgttagaacaagaggaaatatattggcagcagcgttctcgggttgattggttagcttgtggtgataaaaataccaagttttgtcatgctaaagctaatgctagaaaattcaataaccaaattaaatttctcttcaatgttgcaggtgtcaaggcctatacaaatgcagagatttcatccattgctcatgactattatgctaacatcttcaaggcaggccatattgatgatgttgcccttgctcacacacttgactgtatccccatcgtggttactaatgatcacaatgcctctctccttgctcctttcaccatggatgaggttgaatgtgcccttaaaactatgagtgcggacaagagtctgggaattgatggaatgtcagttatgttctatcaacaacattggtctattgttagcgaacttgtctctcgtattgtcctaagcatcctaaacaatggcgctgatccttcaagcattaaccacaccttaataaccctcattccaaagataaagaagtcgcaccatatgaaagactttcggcctattagcctttgcaacgtcatctcaaaattggtcactaaaatgattgttgcaaggttcaaagaagtacttccgctggtaatttctgaaacgcggagtgctttcttggctaatagattgatcacagacaacatcttagtggcttttgagttggttcatactataaaaaacaaaacatctggacgccatggcattgcttctctcaagcttgacatgagcaaagcttttgatagggttgagtggaaattcattgaagaggtactgaaaaaaaaatgggtttcgcaagtggttgggttggacttattatgagctgtctttctactaacagcttctcattccttattaatggagaagtaacgggttccttgatcccatcacgaggcttacaacaaggctgcccactatcaccgtatctgtttctaatatgtgctgaaggcttgtcgagattactacaacatgaacaagatattgacaacctgcatggcttcaaactcacaagacaggctcccatgatttcatatttactcttcgctgatgatagtcttctgttttgccaggccgttgaaagctcatgcctacctatcaagagggtgttggacacctaccatcaagcttctggccaattgatcaatccagacaaatctgtcatgtctttctcccccaacaccacacttgctgccaagtttatttccatcaacacctctccatgccaattagtgaatgtcatgaaaagtacctaggcttaccatcctactctagaagagataaaaaggaactattcagtcatattaaggagagaattcggaaactgatgaagtcttggaacgaattaattttctctgctggtggccgagaagtactccttaaagcagttgtgcaatctatcccgacctgtgctacgagttgcttccgttttcctgtgtacttctacaatcaacttgagagtatgatggctaatttctggtggggaatgaatgaaaatggctccaagattcattggcgatcttggaatcttctttgcaaaaccaagggagaaggtggtatgggctttcgatctttcattcactttaatcaagccctcctcgccaaacaagcatggcgtcttgtcgagaatccaaattcactccttggaaagctactcaaaagcaaatacttccctcacaactcttttttagaagcaagcgtgggccattccccttcttttacttggcaagggatacggtggggtagggaattattgattcaaggcttaaggtggaaaattagtgaaggaagatcaattagaagtggtttcgatccttggattcctggtcatacaacttttacaccaatacaatactcgggtcctaggaatagtgtggttgctaacctcattactgatgagagacaatggaacctttccttcctgcaacaatattttagccctcttgatgttgaaaagatcctcaccatgccattgagctatttccccacaagagacaaactaatatggcatcatcactcttctggaaatttttcagtgcagagcgcttatcattttgcaacttcattggaagatgaggacctaagctccacatccaccttggctgcttcatggtggaaatttttctggtctttgagaattccttaaaaaacaaagatctttgcttggcgtgatattcatgatgcacttcctgttgccacttcacttgttcgacggaaaataattaccgagtccacatgctcaatttgtaagcaagcatgggaatcaaggggacatgcacttttcagttgtaagtatgccaaaacagtgtggagatctttgaaccttcacttcaattggcaggctgatgcatcaatgaaaaatggtgattacttgcaacatctgtcttcaatttacaacaaagctgagatggaacaactctttgtacactatgggccatttggactgagaggaataaggttgttcatggcaagaacgctacacgtgctgctgattcagccctctactccatggtttttctacaaaactacaagaatgcacaagtaaaaactgcttccgcagttaatgtcaaagcatcaggttcttctcaccatgtctctcctcctactactgctcacgttccttggcgtccagttgatgctgaagcttggaaacttaatacggatgcagcagctgatgcttctactagcattactggagtgggggcagttttacgtgatgctaatggacaagttaaggctgctctctcaatgccaatattgaggaattttaaatcacatgagatggaagccaaagctct

SEQ ID NO: 220989 - DNA, 1224 bp, Cannabis indica
tttggtatatgtcgaaattcgagaaaaaaaattgctaattagccaatttttaattattacataaaatttttttagctaaatataaaaaaattatttgtgtactgttataataatttaattttaatcacagtaggtaataagactaaaacacatttaatcacaataaattatgatttctgtgactaatacctttagtcactaacttttaatcagaacataacaataatgatttataattaatcataattttttttacttctaattacaagttttgttgtaactaaaaaataattaagtatcgatatcgagtcttatataatttaatataataattttaaaaaatatcgctatatataattagaagagcaccacctcaatattctaagaactactagtgcccaaaaaagaatgctcataaatttgtatcaaatatgtatacatacataattacatatatttttaaaagtcgttgactcgagtaatttgattaatttgtttgactaaatattatattaataaacaaagaaaatcttcaattatcttattcaaataccaggaaattttggcccatgaattcatggatcgatcgatcatatattatccaacttgccctattaagaattacattgttaatttgcttggactttcttaaatataaataatttataaatataaaattaaaaaattcttatctccataatccattgctatatataaagccgtccatgctagctttaacttcatcaaaaccaatcaaacatttatctctctctctctctaaagtgttgtttgatcatcatcatcattattattattattattattattattattattattattattattatattatattatattagagtacgtacttataattaagtactaataagaattaagatgaaaatgagaggtaacatcactaccattcttctgcttgtttctttactcgcagtgactattagtagtgtcgttggtcaaaataataacaaaaaaggaggagggcttcaggataacttttatggtaaaagttgcaaatcacttgagaaaattgtacgtgatattacatccaaaaaggttcaagctgatccaaccttgggtcctaagctcctaaggctacattatcacgattgtttcgtcagggtacgtatatattgtttttcttgtgttgcattaattaataattataattaaagtacgtattgaattatatatatatat

SEQ ID NO: 220990 - DNA, 1429 bp, Cannabis indica
aggaagaaaagaactctgaaactatctcaaagcagctacactgccaaaattctagaaaaatttgggtttgatgatgtgaaaccagttagcacacccttatcccaacaattcagattgtcatgctcacaaacatcaaccacagatgaagaatgcaactacatagaaactattccatacacaggtgtacttggcagcatcatgtacatcatggtttgcactagacctgatatttgtcatggagttagtgtggtgagcagatttatgagcaaaccagaacaagaacattggagggttgtcaagtggattatgagatacctaaaaggaactatcaacactggattagtatatggcttgaattcaaacagaggagaaggtgttttaggctatgtcgattcagattatgctggggacctggacacaaagatatcccaaacaggctatgtattcatgttaaatggatgcaccattagctggaaggccaacttgctaaccattgttgccctatccaccactgaggcagactatattgcctgtacagaagcaattaaagaaaatttctagttaaagggaatcacaagagaattaggcattgatcagcaaaatatcaacattctctatgatagtcagagtgcattacatcgcagtaggaaacaagtgttccgtgaaaggaccaagcacatagatattaggttacattttatccaatatgtaataaatgatgaaaaggtcaagctttgcaaggtttcaactgaggaaaatgcagttgatatgttaaccaaaaatcttgcaacattcaagttccaacttttctaaaattgctcaatgtcaccgatacctgaagttagtgatggttttttgtttttgctaagttgtaattcttgtaacaatgtattaatagtcaaagtggaaatttgttagttttgtatgcctactaatacttatatacacgcactcggacattaactgtcataacgtttttgacagttatgttagttagttcattctagttgcctaagtgtataaatagtctctaggcctacttgtaatcgattcactttgtaataaacactcaatagtaatatagctatattttttctctctagtattttgtcttatacaattcgagttcttggtaagaaggttcaatttgtgaacctggtttgttctggcttaaaagaaggtggtttctgctggtatgatcaaatgtttggcttaacaattactctgctttcttataaagttaaccaactggcaactgcttttatcatggagtattatgaataggtaaggctcatagtctttttgtatctggtttttcattattgaaaagtgtactacgttgtaactagaaaactaaagaagaaaaggcttcgaatgctgagagaaaggggaaactaaaagatggtgtacccgagtagtgtatgcgtga

SEQ ID NO: 220991 - DNA, 1952 bp, Cannabis indica
aacgtttaacaaattgaatctgaacaaattttaaataagcaagcaactccttacactcttgaattaccacgccaaagggagaacgcaatagaaccgaagaatgtaaggcttggacagtaagaaggcaatcggtttccagttgcacatcattccactgcttatcttcgatccaactaagagcctccttaatgcctatcacctccaccacagcagcctctaaaaagcccagtttgctacaagaaaaagcttcgacaagatggccatgatagctgtgagccatcataccagtcacataccagcctttcgaatcgaatatagctccatccacattgaccttaatcttattattaaccggtttagaccattgctcccttccttcattctcacccgaagccaaaaacaaaggacccttctttttcattagagcatttttccattgattaaggttacctctagcagaaaaaattacatctgaagccgaagtgctcttacctttctaggtgaatgcattacgtgcattccaaatggcccaacaaatcatgaccgcttcctctctaacatcggcattagaaggcagaacacacaactcaaaccaatttgagaacttacctcccaataaaacagccgcacttaaagatgatctactccaacaactttgagcaaaagagcattctatcagcaagtgcacaattgattcctcctcaaaattgcacatgggacagttcagatcaagcgggacatgcctcgacaccagctgaaccttcgtgggaagagtttcagagagagaacgccacaagaagtgcaacaccttggagggacattaatgttccaagctatcttccacagtctcttctcatcagctaaaaggtgtaaaccatctttcttatgtaaaaagttataggcatttttaactttgtacacaccagaagaattgaaagaccaataccataaatcagaagaagccgaagagatagggagtttacaaatcagttctcgatcacgggtattgaacagatcattcaacacatccaagtcccatcatctatcattaacctccatcagactagcaacttgacaatcatctaaccccaccaaatgcaacgtcacaaagggattgaatgcgtcaggaaaccaaggatcccgctgaatatcaattgaagtaccaggccctatgttgcaccgaaccccagacaaaattaacttctgagtttcaagaatacttttccaaataaaacttggattgttaccaagttcagcattgaagaaagaacctcggggaaaataccgagccttgtataaacgacttacaagagaagactcattcacaaccaactgccaagcttgcttacccaacatagagagattaaaatctcttaaatctcgaatgcccataccaccaaaatgcttatgctttgttaaattctgccaactcttccaatggacaccatgcgactttgaactatcagaacgccaccaaaacttggacatcatcccttcaagtttgttgcatgtatcaacagggagaagaaagaccgacatagcatacgagggaagagtaaatttctcttttattattggtgattagatcaaaatctaatcatttaatatttctaaaattgattcttaacaaaaaaaaacaaaaaatatttctaaaattgaaatttacaattagttttagtaaccatatgtaatactcattaaaaaatatttcatatatataaagaataattctatggtgatgactattgttttattcttaagttatacatatatttttttaactactcatttatttatatgacttttgagagtttacattgtttaacattgtatgtatgcatattaaattttcattttcaaaaaaaacaaagaattgaccccaatagaaaaaattaaaattgttattggttattgatcaaattaaccagcaaccaaaattaaccttatatttt

SEQ ID NO: 220992 - DNA, 3786 bp, Cannabis indica
tgagttattactcacttttggaagtcgtaaagaggtttcttacttgtcggttacttaattaagtaatgatagtgacattgatgctcgttggtatcgagtggtaagaatgctttataaagcatcaaggtcggtttgtcttgtaagacaactaattgattatctttactgcattacacttgaatgattgtttagtctatatggtgcattgttttaagatcatgctttatgtgttgattatgttttatctgcttttcttgcttggtctttgtgactcatgggtgctctgtggtgcaggtaagggaaaagggaaattggaccaaccatgagtcagaggtctcccagtaatgtacatatccactgtcgtgtcttagctttcagtggacgagatccatcttttgttctcttttgaaaatgtgacagcattttgtaaaaaattgctttgtagtaatttgtaaaagtttataattaagaggatcctcgaatattgttggtattttgaatgaaaagttagatttaaatagttttactaaaagttttaattaaaccacacttttcttaaattattagtttattattataaactaattaataaagtacatacgtggcgcccttacaggttagggcgttacatcttcttctcttttatttttgaaaattcagaggctattttctcttagatttcttcatgaaatttcacgctcattggtgttgagaatatgccaactcatattaaagcaatactcaacatagtaaggaagactgtgatgaacaaggaacacaatcgaaggaagaaaagatccaggttcagatcttgatgataccctgcaacaaaaaagatcaagggttagagatctaaatggaaggagtcatattattctgctgccatcactgtaaggatttcttaatccctaatgtgtttatttatcgttttggaaatttcatatttagggtgttagattatagaattataatcagcatacatgttagtaaatctagatcttggtaaaataatttgcaacagattcttcatgatggtgttgaaatgggctgaaggatgtccaactagtacctaatctcaaaagaaatttgatctctattgatatgttagatgattaaggatttcttgttaaaattaagaaaggaatcatgaaactttgtagaggtttgatggtggtgatgagaagaagaaaatcaaatgggatttatcctctggaaggtattacggtgaaaaacaagaaggcatgtgtttcaaacaagcacgttaatgaaactgaagaatggcacaagagacttggccatgttagtgaaagagggttgcatgaactgaataagtagggattacttggaaaagtaaagcttgagcagttagaattctgtgagtactggttcttggtaaagcttgtagagtcaagtttggaactggaaaaagggataccaagggagccctggtttacgttcacagtgacttatgggaatcctcgaaggcactatcacatttcgggagcaggtattttctttcaatagatgattactcaagaaagttatgggtatttattttgaagaataggatggaagttcttgagaaatttaagcactagaagataatgattgagaactaaacttgaaggaaagtgaaacaactaagaactgataatggtctggagtactgttcagatgagtttgatgtgttctgtaagaaagaatgaataacaaggcacaaaccgtgaggaagactcctcatcaaaatggactctcagagaggttcaacaggaccatcctggaaaaagttaggtgcatgctattgagtgctggattgcccaaagtgttctgggcagagctatgtccactacaacttatttgataaacaaatgtccatcaacaacactggatttcaagacactggatgaggtgtggtgagggaagccaacgagttatgaacacttgaaggtattcaaatgtatcagttatgcacacatcaggcaagacaaacttgaggcaagggccttaaagtgtattttcttggggtatccagaaggagtcaaaggatatagactgggtgtcttgatcccggaatgaaaaaatgtataattagtagggatgtgacttttaatgaatctgttatgggatttattgacaaacctgctagaagtcaagccaatactgaccgagatgaaattaaagctccaggaactgagcatgaggtggagcctcctagaaagatggagactgaagcacctatagatcacaaaagtgatgactcgaaagatgattccaaaagtcataatctgaaaagttataaactggctagagacagaacacaaagagaagtaaaggctccaaataggtacgaacatgctgatttaattgctttcacatttcatgttgctaatcagattgtacatgaagagcctactagctatgcacaagaaatgaaaaacaaagatcaaaagaaatggaatggagctatgtcagaagagatgcactccttgaagaagaaccagacttaggatgtaataccaatgctggaagatggtaattcatcgaatgcaaatggctatacaaatggaaagaaggcattccaggtgtgcaagagttacgatgtaaaacaaggttggttacgaatggattctctcaaactgaaggagtcgattatgatgaggtattttctctgattgttaagcacaaatcgattagaattctgttggcacttgttgcatgtcaagacctcgaactagaacaattagatgttaagacttccttcttgtatgtacatctttatgaaagaattctaatgaaacagcctgaaggatttgaagaggctggaaaggaacactgggtgtgcttgttgcggaagtctctgatggtttaaaacaatcttcgagacagtggaacaggagatttgatgatcatgtgaccaaaatattggtctgaagagaagtaagtttgatccttgtatatatttctgagagagaaatagagatactttgtatctgttgctgtacgtagatgagattctgatcgccagcaagagtgtacaagagatcaagcacttgaagctccagctaaagacggagcttaaaataaaggatttaggtccacctagtaagatcttaggcatgcatataagaagggaaagacgaaaaagactactgtaattgaatcagacgagctacatcaaaaaagttctagataccttcaaaatgataactttaagggagtaaatactccacttgcacaacacttcaaactgagtgctacttagatgccaaaagatagaaactaaaaagttagaaatgtcgagagttctatatgctagtgcagttggctcactgatgtatgtcatggtctgtacgagaccaaacatagtatatgtactgagcatggtgagtagattcataggaaatcctagaaaggagcattaggaagccttgcaatagattctaagttatttgaagggaactgctaagaagggattgatattttgcatgaataaccggtcagaagacttagatgttatcaatggttatgtggactatgattatgcagagtgtattgatacccagaagtctttgaccggatacgtgtttactatgtttggaacaactattagttagaaagtgaacattcaaaaggttgtggcgctaacgacaactaaagctgaatatatggctttgacggaagcgatcaaggaagccctatggttaactgggttgatggaggagctgaagctcgatcaaaaagttattactgtttattgtgacactcaaagtgcaattcaattaacca

SEQ ID NO: 220993 - DNA, 1717 bp, Cannabis indica
tataaaaaggagtggactttcatatttttcatgaaacaattagggagtactcaaatcagagaaaagaagtgacctagaaggcttctcaacagagtttttcaacaatttattctcttctattttcttcttatgctcgtatttaatttgtgtcgattatttacaatgaacatgagtagctaaacagttattagggtattgatggagattgtttgacatctttttatagttttaatatgatttgattcttttttcaattttctatatgttctatttcatttgttcttaattcttttaattatttagccatcaacaaatgtttatgatttcgatacgagtaaaagattaaagagaagagaagaactagaatgatgaacaattgatgaagcaatcttcctctccttctctctctttctaggtttctctctaaaaatatacagtctaaaagtgctaataacaaaccgtaaaaatcttatttatatccacataaaatttaaaatttcaaaaatagcgctctcactgcagcgaaggtctacgcttgctgcagcaaagaaaactcctgctgcaaccacaacctgcttgtcgcgaggaagctttaggctcgttgcggcgagagcctattgttgaaaatcccaggcaatttgtgccaggtgctcagattggtatgttagttgtaactccttcaatataacttaaaattggacgatagaaaatatttcgaaaagctgagaatgagttctacaacttttatattgagctttaagtccaatatgtaacggtgtaggattttagtagtgtaatgatgtagtttaagggtgttagtacagtgtaggattttagggtagttacggtgttaccaacacgagtacagaattggtactctagtgcatgtggtacaacactcagtaactcctgggagtacaaattggccctaccaacacgagtacaaagttggtactctagtgcatatggtacagtggtcggtcctaccaacacgagtacagtgtcggtgttttagtgcatatgatatagtggtcgtatttccattaagaacgttcttaaccatttggtgggcttgattaatgagctcaggacgacttaagcataaagtcggtacaacattactgttatatatgttatgcatatcttactgagtctgttgactcatcagtttactaccatgtgtaggtaagaggaagactaagttggaggagcagtgagtttgaacttggcaagaattgtacatatcacaacagtgcaacctggagggtttcggttttataacattatgagttgccctgtattttgtgtaaaaaaaattattatgtaactatatattgtaaaggtaattttcaattatattttaaactcaggatcccgacctatatggttatataattataatatgataagattaattttgttttagtaagttttcaaatacgggctttacattagtcttccaatagtctaaaagattaaaactaaaataatcaataatttaaaaaaatcaatttaagagtattacacataaataagacaaatatatactcaagcagaaattatttttatttttaatttttatgaaagtgttggattgctcttttatacttggtcaaagtatttatctttttctaatgaattaggatttttattaaaaaatattattagtttacttataagatttgttgtgcatgcacttaatttaaaatattttttt

SEQ ID NO: 220994 - DNA, 1956 bp, Cannabis indica
aaaaaaaatctataaaaatgtaaaataagactatttttgggtgtatggtgtaaattttctcaacctttttttatattacttaaactaaaactagtggttgaacaaaacaaatcaaaataatattttattttaaattcatgatataatattaacatactcaatatttacaatatattatttttgaatggaattgagttaggtatattgattgtgtcactgaatatggaaaagtgggatagaattaggcatgatccactatttttgggaacaattttttattttgaaaattaaaaaatatgtgtttgctgaataaaaaatatacaagtactcaaataactaaaataactgctttctagtagtataccaagtccaactaccaaaagtccaaagatgaaagaattcaactacccccaatctttgcttttctacttgacacgtgtctttgtattggacctattggtaatgagtcttcaaattatactgttgggcatggactctctaaacttgggaaatttgattttcgtatgcatatattaccctaaaattaatcccctaaatttatatgtattaatatttgctaaataggtcaatatttatctttttcctaaaataccctccttattttcaaacagctactatctctttagtctctaccacccacgagactgcgactaatgactaccatgactgacgacccaaccaccaccaactttccatcagaggatttacgcgacccaaccaccaccgcgaccacgacccacgacccaaacaacacccttctccaccacccacgacgattgcgactgacgaccaccgtgactgacggactgaagacccctttctccacgaccaccgcgacccacagacccaatgtcaaaggttagtgtttttgaatctgtgatttttgagttgaaaaatacattttataggcaggctcgatggaggtctgatgcattcccgatgcatcgtgatgaaaaaattagatctggattgaagacaaaggcccgatatagagcccgatggccagtcaatatttttggaaaaattgactggccatcgagccccatcgggacttatatcgtgcctttgtcttcaacccagatcaaatttttttcatcacgatagctacaccttgcttcgaccctctccctgaatctattccgccagtctccatctttggtaagagtgagttttggtggtcgttattttgattttagcttctctgattcaaactttacttagattgtttttttagagcaacccctcttgctaatacaatttggagaattttagtagagcagactagaactggggatgttgggcttggagtgaactaaaagaagaagaaaaagaagaaaaaaaaaaaaaaataaataaaaaaattaaaaaattaattaattagtttgtaaaataatttattaatttatttgtttattttaaattaattttaattaaaattataatttggactaataaaaaatcaacacatgacattttttggagcaacaaatgtaactgttaaattaggtacttacgaactaacgagaatcttgagcttgggagtgttgtcacaatttttcgaaattgggaacttattgcataaaaatgaactttttaaagactaatgtggtaatttagtatctacacgtgacattttaagaaaaaattaacagatctattaaaaggagaccaacagacttacaagaatctcgaacttggagactgttgccgctatattttgagattgggaatttatgtttatcaatgtgaattttttgagaactttagccacaattttctcttttttatacggataggatgaggatttttcattcaggctttatttatttttttttttatagcatacatttagtaggtgttccaaattttttaaataatttataaaggtggcgtttggtaatacttttgcttttaaaatttttaatcacaaaaata

SEQ ID NO: 220995 - DNA, 2634 bp, Cannabis indica
tgctccacgcaatcttggccgattccatgaagtccatagcctctgattcatctgcccatcttgacgattacggagatgacaacgcaggatcagcaacctgctctttgtctggttccagttcttcgcacgggcccaagaagacttcaggttgaacatcgtcctcttggattgatggcagctcttgactctcgttcagccccttcgcaacagccgcagcaggcttcgcagcaccttttctcctcttcgccatgggaggaggaaccggagctacacacgcccttcttcttaggggcttcgagactttaccaaaagataaacttagtctgttctttggaaatgtgtggatgatttggaataataggaattctgctatatttaataaaaaatcttattttaacttggacacaaaaggctatgttgcaaatttgttgcaggactattctgaaggcccagcaaaagttcctctccaataatcttgttgctgctgggagtgttgaagataacttagcgaattcggtggacaaagcttatttgcaacccaccttgccttcactgggaagttataaactgaatgtcaatgcagctctagacaaaaagaagaaaaagtctcatattgggacagtagtgagggaatgtcacaacaatgttattactgtccattctacctcaagaatttgagcagcttctcccttgtatgctgaagcgtagacacaatacaatgcattgatgatttggtggttagtagaaaagttaccactctccctcattgagatagattagcctcagcttgttaagaaaatcaaacataagtgaaaagtttactcatcagtttcagatttaatttcaaaaaattttgattcattgtctttttttctaatgtgtcttttttgcatgtatttgctcataatataagtagagatttttaaagtttagataaggagttgggttgagagagtagtttccgatagttagtctttgttttgtaacttgctcattttaatggaagttgcaaacactttttaagaaaataaaaaataaaaatagttcattgatcacattatcatttcttgatgggttacaattaaaactttggagcatatataggcaccgactactttgattagtaaaaatatataaatatattatctgtgatgaataaataaaaaaaaatatttgaatcactaatattatgggttaaactcattgttaacataaaaaataatgtgcgtatttatatataaattcatataagcagatcgatatatatacattgcagagagagttaactacaaacaaagctttcatagctcagttggttagagcacccgtttagtaagcgggaggtcttgagttcaactctcaatgaaagcatagttttataatatatctttttaacaaataaaataaaatgatttctcaagcaacgttttggtattttggacaaataatacaagaaataattatgtacacaactaacgtccattataattgttattggtacagaagaatttagaatgagctgctggccgtcttaccataaacaacttgaacatccgtcttttgtgttgtccatgattgacatatttttaagtttacaattcatcactaatcaccatatatttaaaatatatatgttcatcaaatgtatttagccaaacaaaaaatgtataacatcattgagcccatcttaattaacatgccaggtggacaatagtaagtccataatagtatattcaaaacaatattgtataacaaaatttaagtataactaatgtgcagtaatatccagttttatttggcattatattgtacctaaggaatatattcacttaattatgcatagccggcccaaaaacaaagaaaatattgaatataatatatcaactcaatgtcttaatttatttgacttggactagactacttcaattgatatcttaatctccatattatgtctctcatgttctttctataaaaaccacctcgttttgcttctcaaataccaactcaaaattaaacaatttacatacatagctagttctctcgtctatactctctattaagtacttcttataaattacaaagattaattagggcacaacaaatgggctctcgagtgttgctattattggtggcattgtttgccattgtttcttctattgccttggcatctgatcctagttctcttcaggatttttgtgttgcagcctccaactctccaggtaagtatttaataatttcaagattttcagttctaaacttatttttgtatagcacatttactgtatttattttcgagtttagtaggtataaaacatattgtcttttgtaataatgacaaaaagtaattaatacaatgtagttttaacttgtttttttttcttatattatcaacatgacagttctagtgaatgggattgtatgtaaagatccaaagatggtgggggcccaagacttcttctttagcgggctacaaaaaactggaaacacatcaaatgcactgggttctagagtgactccagtcggtgtaactcaaattccagggctcaacacactgggaatttccctagctagaattgactatgctccctggggaatcaacccaccacacacacatccaagggctagtgagatttt

SEQ ID NO: 220996 - DNA, 4309 bp, Cannabis indica
agtctgactatcctttctttgctattataatgaaaaagtcatatgcaactagtctgagaaattttggaagtgaaatcttatatatagattgtcatttcaggcttccttgatcatgtaatgtatttcacttaaaaactaattaattgatttttgttttaatataaatttatggcagcatgtaccatcctggtttgcaagaacatacattattaagaaacaatgtgaagctagcctttgggtttcaaatggtgaatcttggtctgtccattacagagtcgtaggtggatcaaacgcagccgaattcagtgaaggatggaaagcatttgcactggaaaatagtttggaagttggtgatatttgcaaatttgaattgactaatagttatggcaatgaaatttcatttagagtttccattgttaagtgtgatgatgatgcttatgatgacttaggtgagaaagaagtgttcttaattatcattataattcaatgtgtacaaaaatatggctgtaggattaacttataggtgttgttttgtagctgcaaagatagcagctacaccatctaagcgaaatgtgaaacttgaatcttctttggcgagcgatgatgaatccagcatgatttcaccaaacataatttcagataatgaacaagagaaattttctgttgaagattcaggtatgaatatgaataaagtaacattcttgaaactaaactaagtaacagtgttatcagcacacttgttgttttgtaaatttaatgcagatacagatgagtccaccgagttgatatctaaagctaacactggaaacaaaggcacttgtaagaggccttcatcttcaagaacaaccaaccattgcttttcagaaaatcgcagcctcaaagtggttttgagaccaattcacttgcaaagatataaactagtatgtagaaaaatgttgctcttataactatatcatcttgaataaagatatgtacattattatcatgacatccatgtttcaaataatgaaagtcaattaatgtcaaatcttttttgtgcagaatattccattgtattttgcaaagaaataccttaaagacaagactcaaactatgactctttgggttggtgagagatgttgggatgtgaggtttttggttggtgaaaaagatttttctttttctgctggatggaaggactttacaagagagaactctctaaagccaggagatgcttgcatctttaagttgattaaggggaaccaatctgagctgaaagttaccattattagaaaaagtggtgagaatgctagtatgtaaatgtaatgataatgtgagaaagtgtttactgatcttgtgaagttgttgtttcttaatgatcaataatttgttgttttcagcttcaaaaatagcaactgcaacaccgtccaagcgaaatctcatgcttgattcttcttttgcaggcaatagtaaaggtagaaaaatttcccagaacataatcaaaaagaaagaacaaaagaaagtcattgctggactttcaggtatattcaattgttaatcaagaatgttaatcattctctcttctctctatgtttattttttcattcttaagaagattatatcagattattacaatgctgtttattataaatttaatgcagataagtccactaatctgatatctgaaacaaacactagtaataaccaagacagcccttcttcatcttcatctaaatcttcagtggttaagagagcttctgaagtagctagccatttcttttcaaaaaatccaagctttaaagtgactttgcaattagatcatgtgcatggaggatataaactggtatgctgaaagcaataatgttgctctaatcaatatttgttttaatgataatatcatataatacaatacattaaattatgatgacatttttggtgcagcctattccatcggattttgcaagccattattttgaggaaaagacagaaactattagtctttgggttggtgaagatgaatacaggcatgatgtgaagttaattgttaatggatcagaatataaattttctactggatgggctgaatttgcaatgaataactctcttcatccaagagatatatgcatttttgagctgattaagaggagtaatcaacctgagatgaaagttaacatatttagacaacatgttttatacttttgagctaaactactgaaactcaagttaactaattatttaagaatgttagtgtgtaatgttactggtgccattgttagttattagacttctgaactaaatgtttttttgtatgatcacagtacaggagtgactaactaaaactacttaattacaatagttttgttgttttaatgcatatttcgcttcatgatttatatttcatttgcaaaaatatatttaagtgttgtaaataagtgcgtgttgtgctgaagctttttaaaatatagtttatgtcgtgcagtgtcataaaaaattatgggttatgcagccgtgctgtgtcataaaataatatagatcgtgcctacaattatagggtaagcccgacacaacccgcaagtttagtagtttggatttgtcttgtactatattcgagtgggtctattttttttgtgtttgtttaaatagcctagcctatttttgtatagggacttaaattcgtgcttcatgtttttttattttattgatatactaattattaaaatatgtgtatttatattttaattagttttttatcaatttttagtcaatagttacacataaaaaagttataattattagaatttaaatgttattataattttaattgtaaaataaaactaagcttctaaagtgtcgtgttttcgtaggtaatttatattcgtgctaatgtatcgtgttttcgagtttttcgtactgtatcgtgcctaaattcatatcttatggtcttgtcatgcccaagtccgtattttttttgttcattgtcgtgcataaacacatatatttttatgtcagatcgtgctcatgccaatttcgtactatgtgaaaatacttaattcatatttagagcacttattttgtgtgataagtaattttataatataattactaaattctaaaaatagacataagaattacaatgtaataatatttattgaaattaattaaatatcataacatctctaatggataatgtaaattttatactaaatttaactcaaaaaataaattactcaaattttataattatacttcaatacactataaatagaataaattgtgttttaataagaatgtgtaaaaaattaacaaaaatattaaatttttattaaaaatatataaaaatcatattaaatatattttgtattaaatttaacttttagcatatataaatttagaccacattatgtactataattagacttcaactttataataccactttggagatgctcttattgtcattttttttaagattttttagactacatgttgaaatttctaatttttttacttttataaagtaaggcgatttttttttcttcaaaaacactgtgtaagttttatacagtgtactatgttaaattttcacagttgttctacggttgttttttaattgttccactattgttttaattgttctgttttattattttacggttgttttataaaaagacaatatttttgtaaaaaaattcgtgtatttttggaaaaaaatccatgtgataataaaattataaaattttacttaaaactcaatatttttgtaaaaatctttttttttattgtttatttattttaaagggcttgataggcctattatctatactaattaattttactttacaaatgtttaccttcaagaaaaaaaaaatcattggttgtaagtccctttgaaaatcaaaagaaaaaagagaggaaaagaatagatggagatgtcgttttctgtgtaaatgtcgtttaatcaaaatattgtcgtatatagcaaaatatcgtgcgtcgtttcagttttctgttaacctatttttggtcaactgctttctcataccaccgatctaaccactacactctccactcacccaactctcagagatttctaaaactgagaaccaattccagcggcttgcttgtttcacagccaagtttcattactggaaaaaaatctcagacgtcttgtgaagacaaagtaacaactgtccatgacagttattacagttagttgttttttctaactgtttttctgttatgagttagttacagatagtttggttgttagctctatttctgttgtaaccaattcttgttgtgatcacctagagctactgattgtgtatat

SEQ ID NO: 220997 - DNA, 6318 bp, Cannabis indica
aagaaattacatatttaataaaatatgtccatttaaatattatttattttctgggatattacaactaattccatcttcttattgtaccgaccaagcttataagcacatttacttgtaatttctgtcccttggtacggtccttcctagttaggtccaaacactgttgttgtagaatctttggcatttaggaatactcttcgaagcactaagtctcctacaaatgatttccactcctcaacgtttttatcgaagtaccgcgcaacttcttactggtaggtatgcaactttaagttggcctagtctcttctttcttctatttcatcaagggattctgccaacaaggtgtggtttgttccttggtcatatgttattgttctatggggcggtggttccaattcaacaggcagcattacttcataaccataggctaatgcaaagggtgtctatcatggccatcttctcagtggtcctgtatgaccaaagtacctctgggagtaggtcatgccagttttccttggcctcttctagatgctttttcatagtgtcattgaaggtcttatttacaacctctacttgcccgtttgcttgagggtgtgcaactacagagaagcttttaataatgtcgtgtctattatagaagtcagtgattatgccactatcaaactatttcccattgtctgatacgatcttctgagggagtccaaactgacatatgatgttcttgacaataaagtcgaggactttctttgaagttatagttgccaatggttcagtttctgtccacttggtgaaataatcaactgcaactacaacatattgtactcttccttttcctttaagaagttgtttgatcaagtctatcccccatatagcaaaggaccaaggagactgcatttgtgttagcacgttttatggagctcttaggatctttaagaatttttggcacttatcacatttcttgacatagtccattgaatcttcaatcaaggtaggccaaaagtatccttgtccgagtatctttttggaaaggctttgcccctcagcatgattgccattaaaaccttcatgtacttcaattaatagtcattgagcctcttccttggtgacacatcttagaagttacattgagaagccatgtttgtacataaccccgtccaagatgagctatcgagcaactttcctctccattttctttcttcattcctgtcctctagtaggactcattggaggtatgctattgttagtttcatccatgtaggaccatcatccaacatatctattttttctaaaacagttatgcttgggtcttttaagaactgaatgggcaccaagttggtcttgtctgttaaggtgctgctagctaatcgggtaagtgcattggctgttgcattttcttctctgaggaattgcctaatggtgtacctcttgagttgacttaataagtattggattcttctcaagtagatcatcattctttcttctcgagcaatgtactcacctaggacatggttgataactagctaaaagtcaccatatatgtccaggtagtctgctcccacttcatgtccaagctttagcctagcaatcagagctttttattcagcctcattgttagagactttgaaaccaaacttgatttatctatgtagttgttgaccccaggtgtaatgagggcaatgccaacactagacaagcaatgcatacaacttccatcaatgtgaaacttccaggttgaattttcttgctcttacttcttctcttactcttattttcacttcttctcttgctattacttttctcctgaatcttgagagattcaagagatatgcctgtacattcagccacaaaattcaacgagagcttggccttttatcgccactcttggtttgtaggtgatttcatattggccaagtactatttcccacttgagtaactaccgagatgctttaggtttttgaagaacctatcgcaagggctagtcaatgtacactcttattggatgagcttggaagtaaggtcttagcattctcaaagctatgagcaagtagtatgtcagtttttcaatgagtggtatcgattttcagcgtcaataagtcttttgctgacatagtatactgggtgttgaatgccattttcttctctaataagaactgcacttacaacaaactctgtgaccaccaattatatgcccaattctttattgtctagaggttttgacaagatgggaggctgagatagttgtttctttagctcttggaaggtgacttcacactcttttgtcctttcaaattttttatttcttctaagtatgcagaagaaaggtacactcttctttgtggactttgacacgaatctacttagtgctgctatgtggccagttaagctttgcccttcttttatccttgtaggcgacttcatatcgaaaaggtcttagatcatctatgggtttacttttattccccgacattcactatgaatctaaggaacttgcctgagcctactccaaaagaacacttgagggggttaagtttcatgtgtactctcaaaggatcttgaaacattcatttagatcttctatatgcccatagcctttttggacatgacaagcatgtcgttcacatagactttcatgttatggccgatcaagtctttaaacattttatttacaatcctttgataggtagcccttgtattttttagtctaaaatgcatgactttgtagtagtacatgcctacatctgtcaagaaacttgtatgttcttagtctggtggattaattttgatttaattataacttgaataggcatccttgaagcttaggatctcatgaccaattgtagcatctactagatggtcaatcattggaagtggcaaaaaatcctttagacaaaccttattcaggtcagtaaaatctttgcatactcaccacttattgttggtttgggtaccaagataggattggacacccagagcaagtagaaagcttcaatgataaagtcattggggcgcaacctttcgactttgtctttagaagcttgtgctcgctctttatccagcaatctccttttctactatacagattggaagtttggatctatggtctaggcttgaaaaattacagatggatcgacccccaccatgtctttatgtgaccaggaaaagatatagaggttcacccttagaaattttatcaatgctgattttcaatctcctagttggaagggtgggatcaatctctacttcttctagttcctctattggtccaaagctttctgtaggttccccaaatggaggatctaaatctgcctcctcgctttgggctgaacttcattgcccttggctggactcttcactagagctcttgataggcatgttttctttcttggctttggacaaagccaagttatagttgtgtcaggcagttttttgatctccccttaggcaccctaccccatctctcattgggaactttaggcatatgtggtaaattgatgtcacaactttcaggtcgtacaaggttgaccaacctatccttgcattgaacgatgatggcacatcgatcactatgaactgagccatcagtgttcttcttgtggaactttccccaactgtcaaaggcaatatgatgtattccatgggtgcaaggccatggccaaagaactcatacatcagttgtgtataaggtgctagatctatcaactaaagccccatcttttcataggttaacttgaaaagtatgtttgaagaggctccattatcaatcatgcacctggccactgtcatgttccctatctgtgttgctatgactaaggtgtcattatgaggaaacccgacctgggcggcatttctctctgtgaaggagatgataggttcttcaagatttatctatttggtatctcttttttctacagctagtacgccatttttttgctcatgatggagggtccgagcttggcgctacatagctttgcttatttcacctgcaatatggagtcatccaactatgagccctaaatgacctatcactggcggtggtattgggtctttgttttaggcaccttgtgcctgtgtttggttgtcttgtacataacgatggatatggggatttttctttctgatcaagaacttgatttccaactttaagtgcttgcactcattggtagcatggccaaaatcattatgaaattgacaaaatttgaaaggcccctcttacttacgtctttcctcatgggaggaggcttcctgtatggaactatggactgtgtggctgcgcagactatttcaagagtttttattaggagagcgaagcatgtaaatctctcctccttctcctttgagtcttgtggcgtgggggaattattaaatttcccctttatgccttttgctcggccagagttgttattatgctagccttcattgttttgggcttttgagggctagccacctatgatggcaggtgtgctgggcggaactgagggttgtctaccactaagggcccatccagcaccttcttgtctcctatttttgacttgtcggtcaacttcttcaagcttaacaaagccttctaccctatcaaggaaatcagccatgttttgagttgagtgtcggcggatgtccttgcacaactcactcaaatgtagtatgccactcatgatggctgtgtaccttccttcttccattagattcttgactttggtagcttcagtcatgaatctttggagatagtctttcagaggctccttggcctctgtttcacatcaactaagtcttccaacctataaggtgtttgtttggaagacaagaactgtgtgtagaactctcttgtgaaaggattccatgaatcaaacctcatagcagctaatttgaaaagccactattgtgaagtttcagacaaggtttttaggaaaatcttgcaacgggtgtcaacctcaacattttacaaatccatatagattttaaaatatatgatgtgatccaagggatcttctttccctgcgtacatcttacaagttggaatcttgaacttggtaggcaagggcaacgcattgatgcacacagaaaaggtgaccctcaggtcttgtctagctctaagtcagacaattttagaccagacaagccttgtatcatgtttttgagttgatccagttgtgcttgcactagaggatcaacatcagcttacctttgtccgataataccctccttactaacccttgcccagccaggctggtgggtgggtgggcaagaaatacttttccagggttggccagatttagcctattttgccctcttggtggagttattgggggcatgacgtatctattttgagcatttcttctttggttcagatcaatccaaagatctattcttactttgggcccattctggcaaatatagaatctctgggcctcaggtcagaatatgtctaaccatcatcgttgcacccagtatattgagatatgcagttagtgtgctcaccacttgggtgactagtggaattgtcctcattgggattggggtaaaactccccactatgagaccaactctgccctggcctcagtgggatgtcttcccctccttcatcacctttaagaaggccttaaaacttgtcaatcctgccatatgatctttcaagcaagatctacccatcattaggcagataggacgaccttgtttgggacgcagttggccctcttggccttgaggttttcccatgatccctagggagctaagttccctttaagacacagggacctttaccctaaaggggatcccttatgagggatggctcttcaacctgagatccaaccctctcattgaatgatctgattaggtcattagcctccctattatggcagtttagctccacctattgggcttggaggattgcagcaaactgatccatccattcctagaattcgcgtctctattgggcaaacgcatcacccatagcagcgcatgtttcttgttggtcatgatgaaggagatttgtatgaccttgaacttgtcctacaacctctctcagcctgacaagttcagtatcattccctaagtccatgtggggctcatcaatgcctggattgccaaccccaggtctagtctcactagcataaattcaaagtccaactctcgtaccaggaactttagcgtttggctggacagtgggtccagtaggcttctattctcctagctagacttctgtggtggatgtgtcagctagctggccagagcatggtggccgggcaaacacactcaggttgaccacagcaggtggcacttaaacattaaggtctgtggccataggttctcgtggtttagttg

SEQ ID NO: 220998 - DNA, 2363 bp, Cannabis indica
tgttctaatattaatttaagagctcaaatctggtttgatccgtttttttttctttcatttgtttcttttttgcagagaaagattaagggtgacatacaagactcaggtttactaagtgagcagcttttgggccttctcaccaggtactattcatatagttgaatgaacatatatatgaatcagtaagttgcttttgattatggcttataaaaaagaaaaaaatgtgtgttgctcttactgggactgcccaaatactaggaaagctgtattgtgaactattgctttgctgttgcttttcatgggatggcttatgtaccccctacactgtccattagctgttgttgacatgttgtagtagtagtagtatgactttaccattagcttatttgagaacttggcgaactgaaatttgtgacattttataggtcctgatggactaaaagtttggagaaaataaggatatatggagcaattagttatggttgcaagcctcagaaattagtatggtcaatattacttttttttgtgcaaagtttaagttattggaaacaatattacaatagtttgatacttacttaggtacagttgactgtttaatttatttttttcattgtgggtttgttggatgtaatttgagatcctgaaaaacaagatgaagaacagaaaagaaaagaatgacaatagtttgattcttatatagtaatcaaaatacacatctctctgcatgcatatatactttttaagtgatttatgcgacttgaaccttattgtgctatttttgtgtggtcttccggctgtttgtttccgtagtttcttaattttttgagaatttatggaaattcttatttagtataaattataattttaatggaaaaagttcattgtttataaattgaggttgtgttatgataatggagttgcaatattgtatatgtttttcatctcttgtggctttaagattggcaatcacatctttatttgtcacaaaacaaaaccagcggtttattcaattcggaagtaaaaccatatttagaatagaattttttggccagtctcatacttagctgtctaaaacaagctatgtacttagaaattgcataacgcttttctcaattgtggttccaccccaagagtagtcattattctagaaacagactttctgttgtgaccaactgggtccaaaagatccaacctaatagtctagcatattgattctcacccatcatagtaacttgagtatgtatttaaataccacccaatgtttctatctagggctaagctgatactaattcatcactcccactgcataacatatttctagtcttgcgcattacaccgtacataagacttacaactgctaatgcttaggaatacgtgtcatctcttattactcatttagtagtttgtgaagacaacatttaaggaaaaatgaattctacattagaacaacaaactaaacacgaacacttttcaggaaacatcgcatcggtgaaaaagttagcaggatagaataatggtgctatgggagatcacactggggacggcctattttctgggtttgaagcgtacatatagactagctctcaggattcaaagacgcatcattagctctaagcgtccaaagatccgtcaatttgttcagaggtaatctattgctcttgatcatagctttcaagctcgtgtattcattcagttagatatgcttgcattttttttttgtttctatacaattgaagatgacaggtgttttactatatactgtatcattttatgatcacaaaacttgacttatgtctgcattcgaatgctgatttctgggttcttttatgtggaatttattgtgaaagagactgctcatgactttgttaagtttgaaatttgataatcagactaggtttcggtcttgagcctttgaagcttttgtgtatattaaagttcgtaaaggggataacaatactcaacaagcagataacgaaattcgatgaatgattgtagcaaattaaattaggtcagcattttatgatttgtgcgacatcctagttttctttctaaatcaattagtgactatgttagcctaccgtttcaaattatgtgtggattagttgcttcctttgatgatcaaattgattgcattaccgagggaggctattaaaaattcatttgttattgcaaattacaattgacagaagagaatgtattatagagtgatggattaactcgattattatacattcaaacatttaaggtgactacttgatcaagaactcattgagccaaatgaaaaatgttacattcctattgaattttgttcgaaaccataacagttgcgtatctttccctttttacgaagatgtgttctttct

SEQ ID NO: 220999 - DNA, 4169 bp, Cannabis indica
aataacatatatggtagtaaatctagatcctggtaaaataatccccaacacatatatatatgtgtgtatcaacttgaatttatctagaaatacactatgttgcaaacccacccattttaaattttttccataagggaaagaataattgatcaaaaattgaaccttttcttcagaaaggaaaatcgaagtagcagttgtaaatgagattaactcataaaacaacaaaacgctacatgtgaagctgaatatttgacggctcgcattattcaggcatgtattatcaacgaggcatagaaatatcttgaaaaataatacttaacctaaaatatgaatagaagacctagcttcatatgagtaatcaaaaaaaaaatacaaaatagttcctgaggtgaattattcaaagtattttttaagtttactgtaaatacaaatatgttatgtacgatagattaaaactgttacacaatgtttggtagattataaactactcgtgtataacaaagcaaactataactgctcgcacaaagaaaagcagatgagaactggtcacgaattgaacatataactactcgcatacatacatagcagattaataactacttaaagaatatcaaaggaaaagcgagatcattggaaatgctttctaaaaataacttaagttggatcaaaatataactgtttagattgttaataaaaatgcaatgaataaatatattaaattcatgtatgaggtacgaggcattataaaataaagatagatagaaaagaaaagctggccatccaacattgcaaaaattgtctttacaaaaaataatgccacaaggggtaaaccattgtttcggccaaaaggctatttttataaatgtatataaaagaacaaaataaataacaagttaaaaaccaagtctacacagtaggagacttggatggatcttcttcgtctgcctcaacctcctcttcctcgctgacctcttcttttctgatcttctcacagaatgcaagcatatcttaagctccttgacccagaaagctgaagtccatctcgagattggctgaccaagcttgatagatggtcctcctagcaattttgttgaccctatttttggtgtcaaccttggcatcttcaagatttttgtcagcctccgtctagatggtattgatggaatcctcaagctctttaatctcattttgaataacttgatgttgcttttcagcctcctcctttacctgagaaagctcagaatctgacttgttccattttttggccatggcatctcgatgatctctagtctgacgaagctcagtttcaagcatttcaaccctctgaagccctctatgttgagcgacaaaggatagtagagatgcgtgcgaggaatgaatacatgcagtaagaaagaagtacaaagacgggaaggagaaagaaataagaagaaaaagagactaacatgatgcatgagatcataactatttgcaccagaccctcaaaattgccctttgttagctgatcccactcgttggactcaaaggcttgataatgccgccagctgttggtagcatgtagcgagcagaggtgtcaaccttcagtgctagttttaaagggcaagaggccagagggctcgagaagaaccatctctgggcgagaacaagagaattttacttgctgtacagatgcaataggctgttcactgatgcttgccatagtaggcgcagccttctctggagattttgctggctcgatagttagttggctcgaggtcttcttcttgttggtagttgttttagttcttttgggttctttgatagaacccgaggcttcatttgcttaggcggctcatttttttggctcttttgtcaatgagcaggggttgttgaacatgtgttccagatcaagatccatatctataagataaaagagatacatcaaacactggctcaaaaacaaataaaaggaaaatggggaataaactcccacttaaaaggaagttaccataatcatcagaacatgacgaggaagaactataatagttactaaactccgtagatcctgtgatcatgaatatgtcgtaagggttcattggatctgaatcccaatttgaatttgggtggctcgccctatccaaaatggtcccatactgatcggcaatcccatagtacgagctagtgcaactaagctagacgtgaaacctaggataccaactatcaaacctatgtgttatacggtctatgaggaaattgttcctagtatagaaattatatcgactatctcagaatgttactaacaaagtacactttgctttaagcacagtaggtgatcatccacattgattacctcaggatgctccttcttcagcttctcaaggtgttattctcgggagatagtgtacgcgagccacatagtcctggctctcttcatcagttggaacagggaccttctcccacgaagagtactttggaaacttgtagtcacaactgtactcatcccagccaagaaggccaacagttctcagattggctttattcaagcgaaagttagccgatcgcagtccgaatggaagacccaacaagattttgtggcgctggaccatctcaggggtggggattggctcttggaaaccactgtcaacacaacaagcatattaagtcagcacctcaaaactataaatcagaaaacaactcaaaactaagtttctgagacaaaagttacttacatatgatgcgaaatgcagttgtgttgataagagaaagaccggttgtcaagaaaaaattttccttgaattcccctacacattgcttccttgcggggactgctttaacgaagtaaaaataaactatttcaagaggagtggaacactcccatcataaaatgtggtacaaaacctttagacttccaagaattttgtaagaaattggaacaaactaaaaaggggaaattccaaggtagttataggactctttgtggtactctctcaaggggagaactcctccagccttgatgtgctcgaggatccaaatgcctatcccagacgagccactagtaatggtaccatcgcacttttcccgaataactctttctggggggaagcagctaaattccgctggagcaacagatgtgatacgacatcctcgcctttaatctatgccgcaggactttagaacaccaccaacgtattctccaatggttcttactttggattcaatgagttcaacttcaaaggtgacattggggtcctgtggggtcttcgatttatgaggcttagtagacataattttaaaatcaaggtcacctgataaaaaagcaatagtgagttgaggtaaaaatattggtctcgctaatggaataaaagataaagatcgatgttcatgctaggctgcatctcgcaagtaatgatgtttaccctcggttaactcttgtagaaaatgcctatagcgactagcaactttatcctgattggtttttattaaatggtccctaatttttgcatcatttatctcaagtttggattgaggtttttggattttttgtttgaatggaagggataattccttaggacattctatttctaagaattctggattataaacttcaaaacaagattgaaacatttttacaaaaagaacaatcccaattccttgaagaaattaatttaaatcagaagcttattaatacgataaccctaaggttttctctgattaaaaccctagaaattacccaaaaaaaattaaatcgaaattactaaaaccaaatgaagtgaacaataatgtgattaattacaaaaccagaataccaactcaggaataagaaataccagaaagaaaggaatgaaccacttactgttcagaaatgggttttcctcataaaggagaactctgaattgaagttgagatgaatggctaagtgtactctgggaactctcgaggttgaagattagatccaaagaaacttgcaggaaatagttcaacgataaagagggcatacaagggttcgaatgatcgaaaatgattttggcagaaaaaggttgaaagtttcaaaaggtggaaatggtgaaatggtgattttctctaaagttttatactctaaggttgatcgcctgattaaaagattaaagatctaacggttaagaacaagagagaattagaaaagatggataattaatgctaatgatgtgcct

SEQ ID NO: 221000 - DNA, 4549 bp, Cannabis indica
agggcacaaaacccaacacaaatatagtattgtattaaataatagaatacaacacaacacaacacaattcaatacaataccatacgatacggcgtaccaaacgaacccctattaatattcttaatatattcaacctcaatatattcacattacccataatttccttagcagaaaaaaaaatacacataattccaaagattaaaaaaaaaacgttagtccaataattaaaggaggcaattatgttgctattcactttagtgaaatgaaccagattttaaaataaatgaaaaaaggtcaagacttttcgagaaaatcttgagcattttcataaacttttttgtgttattttttctattatgttcgttatacagatggagcgatggcatatttcatctccaaatcaaccaaatattggtagaacgttctcgaggtgcctagtgaaagatttttctcactaagtatacaatatatatatctatgaagacactatacaaaatgatcaatcttcaattaacatttttccttttaaagtggctgaagctcttgttcagcaataatggcgccaacaggttcatatgaaccaacctctagtcttttgtgtctccaaaacaaccacatccctaatgttaataatccaaaagctaaggtaactgtaactccaatagtcgccgccaatatatgatgatgcttccaccatgatctgcaatgctcaaaaaaaaaaaaaaaaacaaaaacaaataagatataagtaaatacagtaaaatatatcaaacttcaacatataagacattcccaatccctctcatttaagtaaaatctcatttgtattatttcttcttcaatgaagaaccattgcagtatatgaaccaatatttctgcagatagagagacagaaagatagaatatatgaaaggagtaagtctatgaagaatgttttaaacatgttgtttaaatatgtcataataagaagctactccatatgtcataataagtataagatccatagatatggggaaaagacaaggtaaagagacaacatactgtttcttttgaggctcaactttgagctcaaccagctggtaacttccaaatttttttgggagctgcatatgatgctccttcaagcgcaaaattatactctgaaagactccacattagaccaaaaaacgaaaatagaatccgcatttcaagtttatatactcacactataaaatgatattaccattgcagtcgtattggaaacaggataaacggcccatgtaataagtgaagaatttccttcaacctttaagtttgttaagtgaacctgaaaatagaaacttggttttacaaacaaggcaacttgtttttattgaagagtggccgcacaaaaattgacaacaaagaggacagataataggttgagtgtatatgaatgtaaagtgcaacagtaatgacatcttacaaactccagtctactttataataggattaccttcatagctagatactgttaatttctttcaaattcactacatcatgatttaatgaacaaattcagttattctcatttaaaataatttgacacaattaagagtaaagttttataattatgctttgattctgaaacttttacactttacgagaaaagacctcaagtcaaataatgaatggaaacatgtcagcttaagactggtttattttcttgcacaacttgagttatcaaccaaaccataacctcagctatacctgtgaaactttaacttccagtgcattggcaattaaccctgtaagctctgtaaaattgagcttcactgatttgttcacaccaagcttcatatcaaaagatatatgtcctatctgaaattcaactatatatgaaacaaaaaaatgtcatcagcaattacttcctaggtcaatagaaaataaatctctaaaagaagaaacaaagagctaaaggataaaattttcaaactaaaagctagtaaggatgtaacttcaaaagaggaaaaaaagttcatgtggagattatttatctataagataatgtgtaaacagtgaaaatggaaattttgcagccaaacagcagtaagcattaaatacatcttacagaatctgcattgactatcttattacaccctagaaattaacagtggatcatggtcataatcacttatcagaaaaatatatcccagactaaccctacctgaaaaatcattttttggcaatccatcaggagctgcgcttggaggaatttctgtgattccattcaagctgccagaatccgagggagtaactggaggaggagaactgagatagttcaaactcttccaaagttcagaacaattagttttccaaaaaccaatcttatcattttctcgatcataagtcacaagggtattgcggacaagaattcctgtaacaattcatcaatgaaagtgtgaaataccttctctttctctgtaacagccaaaactcttaggacaggctgctagaaaagtgaaaaagcccttgcttgctttgagtatacaagacaagcaaaaaacctacaacttagtgttgccattcatgaaataaaaaggaaaggaaagatcacatacctcctaaaagagtagtttgatcggcatttttaaaaattcccaagcaatatgcaccactaaccttcgtatgctttgatgaggaagagtaaaacagaaaaacaatagaatgtaggaaatacatcaatatgtataacaagtaacaataattaaacttaaagaatggtgggaaaatattcaaaaccattacaagtaaaatttaccgccgaaatttccataaattatttaagaagacagtttgtaatggatagttacccggaacaagtagttttctggagatagagacaacttttgcccattgccaaataccatatcaacttgtggaaatttttttgatagttgagtaatattcctgtagcagaattgcattgaatttttgaattgaaaataaaattaacaacaaaaaattggtaaaacacaagtaattcaggtttacaagaacataccttccagcacctgaaaaacaaatatcattataattagggtctggaccatgaatttgtttaagggaatgtagttccctcgtaatctgcacaattactgaacaaaattaacatgtcttgattgttcaatatgatagttcaacaatattattgtatcaaaaactaaaataagttctgtgtcaaaagaattaataatgaacacctcaatgctttataatagttagttaacaattcaaaagacagtgatatggctttgtggctcctgcagttaagaactcgtatcatgctttcatcgaatagatgaggttatacagagcattttatttaaaatcattgccctcacaaaaaggtgcctttggattaagctccaactattcaataatttaaagttgaaactagcatccacaacttttaatttaggaaaacagagacgataatatagtttaaaaagggtgtattcttgatgatttcttttaaaaaataacccgtcaaatcctagaattagcagattattgtctgtatgtgcgtataattttaaaatgactaacacaacacaacatttcgtaagtatcatcgttaggcctaatcatcgtagagtaactggctctgatatatgtgaaaatttccttctccgagcattgatttgtaatccctttattttggcaaaacttttctgggataatacaattcatttctttttatattaattcagttaatgaactgtgccttttattttattgttcattaagttctggcgtaaataaaacaaaaaagaaaagagaataaaactaagtgcattgtcttactgcccccttaaatgcataaaaagcttcttctggaagataagcatatgtagttccactatccaagacagttccatgctttctgtcgaagacctttgggcttaatttcaatggtttcccggccacatgtatttccttcaaatcaatattgtagtatggactgcagtcatccaaaaactaaagtatatgtgtgagatgcacaataatacctaatgatctacaattattgaggttgtctgaaattgtacctgcggtatgggtctgagtgggtaaataccatatcagggggagaagagattccaccaagaatcatagcacccccacctacacccatcccaccataacataatgagaacgagtcaccaataacacccttgtcaacaagctggtccatcacacttagccgtcctctacccaaaccgattattccatcagccctctggctatatagatcaccagtttccacattttcacacccaaaaaccgcacgctgaggtacaagttcactttcattaccaaaagaaataatatcctcaccaaggacaccactgcttgagctcatctcagcataccgccgctcataagtgcattgaaccccatccttatcgcaattacaattcatattacactttacaggttcgtacgtgctagatgaattcggctggaacctaggatcctgaatgacaaagaaataagtacagaaaatacttaataccaaaaaaattaa

SEQ ID NO: 221001 - DNA, 4360 bp, Cannabis indica
aatacattagatgaaaatcagaataccgggagaaaaagaacttctcgtgcatgagatcattttactcgtcatgaaattgatggtaaaattaaagcggtttgcaatcactacgggcgttagttggtgggagaaagttcttagggactacgcatttaaatgctcacgtaaagaggtgtccagtcataaaagcccaacttgctgttaatcctactacaagcctttcagttcctttcaattttgagcctgatttagaaatgatcaaattggctcaaatgatcgttaagcatgaatatccattgttcatggttgagcatagcgggtttatagaatattcaagtattttgtgtcccatgtttcaaatggtgtcaaggaatacgattaggtctgacatcatgaaaatgtataaaattgagaaagagaaaatataggcaaagtctggaaaaaagtaggagcaaaatagctataaccagtgacatgtggactgtaaattatcagaagagaggatatatgactgtaacagctcattttattgatgatgcttggaatttgcacagtaagattctgagttttaagtatgttgcatgtccttacaatgctccagcactacttgaggcactaagatcttgtcttaatgaatgaaaaatataagacaaaatcagtacagtgacactcgataattgtagtgcaaatgatgcgatgattgaactttttaaaggacaagttgagcctgataattttattttgaagggaaagttgctacatgtcgttgtttgtgcacatattttaaatttaattgccaaaaatagcttatttgtcattggttatagtgttgacaaaattcgagacagtgttgcttattggtcggacacaccaaaaagacatgataaatttaaggacactgctcgccaacttggagtaccatacaccaaaaaaatatcacttgattgtgtaataaggtggaattttacttttttgatgcttagcacaactttatcgtacaagacaatatttgaacgtgcaaggctacgtgagttgagattgaagtgtgccctttcagaaattgattgacaaaatgctcaacagttatgtgataacttagaggtgtttcatgaagtgaaagagttattttctgaaatttagtatcttactactaatatttttttctcaaaaatatgtgaaattaagacaaacattgacttatagatgtcatcatatgtgctttttattaaggacatgacaattcaaatgatgtctaagtttcaaaaatattgggaaaagatttacgagtttatgtgtgtggcggttgttttagacctgaggtacaagtttatgttgcttgaatattattttcctgtaatctatgaaaatgagcaatatgtaactgaaattgcaaatgtttgtgagttttgttgtaagttattggaggagtacgggtccaagtttcgtcatttgagagagaagagttcaagtagaaaatgtatcatctttttcgacacggcgaatggatgccttttctaactttgacggatttgttagagcttcctatcgagtagaaaatgtgtagtctgaactagatttatatttggaggagaacttggtacctaggactgaagagtcctcaaatatcctttgttgagtatgatttttaaggatgtatttgatgtgcctgttaacactgttgcttcagaatctatattcagcactggtggtaggcacgtgagtcctcatcgatcgagatttcatcattctacattaaaagcattagtgtgcactggtggtagatatacggatgctgaccctttacgtggcaacatctaataatttatttatttttatttaaaaaaagtcacccaataattttttataaaccaaaaattctgttgtatagccacattttatatagaatagatatataaatatttatttaatgatttttacctttttttgtcagtcatcaaccaattctgtatgtacactaatgtttctaatgtagaatgatgaagtctcgatcgataaggactcacgtgtctaccaccagtgctaaatgtagattttgaagcaatagtgctaaatgtagattttgaagcaacagtgctaatagacacatcaaatacatcattggcaatcatactcaacaaagggtattggaggactcttcagtccttggtactaagttctccttcaaatataaatctagttcaaacttcacattttctacttcataggaagctctaacaaatttatcaaagttagaaagggcatccattcgccgtgtcgaagaagatacattttctacctgaactcttctctctctcaaatgaggaaatttagacctgtactcctccattaactcgcaacaaagctcacaaacatttgcaatttcagttacatattgctcatctccatagattatagggaaataatatttgagcaacataaatttgtacctcgggtctaaaacaaccgccacacacataagcccgtgaatctttcctcaatatttttgaaacttagacatcatttgaattgttatgtccttaataaaaggcacatctgatgacatccacgagtcaatgtttgtcttaatttcacatattttttggaaaaaaaatattagcggtaggatactttgttccagaaaataactctgtcacttcatgaagtacctttaacttatcacataattgttgagcattttgccaatcaattaccgaaatggcatacctcaatctcaactcacgtagccttacacgttcaaatactgtcttgtacgataaaattgtgataagcatcaaaaaagtagaattcaaccttgttacacaatcaagtaatatttttttggcgtatggtactccaagttgacgagcagtgtactcaaatttttcacgtctttttggtgtgtctgactaataagcaacactgtcttgaattttgtcaatactatcaccaatgacagataagccatccttgacaattagatttaaaatatgtgtacaacaacacatatgtagcaactttcccttcaaaataaaactgtcaggctcaaattgtccttttaaaagttcaatcatggcatcatttgcactacaattatcgagagtcactgtactgatcttgtcttcaattttccattcattaatactagatcttagtgcctcaattagtgctgaagcatcgtgaggacatggaacatacttaaaactcggaatttaactgtgcaaattccaagaatattcaataaaatgagctattacagccatatatcatctcttctgatgatttgtagtccatatgtcactggttatgactattctgctcctacttttttcagattttgcctacatttctctttcccagttttatacattttcatgatgtcataactaatcgtattttttgacaccatttaaaacatgggaaacaaagtacttgaatattttataaatccattatgctcaactatagacaatggatattcatgcttaacgatcatttgagccgatttgatctttcttaaatcaaggaaattgaaaggaactgaagggcttgtagtaggattagcggcaagttgggttttatgattggacacctctctacgtaagcatttaaatgcgtagtccctaagaactttctcccaccaacttatgcccgcagtgattggaaatcgctttaattgtaccatcaatttcatgacgagtaaaatgatcccatgcacgagaagttctttttctcactgtattctgattttcatctaatgtataattaacaaattgtctttcttcaatattagttgatggcacaaaatcaatatcatcctcaaaattagaaccgatttgactagacattattcttcaattaacctacaataacataatattctcatgtccatcaatggacgcaattatttagaaaatatgataaatatatttaaataaatcggacagtattttccctagtttattaacctaaccatctgtccattttaatcgcaaacaataagataatacacaaattttcatccttatatcaccgcaacacataaatttcatagatcctacttctttatgatgaatatataagatattcaaactcttctattaaattataagaaatacaacattttgaacatcaatttaaaaatatatatatggatttaatatctacaagtttttaaacaaaagaatgttatatcatagttcagcacttcataactcaagtcctactttaggtccattgtttcatagttcagcacgtgtgatggatccgacacgtattttcgtaacataaaaatatggaacacattatgcgtttgagctaatactggtggcagtgccagtcgataagctacctgtcccactct

SEQ ID NO: 221002 - DNA, 4797 bp, Cannabis indica
aaaaaatattaaatttacttaataaatctaatttattcttacaagaaatattttcaaaatttattttatttctaaacatgtatcttagaaagtcaaactaaaatgattaaaaatccaataaataatttaaacaactaagatttttcaaagaaaaaatcaaagttaattatatttataaacttgtatcttaaaactaaagaaaaataattaaaaatttaatagaaatataaattattttgaaaaaaagaaattaaaattaaaaaaaaaaatgttatgtttacttaaacaaatctaaacttttgggaaaataatagactcaaacttgttctcgtaaaaaaatatttttttttttaccaaaatttgaatttttaatatatatttgttatatctaaatggatattttaataaaaaataaataattttttcaatcggttaattagttttattttttaatcattaattttttaagatctaaattagtttttctagatttactaaaaaatatattatatctttcttgttattattttgagacgtgaaatttgatagttgtcaaagttcagatggaaaattgctaattggcgactcttcagcattttaacaaaataataggacgaaacttaacagaaagactaaactttagtaaatataaaaatttaggggattcttcacaaaccatatattttagaaaatagaattaatattctcgaagttcgggagacaaaattactaattattctaaaacaaatgtgtaagccttttctttccctaaaattgggtaatattctacccttatctttgtttcctattgtctgagggcttgtttgatacgtcgtataagagtcgtattgtattaaataataaataacactatagtttggataaaacaatgtattgtattaattattacgactaaaatttttaatacaatgtatgttgtattatttaatacataacaaagggtctgtattagattgtattataatatttacaaagaattcgaggtcaacaccaatttctaatccagacctaggacccagacccggatctggaccccggccacgacccggaccccatacctagaccccgacctcggacccgggacccaaacctggacccggacccggagcccagacgccggacccgggaacctggacccagacccggacccggactcggactcagactcggacctagacaccggactcgaacccggaccctgaccttgaccaggacccgaacccagacctcggacccagaccctgacttgaaccccgatcccgaccccaacccgtaccccgactcggacccagacccggattcggacccagacccggacctggacctggatcccgactcggaccccgacccaggatccagacccgagaccgagaccgggactcggattaaataatactaatagaatacgatacaatatattaatacaattcaatactaaacatagtattgtattaaatagtactaatacaatacaatataatacaatacaacacaattcatcacaatccaacacaatacaatatgatgtaccaaacaatccgttaatgatttattgtgttatctctagtgttagtgttgttgattaatatattttgattttgcattacacttgtttgatttatatcatttcactcattttatgttccatatctcttttctatgaatatcaaaatttgcattcataccatgaatgttaatcttgattttctatcgtaattcgtagacttcaagaaatcattacaaagttattgtaagaacataaattcccaacaacacatcctagatctcggaaaatgctttattctatgttttggtatgatcatgtactactcgtaaatttttaaaaactccatatttatgtaattatataaaaaaaaaaaatacacacacaagtatgtaaatagttttctttactttttatttttatagtctgtgagagttttaaattaatgtcctacaaaatatgattatttactaattttatttttgttaataatcccgcattgtttataattttatgagagtttccttaatatcctaaaaagtataattactaactaatcttacttttgttaataatgcaatattgtttacaaagtaaagtgggacattacatatacaccataaataattttttttttttgttatttttatatgtccgaaaatttatattttttctcctgataattgattaaattagtcttaccaaattaattagttatatatatattttttaaaatctcatctaatagtctataattataaatattttattatttatatatttatattaaaaataaaataattattttaattttaatttttcaattatttataatttcatattatgttgacatgattttgttttttttttttttgtctatacaaatgcactataaataaataatatcttttatcattttatcacaatctatatatttatataaagaaaagaacaaaagtatgtagctttctatatattttctttctatttttcaaattttacgggaattaaatatttatgtcataaaaaacttaaaattatttactaagtttactttcgtaaaaatctcacattgcttagaaagtatagtgggtccttacatatacactataaataaatcttctaatttttcttttttatttgtcccaaaatttatattattctcatttttgggtaattgattaaatcagttttaccaaattaattatttataattttttaaattcaattaatctatagtttgtaatatattattattattattattattattattattattattattattattattattatctcaaagtttgtacatctgacgtggcacctacacatgatataatctagccgagactttcaagcaaaagtatgtttgacaggtcccatatgaagttgatatctgtgaactccagattgacttctcaacttctaggaagcatcgggctgggctaccattatatcagccagagaaggaaagatttactcaccttgcaagaatattttacaagtaatcccacaagaaagaaaagtctcgaaaagggcctggctgggtagtcaacacgccgactagggtgaatgatacaaagaatttcgggcaaggctacgcaagccttgatttcttcctcaaacaactcctataaatatctataattgtatcctacaaatgcgaacccgacagatatacctgagatcgtaggaacttcaacagaacgtaactgcacccgagaatataaggatgtttactttttggttactccttttacaaagctaattgtaacaacttttccttataaatactgaatgaattcacaggggaaagggtctgaaatcataatctcgcacttaagagcactttactaaatattctctgtaaacatctgagagctgtagctagaatttactttatcttccttagtgatctctacgacattatctcataatcaatacaacaaaaagggaagtaggtcattacccaaatcaaagggcgtcgaacctctataattttgtgtgttcattttatttatttattattcctaagtctttattggtgattactcaatatttgttaaactctgagtcagttggtaatttttcctgtcaatattttggtgctttcattgagagcttcaatattcctacaaagatctcttcgctttttacctaataatcaccatgatcctgacaaggagaagcgtatccactgaaccacaggatccgatagttgtggaccccaatgtctatgttccacccactggtgacaacctgaccaaccttacccagccacctcgggccaatccatctgcagggttccaaccagaaggcccaattaatactaggaaagatccaacaaatattgggtaagtcctgttcaatgttggacgacctacccaaagtaccacggggttcctttaacaagagctacccccaggtttacgctagagaaacagggcctggagttggccaacctagtgtcaacaagccccatgttgagttgggagatgattctgagctaaccaggctaagagaggtcatagggcaagtccaggatcatacaaatatcccccgtcatgaacaagaagaaacacgtgctgttgtaagcgatgctttcgcccagtagagatgcaaattccagaaatggatggatcggcaagccgcaattctacaagcccaccaggtggggttaaaccactggaatagggaggaaagtgaactaatcagatggttcaatgaaaggactattagaacttattttacttagaacttattttaccaggatctagatttactaatatgttgattataattctataatccaacatcctaaatatgaacttcctaaaataatgaaataaatacataagagattgaaaaatccttacattgatagtagcgaaatataatgactcattccattccaatctttagccctttattcctatctatagtagagcattatcaagatctgaacttggatcttctctccttcaatttggttatacacagtcttcctcactatgctaggtattactttgacatgagtgggcatactctcaattcaaggcttcaacttattcagtagagaagaaggagaattttgaattacaagaggttctctttgttttttctagttttgtttgacaaagtagtctgaagtcaattattagttgagaaaataagagccatcttattctatttatagggagatactaggcttaggtttggaatttaaatagaattaaaaagaaaaaaataatggctttattaatcat

SEQ ID NO: 221003 - DNA, 2369 bp, Cannabis indica
tatattttttttaataatagggtgtatttatcattttgtggggtgtaaatagaactccccttatttttattttgttattgtaaaaaaatttacaaatactcttaaataattataatgtatactattataaaaaattaaactaaaaattgttttgaataccaaatggacagtatactaggcaacccttttaggtagtaaaatgtacacgatattttatcttaattttcttttaagagttagggtcagatattttgaagtttgcactgaaaatttatccattattattgtggatcttgcagaacttttatgtggggtttgaaatgtctaatctcttttaatggattatatgtataatgtgaaaagagaaagattctaagtttaaaagattggattaatacgaggcattttatatttacatatctgatgtcaacggtgtggtgtggattgtggactcctaataaggtggccttttgacaagtttaatattggaagagtttctgattggagtcttatgaaatgatgttttgtttcagacttttgaaattcattacaagggagaaacataaatgttccaataaataaggataaggaagcatatgtgtgtatatatttatacttatatgtaatacatgacagagactagaatgaaccacattgttctcccaacatgttggtaatgtgagatgaaataaaagactaaaatgccccttaaaaataagtctttttcatttactttattgggttgttaaggcccgatttacagtctagtttgtagtccacgtgtaaggttatgcaccaaagtcatgctaggtccaagtctggccaaccatgcacctattggaaatgggctggccggcgttatgctgtccataagccgaccatagggccagccaagggtggccagccagtaggtgattggttcgtcactcgtcgtcccgtttgagtgtcgggacccctattgagtagggtgctgacttgacatccttgttggtgagctgtactaccacgtacgtgatgctgatattgtccatgtaagcatgccatgtcaggtgggaaaattcaagataacattttaccctccaagtccctatgtagatgtttgtgcggatagggacttcccaactaagttgtaaatgatatatgccttaactgagtaaatgttgctgcatttttagcctttgaaatatctgctcttgactgtctgatcttatttgttgcagtgaactagctgctttgcacttctacatgtctcttcagttgagtactacatggcaagtgaagaagtggtcccacaaaaattatttaagtttttttgggggaaaacgcttcttcacttttttacttttcattctctcactagaaagtaaattttgaagaagctcaaccttctctctagagctcaaacccacattatttctcttgacatttttgcactgctttgacgatatccaagttttccatgtttttcatcaacggtattttattgtgggtaaactttctatttatgtaaatcaacccctttgaaacttgaaaaatcaaactcctttcaaatactgattcatttatgtaaattttattaattattaaaatttaattatctaaaagtttaaattaatcacgtttttcaatgaattttctgattataaaagtgtaaacaacaattaaaaaaatgttgtagtgcacctaaactaggagggtgttacagctctactactaccaatgcatcaccatgcattgcctctccttttagatagtagagaccaccttgcttctcatctttgagtatcaccaaggaacctttgcagattttgagagttctattgtttcctttgaattcataacttgcatcatcaaaagagcttagagaaatcaaatttcttgcaaattttggcacatacctcacatttttgatttcttgcactatcccatcattcattctgaacattatatctccaattccttaaatttcttgcacatacctcacggctcacatgtttaatgctttatatgtatgcatttctctatttcattttctctctccttttctctctttttattaactttaaaaataatttatggtcatgttgttacttagttgacactaaaataatactattgtgatcaagtcttcaatgtgaatattttaagatgtgagaagcatatattttttttcgctatttttagaaaagaaactatagtactaatataataattaattactattttataatttttttaaatcttagttaaccttcattttaaaattttgctaaatgaattatattatattataccataactaattagctttcaaaataattaaaaggtatataaaataattagtatataaaaatagtagcttattatat

SEQ ID NO: 221004 - DNA, 1941 bp, Cannabis indica
aatctagattctggtaaaacatattccaacaggtggtatgtccattacttcccatgcaaggagaaaaaccaaaaaagtttctttttcagataaatatggtgtgttaaaggtgaaatccaagaaccccaaaaaagtttttaaacaggatttaatggatgaatgcttgttgggaaaagttgattcttctggtttgcatgaggttcaagttgacgtagttaaagatgtgagtgacgttcttgtgggtaaggtaatgtcttctcttttacttgctgtggtttggagagatgttgtggtcggtgtagattcggtggactctgaggatcagggccaccgagcattatgaattgcttggcttggaatgttcagggtcttgggaatgaccggacgttccaaattcttagatcttatgtcaaagagttttcgacaaacattgttttttttgtcggaaacacttatgactcactcggttcttgaggtgatgcgggttagattgggctttgttggaaagttagtggttgagaaagtcggtagaagtggcaggttgtgtctattctggagtagtaatgttactgtggtgcttatgggttattctcgtagccatattgatgttatggtgtgctcgcatggtaatttatggtggcgttgtactgggttctatggcacccgtaggcgcaccttaggtcccagttttggtgtcttcttggcggttggctgatgggtattctggaccctggtttggggtggttattttaatgagattcttttctcttatgagaaaagtggtggttcagtccgtgctcaaagtcttatggatggtttttgtaacgctttggcaaaatgtggtcttgctgatatgggttatgaaggagctcgtttcacgtggtgtaataagcatacaaatggctctttcttgcaagaacgtctgaatcgcatggtgtgtttgggtagctggcattcaatgattctaaattcttatgtctcgcacctgaagctctgggggtcggaccgtagacctatcttgacctgtatcctccgtgcttgtgaatctaggagacgccctaagcaaaaaggccaatttcacttttaaatggcttagtcgaatgatcctggttgctgggaaattattgctgatcaatgggggtcatctgagtcgactgatattggtggtgtgcaacagaagattaagggtgtttcaggggctcttaatgattggaatgatatggtttttaagaggacacgcgaggctatccgcaagaagaagaatgagttagaggtgcttcactctaacttaaatgataataattggttgtattacaagaaactggaaaaagagcttgacggttctgctctacatagacgaaaagtactggttctctcgtgctaagaactcttggttgaaattgggtgacaaaaactcagctttctttcatcaaagtgttactcatcgtaaaaagaaaaatgctattggtggcatttttgataagaataatgtttgggttgagtcgcctcgtggtatcgctgcagtgtttgaggaatatttcagctctttgttcacctctcatggtcgtcccgatgaagttctaaatatggtgttggattcggttcaacctagggtaactaatgagctcaatgatgtgttaatgagacctttttgttgaagctgatgttcgaattgcactgtttcaaatgcatccggctaagagcccgggtaaggatggtatgaatgttggtttttatcaaaaattttggggcattgttggaactgatgtgtgtaaggcttgtttggattttattgatgggtcagcctctgcttcttattgttgggttttatgccctaaataaaactccatttaaatgtaatccattttattcaatatcaataaagaaatagaagtatttttcattcatttgtgtatgttttggttcatgttatcaattgct

SEQ ID NO: 221005 - DNA, 1671 bp, Cannabis indica
ttaatcacataatcttgattactttccactgtgctgacgacacaataaacaagaatataaatgtgataaggatttggatgaatttataaatcaaataaacaaataaatgataacatgaaccaaatgacacaataagtgatgaaaatacttctgtttctctattgatatttaaatgatagagattacattgaaatagacttttatttagggcataaaacccaacaagtagaaagatctaaagcaagttggtggccaagggatataaccagcaagcagggattgatttttctgagacctttgctcatgtcacaaagcttgttacagtcaagcttgtgcttgctcttgctgttgtgtatggctggcatttacatcaacttgatgtaaacaatgcctttcttcatggggatcttcatgaagatgtctttatgactcttccttctgggtatagtcctggtatagtcctaagggggagaccaaactaccaccaaatgttatgtgcaaactcaaaaaatctctatggtctaaggcaagcctctagacagtggtttgaaaatttttccactactcttgttgaagaaggcttctgtcactctacaacagatcattccatgtttatgaaattcacttctgcaagtttcatcattctactagtctatgtagatgatgtcatacttgcaagcaacaacattggtgagctagaaacactcaaaattaggttaaacaacaggtttaagctgaaggatctaagcaacttaaagtactttccaggatttgaagttgctaggttcaagaaaggaattttcatctcacaaaggccttatgctcttcagcttcttgaagagcttggataccttggatctaagcctgttagcacacctatggaagtgaacttgaaactatcacaagaagcacaagatgaaaaggatgatttggctgatcctacattgtacagaaaaatcattggaaaacttcagtacctaatcatcactagacccgacatagcttatccagtaaacaagctaagtcaatttctgactgctcctaagtctggacatcttcaagctgcataaagggtcttgcaatatgtgaaatcaagtccaggacatgggattcttttccctgctacatctgaagtattgctcaaagcttacacaaactctgactcggcagcatgtgtggatactaggagatcaactacagacttttgtgttttcttggtgattcaattatctcttgaaaaagcaaaaggcaacaaatagtttcaaagtcatctgctaaagcagagtacagggccatggcaaacacagtgagtgagattacttgtttgttgtcattactcaaagaactcagggttgaacacaaaggtccagctttgatgttttgtgacaacaaggcaactttgcacattggtgccaatcctgtgtttcacgaaagaacgaaacacatagagattgactgtcatttaatcagacaaaagatataggaaggtctgattaaaacctcacatgtttccaccaaaaatcaacttgcagacatgttaaccaaggcagttctacctaatcaattcaagactttaaaggacaagatgggattggtagacatataccatccatcttgagggggagtattaagctatacataagtaaattgttagttagagttagttaggca

SEQ ID NO: 221006 - DNA, 927 bp, Cannabis indica
catagcaaatgcacacactctacctatcacttttgtttttttgaggagaccaccacttctctacttggccacacccactgtacgatttattgttatttttgtgcaaacaaaccaaaagcataacaaaaatcaaatatagaagagagaaaaataataataaataagaaaatgattacctacctcgtagctcctgctgcatggctgggttatgttatgatcaataatattttataatattacaattatttaatattcagataaatttaaaatataactttacaaaagaagacctaaaaaaacatatataccttctagactagaagtttagaaacatatatttcaacaaatgcaagataaaagtaacatatagaaaagactaacatatacttcaaaagcaaaaattaaacttgtacccatttaattaagcacattgtttttcataaataatatataatatgtatatgtatagatgaataaaaatgaagaaaaaaaaatcgaaaaatggtgattttattgttttattggttttattattttgttcatgaatttcctaggtttaggtctcattggattgaaattttattctcaagaaagataatacctgaaaaattaataataaaaacgaagagaatagggtgatttacatatttagatgagaggataaatatatatatattttatttataaaaaaaaggtcttatgataattaattgtattatgtatttaaaacctctctctacaattgccacgtacacctaatttcacctctacctctacccgaagctaaaaaaaaaccgtaatttttctacaaatgtaaaatttaaaaatagcaccaaaaagtatagatcaaatagtcaaatgtgaagtacttgttgaattttggtatactttttaagttttattgtcaaaaataataataataataat

SEQ ID NO: 221007 - DNA, 1704 bp, Cannabis indica
gctagttagggtgttacattcaatggcgtaatttgtcatcattgacgttcctttggccgtcaacgccatgatatgctaaccagccctaaacgacttgaagacggtaacatccatctaccacctatgcctcaaatttttgacaaggcatggggtaggatatttgaggggagatcgaaaatctgcctgtcactgttacaacttagccctatacaaagccaagaaagaaaagatgcccatcaagagctctaaagaagagccccgcaaagggcaatgaagttcaacccaaagcagggacacagacaaagatcctcactttggggatcctacaggtaacttcaaacctgtagaagatttcgaagaagtggaggttgatcccacttctccaataagaagactaaagatcgggaaaggtatagtgccagaaataaaatcattactgataaaatttctaagggaaaacctggacctctttgcattatcatagggagacatggttggcatcgacccctctgtgatgatccatgccctcaatattgatcgaaacatctaacttgttcaagataagaggaggttgttggacaaggaatgcgcccaagaactcaaagacaaagttgagaggccatgtgcccatgacttcataatagaggcattctatccactttgggtatgcaacctagtactggagcccaaacccaacaaaaagtgaagagtatgcaccgacttcaccaacctgaacaaagcatgtccaaaggattgcttttttgctttctagaattgaccagcatgtagacgccacagcttgccatgaaatcctgagttttatggatgcgtattcaggttacaaccaaataaagatgcatctgccagatcaggagcacacaagcttcatgatagagttaggcttgctgtgctacaaagtcatgccctttgggttgaaaaatgcaggggccacatatcagaagcttgtgaacaaaatgttcaaagatcttttcagtcgcaacatggaggtgtatgtggacgacatgcttgtcatgtccaaaaaggttgggggcacatggaggacttagacgaatgcttcaaaatcatcagtagctacaacatgaagctcaactccctcaaatgttctttcagagtaggcttaggaaaattccttcacttcatagtcaatgccaggggaatagaagcaaacacaaacaagatctaagccttttcagacatgaagtcgcccacaaccatcaaggaagtacaaagcctaacaggacgctttgttgcactcagtagatttgtgtccatgtctatagacaaatgtgtacctttcttcaacattctttgagggaacaaaaaatttgagtgaacaaaggaatgtgagactgtattctaggagctgaagaaataattggctcaacattcagtgttgtcaaaacccctagaaaatgaagagctaggcgtgtacctaacagtcatagagcatgttgtgccaagtgccagagattctcataaattccaagagctccacccaatgatctcacgatgatgcattttccttagccctttgtagtatcggggatagacctaattggtcaactcccaaatggaaaaagagggatacagttgtagtctcagtagactacttaaccaagtgggaaaaagctgaatctccaacaacaatcacctccacaaaagtccttgactttgtttcaagaa

SEQ ID NO: 221008 - DNA, 4022 bp, Cannabis indica
aagtaaattttccaacttattagttcctctttgtaccactatagattgggaattgcactctcaattatatagaaccctctatatgttccacgatatagatacgctatgagttatccatttgttataatcctaataatcaatgatcctctataaatgatttacattgagtagggacaaaattaccgttacacccttagatgtattttatccttaaaacacttagctacctataaatgatatttcagtgaactaatataattgctaaaatgagcgctctatcatttatctctattaagtcaagctcgaaggaaatcatcgtttcacttctatgtccggatagaagccatagattctgtatctatgataagcgctcctactcaattgaactaccatgtccttaatatatatgtcacgagaagatctattggtcgactttaacgaacaaattgacgaacacaaataatacaattgaactagaatagatattacggtaagtttatcatatctattccaagttcaataccagtcccttccgatgcatactgcatgcatccaacccaagcatactttaaccaatgccctggaaaggacatagcacttatccaaggtgcaagtaaactacattgcagattatcctatcagttaaagcctgtgtactgataaatcataggaatacatttagtcacacaatcttgattactttctactgtgttgacaacaaaataaaaaggcatatcagtgtgataaggatttggataaatttataaatcaaataaataaattatcacatgaaccaaataacacattaaacaagtaatgaaattaaatctgtttctttattgataattgaatagaaaagattacatttaaatagagttttatttagggcacaaagcccaacatagaacatgataaactcataacctgataacttatcataagcctattttgtcagaaaattgaaaagagaagcttctctctctaattttcaagtttttttctatttcttcattaaaatttcatccctatagtgataagattacatgtactcatatcgagtcaagtactcaatcatagtgtggaagattgtgaagaatccaacacttaaaggagatctaggctcagatcttgttattactcttcgatagaaaggaacaagggttagagatctgagtggaaggagccatattatttcgctgccaccaatgtaagattttctaaactttatatgtgtttattttcattgtcttaggaattcacatttagggtgttagattatagaatataatcaacatacatgttagtaaatctagatcttggtaaaataacttccagcagttggtcacttagggcctaggtgaccaagtagcaaataggtgataatgagactctgagcaaggtctccaaaatgatgttgagacaatatttcctttcctgggtctgaagaaaaattaatacgattagcctcaatttttcgaggggtaacacagtgcgacaattttgttatattgtattatgttgatgcttgttttcatcaacagctctaagaagattgtaaacgaggaagatgaacacatgtatctgttaatcaatgtaaatcagtttatcaaaataaatataataaagatgaatacgaagatattgtagtggttcacccccttttatcggtaataggctagtccacttaggtttttattggtctcaatgcttgaggagagttctccaagagtttagtcctcaagtgaacttttagagtgagagagtgagagtttgtgataatgagttaaagtcatttacaattgatatcacctttatataggttttcatataggactctcttagggtttaaaaaatcttaacccaagacgcaccttcccctaattatggtcgggttaggtttaaaatacaaaatgataacaaaatcatatttcaatataaatatctaataaaataaaaattattgaagatactttaatccacacgtgctagcttattttcatcacgagaagcacatacatgttgatcaagagcacatgctgaactcatgattctagcgagtcgtgagaagtacgtgctaaagtgaagagcatcccacttggggccaagatgacatgagggtcgggatgatgcttgttcccttccctccgagggtcgagatgcatgttgaggttgtaaggccaagatgatgctagttgggtcgaggtgatggttgttggcttctccctagggttgagatagcatattgaggttgtcatcttggcttggtctgagatgataatcttggagttttcatctcggcttgggccgagatgatgccttggtgttgcaaagtaggtaaggccgagatgatggtgtggtgaggagctccatgtctagggccaaaatgatcctaatgttgtgcatcttggctagggtcgagatgatgattggtgatacatctcgacttggtccaagatgattcaccattgctatgccaaggtgatgaactgatgaagcttgaacgaagttctcaaaatggtgttgagatgatatgacttcttctgtatacaaaagaaaagttaacgccatcatcctttgatttttcaagggataacacattgtgttcacatttgaaaaatagatttcgggatctttggttttgtaaacagtttgcatttatgatgtatatttatgaatataaagtttttttaaaaaaaaatacgattttatattaaatcctttgattagcaagagttagtatggtaactaaaaaaatatagtaacgtgcctaagctagtagggcgttacaaattatgtctgactctgtgcccagccaaacggtaatttaagcagtgcatgctcaacttatgtctgactccaactagaacgtttttattttctgtgccattgaaaatccaatctcttccctcacgctcccaacaccattgtacattaaatagccgaattgagttaaccctatcaatttaaaacaaagtaaaataaataccacaagaaaacatctacaaaatgtataaatcaaacacacataatcgaacacatatcgagtaccatttaacatgcatcatgaaacactcgaataaaccacacaacttatcccatatcgaatatgcatcgtgtaacaatcgaacaagtaatataactaatctatattgagaaactatcaaacactattgaaatatcatccctaacttctcaaaatactaataatcgtgtaagcatcgaatttacgaaaaaaacgagagaaacacagaaaatgcatatttgatttttttaaccaataaatcgacaaaacacaactaaatatatatacaaggaacaaaacaacaatatactttaataaaattaacattaaaaacaaatttaacataaaatcacatacctatttctaaaaccttaaaaattttgatatttttctcctatctctacgatagacttatggtaaggctcttgcttcaaaaaaaatttcatttttcactaagaatgactctaaaaatttctctaattcactactataaaaagctcatttcccatcagtttttaactgacattaaaagttttatcgtcagttctcccaatcgacgtgtatattgcagatagaaaaaatatgtgtatttgcatcggttacaaactgaagatagaaattattaatgtcagtttttaacacttgcaaacaattataaaaagtagtttttgcacttatcacgacagttataatagacacacacaaaaaacctcagatctaagcccttacaaacttagatcttagcacaattaaaaataaaaataaacataaatcaaaatccagacctcaaatattacacaatataaatacaaatattaacaaatatataaattacataaaaaatatcagacatatattgtgtagtacataaattaaacgtttgtagagaagccgccaccaaccatcaactctcagacagcgcgctaccaaccattatcactcggaccatgcaccaccaaccacttgcaaaaatggagagaggagagagagagagagagag

SEQ ID NO: 221009 - DNA, 2917 bp, Cannabis indica
tacatcaacttttaaaaatggagtattaaaaaatttacccaaaaaataattcttaattttacaaatataataatataaatatatataaatattaattaaagtaattaaaaaaactttaaaaaaaaaaaaaaaaaaaaacaaaaaaaacaatgccgtcgctacagtgcacggcatataagccgtgcactgtagataaaccctcattttgcagtgataattgttgcctccttaaagcattaaccactccatttttcaatttttgctgcctccttggagttgctcttactaccccaacattatcacatgtttttatcgaaatactagttacatatttagtgaataaataactaagtaggttataattataaaattttactaattaaatttgagtgcatcatttacaaatgtcttcttttttattttttattttaaaaaatatgttaacgcatttcaaacatattaactcatgaaattttcatttttttaatgtgacttttggaattggattggttggtaatatgtgttttatggagatactaatttgttatggtatcccatatttttttaatgatgttcttatttggtattatgtaatttagaacaacaaaaataaaaataataaaaaaaacagcaataataaagatttttgccacatccaagtttcaaatcagcacattgttaaggagttgaagctactgaacctaagccagtagccagtaagccaatcaatcatgtaaaaattagctaagaatgtaaacgcaagaatctacactcaaacttctcatcaaacaagttaaacaatgctacatagtacacgaaaatggaattgctttatctaccctctatgccgtggaaggaagtatcagtttacccgtcgcttgtccatgtgaaggccaaaagaacaatagtgagcgtcgagaaaatggtcgcaccagcaaacaaccacattcccttgctcggtcctgtgctctggctatcttcactaccctgctcgacttcctcgagaagttctctcacttgctcgatattagagtctttagcagctttggttagtctattttgaatcttctcgagcattgcaagcttcctttctctcaaagtgttctttgtcggccagatgaagcctgtcatcttccagaggaggattcccacatagatggcaacaatacagtcaacactataatgatggcgttcgcgtacttctctctgtgcactgtgaagcacgagcagccatatgagagctgaagtaaagcctccatatgcttcctgcatggaatagcataatgcccttttaggcctctgtgccatagacaagtaggttatgagataaatcaagttcgaattgcataaccggtatacataccgtccaagccatagctgtgagtacagcaaccaacatgtggccactgtagataagatcattacagcccccaccagcttttttcagcaaatggtaccaagtagatccttccgatgcagttggccttagaaaatctattaagaaactcatcgaaccccaatctgggcgataatcgccaagatactgttcaggaacagctgtgaaatagaggtaaaaggttaaaacaatagttttgacatctaagaaagatttcaaaataaaccgagaacttaccatatgctatatcctctcgtagtaattggcgtatagcattagaatctgttgcataagggacatagtacttttgagcccagtgatgaggatacgcagggactctgaaccgagcattagcacaccaaggcctggctgatggaagaattgttgaaacgaaagtaatggcacgaagaaaacgtccaatagccatagtgaatatgtatcttgcacctagtccaaggccaggagcttttaccgagtcaaacaaaacagagaatgccaacattataaacagcatgaggtagtggtgcagtccaattatccgggctctcaatatttcgacgaatgtatatggtagtttctcattcagagcaaggagaaaccattgaccagtgtcgggaagaggagctgcatcactgccaaacacagttaagccaatcaataaacttatggtgaatcgtctaaccgccagtgaaagttagcgtgtgaaataagtaatttttcgatcaggaatcaacaagtttaagtgacaagtgagttaatgaaccacaacaaagtttaattgccaaataaaacttaaaacaaatgtaaagtaaagttggtacttgtcaagtaagcttaatccattactgcaattagaaaggtgggatattgacaagtatctaatcatggtttttccaaagttagttgttaatttctgcacaaccgaaaaagtgtttgtatctacaatcttccaaacttagattaaacagaagaagaaaagaaactttctaacacaaattgcaataaaacaaatagttaaatcagtcttttgctatcttttatcaatgttgtgaatggatattccaccctctctaagtagtaagtagtcctttctaagtcatgtaaactaaaattagatgatttaatttaatgtaaaattaaattatcttcccctttataaaaacattaaaattaaacacaattatataaaaaaaataaaataaattaaccacatgagaaaattttatttcatcccttctttttaactttggtaatctttccaacttacttaaatgctttaagagtaaagaagtgaatcaaagatctccttttctaataaaagcaagtttcttaggtcagttacaaataataatgtaatactacatttgtagtgaaaaatgcaagtgacacatcattaaggccaaaaactcaggaaaccctccaatgaaaggagtttctttactatattaagcaattaaaaatctccaataacaaccccagatccgaaattagaaaggcccctattcaatttcccagaaacta

SEQ ID NO: 221010 - DNA, 13169 bp, Cannabis indica
ctaaaagcgaggtcaacaataattatcttatcatttcttagtcactaagaaatatatacttctagggcggtaagtcaaatcctacatactcttaattaacccaatacctatattatcaacttatcacaatattctcatcaattttatcaattaaaaccgttatgacatttcttgcgcccgatcgagtctccaaggttgccaaacttgaaaaatactttaattcctcatatcgctcatattacattcacacatgctatataaatctttgtgatttataaattacgcttatttattcatttatagaaaaatttaatttttttttctaaaatatattagtaggatcataatcctacttattacctgattaattcatattataaataataaccctaattacttaccagtaagcttattgggatattacaaccatcccctacttataaaaattttggagatacaactcccacatctgcgactctagttcccaagtctcttcctcataaaataagttttctggagtttaatttcatcataactcaaaataattatcggatatgacacatatttcttaacatagaaatgtggaagacattatgcaccctagacacgtgggtggtagagctaaccgatagggtacctgaactatccgctccaatatttcaaaaggattgatgtatctaggacataatttttttccattcttttcaaatctacgcacccctttcttcggtgataatcaaagaaataccgagtctcccatttgaaatttaatattcgacaaacacttcatcaggggaagagattattctcagataatttaacctttatcaaatatgctcataccatattcctaatattccattaatcctccaaaattacccatctttcaagaataaaatattatactattttcactttaatctccatggtttcgataacattcgttaattcctaacatcatagtcaaatatatcacctttggatttctcaagattagactcatcctttgtatgagttctatatcctcatttgctgtataaattgtctacactaatagacaatagattaacttggcatttctaaccgctactattcagttgaaatcataagtttccatagtacattattcataactatgtctttctattcttcctaagggatatcctaagctgatctactgacttaacttaataacaagttaagtactcattttttatagatattcaattagagcatttcttatttctactcattaacatatacttatctcaatacattgcaaatctctacttattaacacagcctttacacttagaaatatttggaatgactattgattccgtatcctaacatgaatctttctagcatactttgtctgaactcgtacgctttccaagatgagtctccagaagatttctcatcttgagattaccccatgttaagcatgcttaattccaaggtaagctcatggtgggttatcagaaagtggatgcttctttgtcattccttattgtattttttgctttcatccttttgttaataaaattcagtttccctctctcccttcactagcctcttaaaattcctcatcggttttattcacataactatgaggaatttccaccttattatcaacttgaatcttgttcatctctactcatgttaacttgcatcaattttctttgaactgacacaagttttaaattttctaatcacacagaattaaccaccattataaagtgatttaatgtaacctatatggtagaggcaacattgctcataccgggaacccataactaaactagaaatactaatttcctgaattctcaattgataacaattagtcagatcattccttgatctcaaagtttcatttctgtatttagtaggagtcttaaaaatcttttcaaacacatccagagatatatgtatctcaagtgcattctctgttttattgacaatcccatagcataaactaccctgccaacttatagagagtccccccattgatgatgctaattcgtcaacatctaacactctcgtatacttttcccttcattactaaggttttactccttagttcatacgccacccttgctctcgtgtaattatcacatcttcatacttggttaacccctctaaaatttattttatactcaattatatagttcaatgtttaataaaaacctactttgtggtctaacattcactaaccatatgaatacattcacattaaattgcatctcaatttataagtttttccccattctaggtgagtatgcctttccatcattgcctaataaggtaatcgtttcccagaatttcaatggtctccttatataccatattgacaatctagtcaagtataaaagcactctccatcattcttgtatcaccatgattaatctaggtaatcttatttaccttagtgataccactactctccatgacattcttttatatgttaccctggtaatgtccctgcttcaagccaccatcgggccgttacacccacagaatgatggctcttatacgtgagtgcatcactctagctgcttcctgggctaatgactggttgtacagatcgatccaagtgtttccaacatgctttgttcttattcgcacgcttcatggacaaacttcgtaactgaaatcaccccaagtcacgaacacttaatcctggagttgctttgttgttgtgtaccaaaacaagatacttcttgctaacataggtaaccccaagcaatttattcatgtcctcaacaactatgtagtcccacgcgtacataatctcaaaatcactacatacaacctttccctaggcgatgtgagattgtacaactcctggtctttccttcgcggtcacggggttctgactgtcacgacttgagtcgtgtcccctttgatctcattcttcccctggtagtgaatagatccaaccacacaattgtcaccttcagttcacctagaattttaggtgatactcaatttactaatactagattacttttagcccaaaaaactattattttctcttaatcaattaaatcgatgcttccattggctacttatgtcctatattccacttaagaataccaacaaatttaactcatattatcatttccctaatctatctacctcgtttgatgagttaccactaactaacatacatgcacaatccattcaaatctcttgatgtcccctcattaagtgtgaaatgtttaatatcgatatcaattgaacaacaactatcatattgcccataaaattctaacttgagtcggccaaaggatcaatacccaggtccccttgaaacataattggcacttgggcaggacccatatacatttcttctttaacattagtctttcttaacggtcggtaggtttttttcaggcgacccactatgccacagtactaagatcttgctctaaattagcccaaatggcgcctttttgcatattaaacactaaggataaggtctccatttcttattctcaccttggctgttttcctggtcaccctagaaccttttttttctaccccataattggtggtttatttagtttttgcttcatgatctactcataagggtgtttcataagtttcaccacatctagtggcacgagaagatgtgtcggtagtacaagaatagacacaagacaagcctgttattctctcaaaactcagatttgttccccttgttgtccaattatgtccaacatagcagaatttaaatgtttccagttttatgcccgagcccatacagttcgctaattaggcaattcaattgcccttactatataacttgtcacacaattaatccacatcctccaaacacttaaaacctgaacaaatatcaatatcaatattcatataccgtacacatattcttagtgtagatagtcagtacgctacttcttcccatcatacactatatttgtctaagcaagtaaggcaataactaataccataaacacgtacaataccatgagtcgacctatcttcgcagcaaatgtacacattcgaccagtcttcagaacctttaaaatcatggctactctgataccaagttgtaatgccataacccatagggatgttacatgggtgattttataaactagtttaatactaaaatattagttatttattaagaacttttataatattaaaaacttgactaaattaaaacacgaatcgcatacatcataacgacagtgaaaatgtgtttcggggatccttattataaaagatttaccaaaatgctatatacaataacaattcaaagcacaattcaaaaatgcaaagtagatacagctagcacaaaacaactcctggccactcggcacacagactaggggcaaatatgtacattgttggagaagactgtcatctcatggctgctctaacttttccttgcccttacctgcaccataaagaacccgtgagtcacatagactcaacaagaaaagtgataagaaaggatatattcaataactaatcatacatttcattatcataaaataattacacaataacattcaaaagtaggtaatataaccatccatatacgtagaaatagatatactcatatatttccattgcctaattaggcaagcccgtgtcataatggaatatcatatataatatcactgtaccacctatcaggtgggcccgtgacacaacctagcaacaatatctgcttcacctaaacaaacaagaccatacctatgctcggtactcatatgtcactgacacacgtacctaggcccgatacattgccaagaggaaaccatacaacaacttcattttatgtaataaccatgtaatggggaaagcctacacgattccattctatcattgacgcccgtacctacccccgatatgtcaccaggaagaaaccatacaacgatttctttctgttccataacttggcaatgtggggaaccctacacggttctattctgtaactgatgccagtacctacacctgatatgtcgccacaaatattacatcacctaatcaggtgagcccgtacattatgtgcattgtatcatcacattatcattgcctaatcagacaaacgataattttaggacctagaaaacaacaattttgattcatagtcatgcctatataacggttgccccataagtacaacctgaatgtcactatccatatatcacattacctactcaatcaagattattccatggcctggcattcatcatatatatatgtatattgtattgccaaatcaagctcatgtcataatctaacattcaattaacgcatttccttattagggtagctaggcctatgctataacttggcaccatatcacctaataaagtgtacttctatatcatattgcctaataaggaaaacccatttcacaatctaaaatccatatatcatatgacctaatcaggtgaaatcctatgtccaattcgcattattattgtctaattggagagtcaatgatttcaaaacttgtcatgccatgtgttacactataattttcttaccttaggttccgattcaggtatgttggctgacctgcttggagtatgatcaatgatcctgggccctatgcaataacaataatatactaataagtgtttaccccaaaacactacttaataattggaaaagacaacctagggtttcctaccaaaccccgtagttcaaatacactaaaatgaaacttatattttggctctaaaacatacaccatgtgatagagctcatctcaagctttgaaacggtatctataacgaccaaaatagacacccaagtgaaaatttatgacaaaaatacgattccaaatctctctagaatttccaaaaacggcaggcgattttggtaaaaacggcatcccatttttgggcacgaaaatctcaatttttgcactcaccaaaacaccctcgaaacctatccaaatcactccaaacttcacagggcacatataaaccatatatacaaaaatcgttgcgtaacaaaaattaaaatcaagcccttaaacggaaaatgccattaaagcttggacgtaagctttaaaaaattaacaactcgatatcttactcaatatcacctctaattgaacatgtaaaaatcaaaactagtctcataactaccaaagaataattctacaaagttagaatctccataactactctaaatcataaagccactatataaaactaatcgtttttcagcttaaaacaaaattaaaccataccttaagttgttcctcttcaaggatttgatatcccactactacctgagcttagatcgctaggtttcgggttgtaaatcaaagaaaatgaatataggaggagagggtttttgtcgaagaaggatggtttcgttctgtttttgttttactgtttataacttataacatataatatatatatatatatattaaacttatcgactggtaagtttatattaaaatagtaatataatattaatattataatattaataaaaactttatcatttattattatcttatcatttcttagccagtaagaaatttatacttctagggtgcttatcaacttatcaaaatattctcatcaattctgtcaattaaaacctgattaacccataatataaatataaaccctaattacttaccattaggcttattaggatattacaacttcaatggggtacgaactatttgtaatcttgtagagaatgtttgagactcgtagatgtaggatgtgtgataattactttataattgggtttatgggcgcctaagtgaaagagcagttagattatatatcatgtttttatgatttttcctactgagtctgttgactcacaaatatctgcttcatgtgcaggtaaaggaaaggcaaagactgaatgagcaattagtgtggagctcgatgatgattgtacatattgagatgattagacctggagggttaaatttttaggacatcatgggcccaattctaatagtcgatgggtgacatatttgttgtactattatttgtaaatgtttgtgtttactgagatttttggaaagtgattataaatgataagaactgaagaaacaaataattaaaaatgaaagagtaaaaagtgacaaacagttttttacgtggttggggcgttaattagccttagtccaccagtcagtgttattcagtagttctcagcttcaaaagcctttaggaatgcagagcatatatgttctcaagtttgcctgagcaagttttgtaagtgaatttaatccttaatccttaatccataaatgggtatctatactagtttgagaataacatttagtttccattttccctctattgaggagtttatagtgaataacacacttggactgtctcgtgcagtctagcccaaaaaggagaggatttgctaactaggtagattttatttggcttgattagttcaacatcgtgtgctttgattgtgggaaattaactgtgaattaattccatgatactcatttcaagaagtttccccatttaacttgatatgatggtctgtggggatttggcagttattgtttacatatttttgcgtatgaataaaatggggaactggatcagtcttcaggaatgagttgccaatggcggaaggctaaatggtcgcagaattgggatatgttcctggtaggactcgttaaaatggccttttcccactttatcttcattgagggacctactgatgggccttggatgctgaccttgattccaagagtccattgctagaaacgcgaataacatttaccccataagcttccagaatattgtctaaggtggatgtttgctttactccttcaatatggacatgtggaggttgaggaataaaatcatgaatttttaggtgttactcaatcgtggaaggtggcttccatttttgagtttagtacatccacgtgccaatcgtatggcagtggaaaggtgcgacaatcgatgattcgctttccaaaaatgactatattttgatagttgttcactttttggcgcaaaaatcaaaaaatagcatctacatcattgatttgtgccacgatcttcgagagcattaattgtagagatgcacgtggattgcgaaactccctagctgttggatgaaacttatttttttggagattagattacggaccatctatcttctttcatgtgggttgctctttctaggtataaataccttttgtgaactctagttaccacttttctcttattttcaaatttttacccttcaaagcacataatcttctctgcatcctctgagtttgaaacccaaattcaaaaccaagtcatcttcttcaatttggaacaagttgtacccttttgccttcgttttattttttaggattaaggccacaagaattcccacatcatcaacccccattgatcaagacttttatagcaagagaaatcatgaacctggatttcaacatagaaatcaattcgttgatcgctttagcctcttatcttcatgaaaggtgcgaacaacttcccaaaccagacgcagcaacaattaccctaacatctctactttcgatacaaggtttgttgtttcttcatctctgaactgtgttttctggatttggtcttataagttttgcatgttctattttaggatgtaattagggttttgatctgtattactgccattgtagatagatttagacatcgtaaaccattttatttgttgaatttagaacattttgaagtcgagtattttacagcagacatgctagcaaaattttcccacccccaaaatcctttttttttgggctctcacttaacatccatcttgcttttcctcttttccattcttgacttcctatctagaatgaatgacccctgagaattctcatttgtagatagttattctagttgggacctctctactcaatttatgggggaggacccttagctccctctctatgttaggtagttagggtggctgactgcttggattttcttcttctgttcaaaaatcatgcctaaacgagtccatcaagatgaaattgactcggaggaggaaattatagagtaggaaaatgttttgaaattgatgataaataattgtccattggagatggactaccacataaataagtttaggattcacaatattctgaggaagtacgagacccaatgggggctcaaacgtgttccaaggatattctagaatagactttttgttcactatgaaagacctagcaagtgctcagaaggaggcttcaacatccagagttgggctcatgtcaaaatgtgtgtgcactagcccctgaagtgctactttgctaacttctatgttggtataggcgtagcagcttttcaattcattccccaggcatatcacttattattggggtggtacattttctgtgcttaacaaaataagcatgttacgatgctagagaaggtcttgtacttctacaagatcatgtctcaacccatgagaggccacaaggagaaagtaggattctatatgctggaatgctactccaagaattttccttgtcctacaatctccatgcagtacatgcatgacttcagagactactacctctacacctctgttttccccgttgaagagggttctcaccctcattatagatttcagcattgcaagtaagtgttattccttttcttaaattttaggattccatttcacctcttgtttgctatactctgatatgtttttttttacgtctattagattgtcttccttagtttcccttgaccctgaagttggaagagagggtagccttgtacaaatccttgttatctaaggagaatcaagtataaggactcgtgacaactgagaacttacaaaaattaggcttcatcgcttcccatcaagatgtggaacatcttttcgtgaaggaaaaattttaggactctctccgaggggatccaaaataggttaataggctattgccgttgtatctgccgaaaaggctctaaaagcattaaaggcgaatgagcaatggctgacagattggaggagacagttcctataagacctgagcgaggctgaggaacttactatttgattcgaggaggttatgcgaaatgtgggtgctctgggagcgaccacttccggtagtggtgagataccctttcatataataagagctcccactttagattactttgataatattgaccaaggtggattttatccatattccttaacttagacgagagtagatatccttcaaatagatacatagataaggtagattacatcgtaaagagtcctaacaacttcattccaccagtgcaccatcattttagagtggatgtggttaataagatttacttcctatgcttcttcttgcatgagactaactaaggtcagcaagacattactcttttttctttggggaaagtcaatttagctacatttattgtttggatgctcttgatgtgttgtctaataattttttcgaaagatcatatcttttgacatggtgttgtgtgatgtatattgtgttttttatttgtagatcaattaggtacctttcagatggttctactcaacaggttattgggtaacatccaatcaagatcaaaagaggtcctagagattgccagggaatgcaaggacaagggcaaaaaaggtcgaacttccaggagtggatctcaacaactagcacctccagcttcaaatctagaggctactcctaaggctacaggaacggaagacttatccacttttgtcatcgatctgacggaacatattttgtttgtggtacccttacagaaggttccttttgagaacacttgagcggatagttctaattgcgatgggccgatcgtgatcaataagaaatggactggatcctcaaatgatggagccaacaaaaaggcaacgataaagaccaaggattaggtcttacaattggcagcttcgaggaggctgtgaaagcccagtctcagaagggatctgattcttctgatggtggaagatcactaagaaggagtactgggtcttccaagaacagccaggatcctcctccgccaccctagtgtctaaagtcattcctactatctccatccaactgtctatgggaaacacagctttgcctgcattgcctcctccacatttcaatcttcccatcaagcctatctcattgacggaggaaggcaagacctatctagaggctttggaaaattttaacaataagagcatagtagtgagcttgatgacatgaggaaattgatcaacaatattgccacaaagtagaacgttgagtttgcttactacgacaagtgggacaagccttttgttgatctcatgaacatggttgaaatgattgataggcttttccctagggtgggaaccgatgtggctccattcttggctgacttgtttggaccagagtgcttcaacgagcagcaaactcaaagctgataggtttgccttgacggggagtggggatcctacttttttggtggactctctgaggacccatgtcaatgatataagttgattttgcttaaaataaaggatatatctttttcactagactgattcatgccattttctctcgacaagtgagcttaatggcagagaggcactactccatggccattcaacaggcttatgaactcaaggtgttacgggcggagcgtgccaatcctaaaaaaaggagagaggaggctatcaaagatatagttgaaggcaacaccataatggacactatgattaagcagagggtaacagattctttggacaaaagccaccaagactaagagggactgtagagacaaaaataaggatctatactccaatgcgctaacttagatcaaagacttggaagcaaacttgaagttagcaaagttggacatctaacagaaagagcaaaagcttatcgtcctatctcaagagtatgacaaataagttcgaatcataaatgagaaaatcattaatgaaaccacgcttgagaggaagcaaagcatcatatggagttgtagcagaaggcaggggaagctgaacaaaaggtaatccaacgggctgaggagactaaggctaagttggattcttctgagaaagctcatgaagagtcccaaaacaaattaccaagctggaaggagaaaactcaggattgaagggacaacttcagcaagtaatcaaaacaaagcaagaacatgaagtcaagaccaccaaagctttggaaccagcttttatgtactcagtaggcactatctggcaacacaacaactcggtgatggaactttttgatgctgaagataggaatttattaatgcctcaaatcctagcactggagggaacgaataaagctaaggaagtagctcacaatacagagtggtagatcttggaactaccctttctgtagatgagaaggtggatggcttcattgttgtggcatttgatgttccttctacaaccaactctgcaatcccggaggtcttgcctgatgttcaacccaaaggtacttaaccaccaaaggattttgccagccgtagctacatctatccactcttatcttgctttaaaaactttatatatatattttttttatcttttaggggataagggtcccccttttcgtgtgtacggagaaaatattttatacccttgtcgtgggatttttaagtacgtagtactatttgatttactacttagacatttgcatttcaatctacagagtttgctaagttttaatgctactagcctcgcgaggttcgggttccaaaggcctagacctttaaatttttaattaaatgcttagacttaaatatttttcttattaacaagtcatctgaactccttgtaatatgattccaatggtctaaacctctgtaacgccctaatgctaagcacgctatagtgctatctttgctaatcaaagatttatctcaaaaacgtgtcaaattaaaaatattgtaattaatattaaactttataatttaggtaattatctacaaacaccgggatcctatttttaaacttttatacaaaatatgctaaaatacaacatccaggtcgcacagggacaacaaaataaaatccccagatgtcctgagaccgaacactccaggtcacgttgccacgacatgtacaatcccatccaagccaggctcactccttttcagctttccccttttctttacctacacatggaagcagaactgtga

SEQ ID NO: 221011 - DNA, 1080 bp, Cannabis indica
tgttttaagattgctttcttaatatatataccatgattttctaatcttctgaaagtttaaataccatgttttaagattgctttcttaattctttgctgacaagtgacaagcacacttattttaatttctagtacacccactgctgaatttgaaacctgtttagtgtcgagcctgacattttgctctttttatatcaccattcctttaagtacaatatgcattttgctcttgttggatgtgaatgttcattgtgtttgttttgcaaccatttcagggtacatcacaagctgaaccaaggaaccctcctcaacctgttgaagtagctcctaaatttgtttttgacactcagcctgagacacaaccagaagttgaaacagaagcaccacatacagaacttggtgcagaaccaccacaaccagaggttccagagtttgcacaacctgaagttgatgcagaaccagaggtttagggtgatacacaagctgattttgaatttgttgaagaggaatatgttgttgaagtggaagttgaaaggcaagattatgggccaaccgaccctaatagctggtggagtagtgtgcctgaattaagagtagatgatggggatgaggaggaaattatggttgaagatgcagaagatttgagaagtgttcacaacgaagatgacgaagcaagtggttacaagttggaatataatccaactcagaaaatagaagacttcaagtttgctttgggaatggaatttgcaaatataacacaactcagaactgctctcaaagaacatttcatttacatgtgtaaagagtatgttctgataaacaatgacagtaggaagtttagggccaaatgcaaagcaaatgggtgtccatggcttgttcatgctcatgtccaagaagataagaggacatttaaggtgacatcttacaaggaaactcacgattgtggaatagcattggataatagacacattaatgccagatggttgtcaaagtatttcctagaccagtttcggatgcatccaaacatggacttcaaatccttcaaggagatgacaaaagacagcaagttctcaaaggtaac

SEQ ID NO: 221012 - DNA, 2564 bp, Cannabis indica
attttaattttaatttattattacatattttaattttaattaaaaaaaattttaaaaagaaataaataaaatagtccaatttattcttaaaccaaacacaggattactttcagcataatccaatcttatccagtccagtccaatcctttttagtccaaatcctacgtaccaaacggggcccagtgttttatgaggttttacataattggccttaatattatattgagcacgtgttgaaaataggacatatgagtggataataagaggtgctttgctcacgttcaattcaatgcatatacggctcataataaaatattaggccaaatttggcagagggagaagaagaacataactcatcatcaagaaacagcaatggcaagggtagaattggtgttcatcccagctccagcaataggacacctggtttcaacccttgaattcgctaagcgcttgatccactatgatcatcgacttttcatcacagtcctctgcgagttttccttgaagtcccatctcgatgcatatattgattctcttgtggcctcactttctttagctcaccgaatcaaactcgttcatctccctctggttgactcacctcccgtggagctactcaagtccatagaaaactttatctatcaatacatggagagtcttgttcctcatgtcagaaaagcactcacagatattgtgtcatctaactccaattactctcaaggtgatgttgtattggttcttgatttcttctctatgcctatgatggatgtggccaatgagctcggcctcccttcttatatgttcatgacttccaacttgggattacttagtctcatgttctaccttgcaactcgccataaccagatcagctctgagttggaagaatcagatgctccgttaagattgcagggttttcaaaatcctgttccttcaagcgttcttcccacggctgcattttgcaaagatggtggctattctgcttatgttaagcttgctcaaaggtttagggagacaaaagggattatagtaaattcgtttgaggaattggagtcttatagttttagctcgatgaatgatggggcagaaacacctccaatctacatggttggaccagtacttgacctcaacggtcagcctcacccaagtatggatcaagttcagaatgataaaatcttgaaatggcttgatgagcaacctcactcttctgtagtgtttctctgttttgggagtatgggaaaatttggtgcttcccaattgagagagatagcatctggactccaacgcagtggacatagattcttgtggtctgtacgagttcaacaaccaacaaccatagcgaaatctgccagaggatcttagaacagatggaagtagggatgatatgcaacgagtgggcgccgtcaggtgaaaaatcttggctcacagtgctgtggcggcgtttctgtctcactgtggctggaattccatactggagagcgttgtggtagtggggtaccagttgcaacatggcctatttatgcagagcaacaactgaacgcgtttaggatggtgagggagttcggcttagctgttgatttaagattggattacaaggatcgtggagatgatcatattgtctcggcggaagagattgaaactgcagtaaaacatcttatggagggtgataaggaggtacggaagaaggtcaaagagatgagtgaaacagccagaaaatctgttgaggaaggtggatcctcatttactgctattggaaaactgatcaatagtatcattggaagcaactactattagtctattctaattttattctaaggtcaggtttgttgttgtcaaagtgaaatgggaataaagtaatttcttattcagaaataaacatttgcatttgcttttgtattgcatagtttgtgtaagcgcttcatgatttaaattgtggaacaaaccatgtgagcaccttcaagtttaaaagacttgttcacgacccattgtgttttgaaatctttaagggagcacttacgatcagtggagctaaatctactcataatctgtcctgctaaaaaatataaatattagcaatttagacattttaaaatatatacttattattattacctattaatacgtacaaagttaaagaccataagtgcgtgtgtttacttttctttctttttattttaattaataaaaacacatcactataaattccttattttttccttaatttcatatttaaacacaagaatggaagcaaaagagaaccacgcacgctaaaagcaagcatgacataattttaatttagttgtccagcactctacaagtcgagtccggacaacaaattccaacagttcaatattcaaccacaaaaatttggttagtttttcctaaacacttttttctctctcttctctcccaatggaaccaaaacacgtttttttaaaaacttgaaaactaaaataaaaaaagttagggaaattgtagtaatgcaccttctaagaatagatacattgatgtacccttagtctgttttagttacccgaaatatttttagtcaaattttttctcatggttat

SEQ ID NO: 221013 - DNA, 2234 bp, Cannabis indica
atacaaaaattacaaaattataatttgacacaatatataaattaataagaaaatttgggaccacaggtgctaaaacaaagatatattatatacttattacaaacatttatgaatttaattaattcccaaataatttataattgatataaaagagaattcttacgtgtataaaatgggaccaatgatagtatatatagtagtagagctacttaactttcttttataagtgtcggtctttctataaccagagatttctttcttcatcacattttcataatattattattatttctgtttcaaaaatgtcattttcttattaggctgtactgattggtttgtgggaaaatatataatagaagattcaaaagggaatagaaaaggaaaatgatataacatacaagggtgttgttttgtgggttggctagagatcacttgggatctctcttgcaagactggataaagattaactgttggcgtgaaagtagggagtggagcaatgtgcgcggtgacattggctagaaatcactttagattagttttgtgggttgcttgcaattggctcaccttctccgactccctcattagtgaagctctgggttgcttgctggcacttgagacgacgactaattggaaacatcattttgtgttaattgagagcgactctgaaaaagtaatcaaaactcggaatggagcttgttctacctggagtattgataactatgtactatgtaatagactctctaatcatattttgagctttaattttttagaaatgtacatagtatactaatttttgctatttttttacaaaaatactgtcaggtggtattttttactttttactgtatttttttataaatttcatactgcagtatactgtgttaagttttcactgatgttctactggtgttttttagttgttctactttgtgttttactggtgttttataaaaatacagtatttttgtaagtttcctttatttttcttgtatttgtaaaaattgtaattttgtagcccataatgtaactaagtaggcttacactcagaacttaactggtatgatttgatgtgtcaactatgcctacaaatattttttgtaacgaccatgaggactaagtttttcttctatgaatgaatacgcttttctcaacaaaaaaaaactgagttttctcgattattttaaacagtcgggtaaagtattcttgtcggtctctaagaccgttgcttattcgatcgtcaaaaaaattgatagaatgggcgacattgtaaaattatcaggaaaactttttcctgactgtgcaaaaatgtcaaggatgctaagcatagccggctgtttaagacggtcggctatacccttatatacatatataaaaataaataataaaaaaaataattaaacgaatacatatagctactacccaagctgagctccattgcggccgatggttgtcaaccatcaatgtaatcctcaacaataactgataaataaatagaaaataaaaagaaataaatattaattaaggttatattttaaaaccttacaaaattgaaacgttgaagacaacgacctctcgaggacgaagcccaggccacaataacgaacgacagatgattgcaaaccctgagcttcacagtctccttttgtttcccacagctccaccgctggattctctactgtgattgcattttgtggtggtggttttgggttccgtcgtggtggtggtgggttccatggtggtggttgatgggttcctattttagggtttgatgacaagagagagaaatgtttgaacaaaataatttttttaggttttatatttttaacatgacatccttaatgatttaaatctgggtatactataaatgagagagattagtgagaatgagcatgttattgtaaaagagggtatttcgacggtttaaaatcgttgaatagcctcttttaaaatttagagcatataattttgtgattataataaatcattgggaatactccactacactatagttaagagttttaaatagtcaacataattttattagcgagtattctaaaaaaaatcaaatttgaaaaccaacgaaaataaattttttgtatggttgtttggtccaaaagaaagtatatatgataaattaattaaagctaagtgaaataaataaatcaaaaaaaaattaaagtagaggcaataatattattaatttaataaaatttactcttgtacagataagagtg

SEQ ID NO: 221014 - DNA, 3048 bp, Cannabis indica
aatcttcttatttgggattttttttattatttgcataatatttttttgccttttagaaagtgtactgattgaattttgccaattcttcttccagtatgaatcaatggaggctctcttgtccaattgtcctggaattgaagaagatgaccactaatatatgatattctttgtcactttattacaaatgcttacttttgaagaagattatgtaggcaagtgagtaaagccgaaagtttgtaaaaataatgtgagttcttcatagttcatatataagataagagttttttttagaagttgtagatttaattttagaaaattgcttcccaaaaattggtgttaatagtcctcaaggctaaattttttatttctcttgtacccaattttaatagattattttaaatactaataaaatgacaagtatcaatttttttaatgagtaattggcggtaaaatctttcaaactatcaatttatttacaaagggtttttttctcttatagctttattacatctaaactttacttttatatctcaagtataaaactaaattaaaatggaaaacctgactttctttttttcaaaaatacagtctctacatgagaccttcctaaaatggtttcttccaaaaattctagatctgaaatcaacatgaacattgatcacctccagaaaatgctagatctctttcataatcggcgtagcttcttcaaacaacaccaccaacgatgtagaagtttttaccgaacaccatgaacgccggcgggaaactttttgttgatcaccatgaacgccgacaagaaactttgcttcgatattcaattatggcaccgcgatcaacgatcaaagatctccatgaaaagccaacgaaagaagatcaatgactgagaggagatgtccatgaacatatacctaaaaatgtgagttttttttattttcttttttctttttagaaaaataataaatctgatattattaattgtatttgctttaaatattttttaatgttgttgagttgattaatatatacatatttgttgtttttgttaatatattcttagtattttttggtgttttcgaaaatctggaatgaaaactagtgaactaaattttttaagtagtataatgagaatattgagtgtgtgttaaaatttcaaaataaaagtatgttgttttagcgttgttttcatgttttctttttgttgttgtccatgatcgtgaaataacaaatgtataaataacacaataacaacaataaaataatgaggaatatcactttattatttagaacaataaataatggaataaaaaaataattatcttcaacagtatgatgaacttttccttacttttaaacgaaaaattaaacacaactcggaaaaatttgataaataaacatacaaggtactaatactttaaatatttttctttgtaatcaggttgttatttagtgtttctgaagtatatcaaagcaaattcatactgaaaaattagttgatttgaataaattggtgcaaataattcaaatttgaaaaaaaaaataattcatttgaggtcatttactgattactgtcatgtaatagttgtttatacgttgttttcatgtattaaaatggttgcttaacaatataaaaaaaaaactaatacactagtttcaggcatgaaacctttgcaaattttagtacagagcaataataattgagatgacaacaagcactatgttgattacgaatcaagtggagaattaatataaaaaaattgcacttttgctaaactagtgcatataatgatgaagatactacaatgaaacaatgaaacaactcaaatacaattgaaatgccaactgaaggaagactgccaaccacttcaaatcaaggatgacaaaagtctgttattttacataaagttattaaccaaggaaactgatttcacgcggtatccaatgtgtgtgaacacattcaacaacacagtaacacaatcctttttggcagctacccaaacaatggtgtgcaacaatgtgataatgacagaaagtgacaatcactcagtgcactcagatgcgcaacaacctgacaaaaacacaacaacaacaacttaacaacttttatctgttccaaggaggagatcagtttcaaaaaatgttattttggttgatactaacactttgacaacagaatcaactatacaacaacaagaaaacaaccaaaagtaaacccacaaagaagttgtatattaaaaaattctataattatttcttcatcaattgatattgttttagtttaaaatgataaaaacaaaactacgcaatatctacaaaagaataattaagttgttttcatgttattgtgaagcttcatttgtattgtttttgcaacatcttatttcaacttgaaaatagcttcaagttattttcatgttgttgtaaactttgttatgaattgtttatacactacactagttgttcaacaattaaagggacatagttaaatttatatattaaaacaaaaacttatctcttacattcaaacatggaaaataaaaagagaacacatattatgttgattttgaatcaagtgggggaattgatagaaagagattgtaaatatgaagaaaaataaattatatttagtgataacattatttgttgttttacagttgttttaaagttgtaaacacgtttaatttcgatactttttaaacatgttgctttcatgttgtttgtatgttgaattttaataattaaaatttgtagatttcttaaattatatatacaattgtttttaagtttttatatcgttgctaaatggttattaacagttaaagaaatattagatttcgaagttgagatcattggaaaaaaaaaaaagatagaaaaccaaatccaaaagagattattgaataataaaactctaaatttaagttttatacttgagatttagatttgaacttcaccaataaaaataaatcaattgaaatacaacaacaacaacaacaaaataaattaaaagatgaaagcaactataaaactagttggaaattattttacctagga

SEQ ID NO: 221015 - DNA, 3091 bp, Cannabis indica
atattattttataacaatattatatatatggaattttttaaataaaaaattatataaatgagagaattaaggagaaaatagaaataggtatttagagtatttttagaccgtcacgtcaccgtctcatacttctcctttatataaatatatagatagattgcggtataaatatttaatgttttaaatattatacacttaaatactttatatttttgaaggcaaaaatacccaatgttacaattctcttacatctgttactaccacttccgttaagttataaatatggacatgtggaggacccagatgcattatatttatttattttatttgaaaatttaatattcttaatatcaaaaactaaatgctacttatttcaaaaaaaaaaaatgcaaatccaaattaccataactcagtgaaccagtacagtatatgtgaaaattattatgggaactagtttttttttttttaaaaaaaaaaaaaaacaagtagcatttggtttctaatattaagaatattaagttttaaaataaatgtaatgcaagtagtagtaacgggtataaaaaaattgtaacattagttatttttaccaccaaaaataaaacaaaatatttaagtgtataaaatttaaaatatcgcaatttactctaatttaaataagagtaatttgtggcataaatgactaagtttaacttctagttgcaaataaatacctaagtttaatttttggcggtaataatacctaagttttaattttttttttgtaaaaatataaaaatttaataacttggaccaattaagaattaccacgtaaagattgagtagtttaattggttttgaaggatgttttgtggtggatgttcatggaaggagtgggggagtagcgatgttgtggaaggagaaagatgatgtttccattaatagtttctcaagaaatcatattgatgccgaggtgttgtgggaaggaaatcatcgatttcggttaacaggaatttatcccgagcctaaccgaaaccttagagccaatacttggagattacttcgtgagttgaaggaggagagtactttgccgtggtgtttaataggtgacttcaacaatgtcatggatcaaagtgagaagaaagggggtaatcgctatccaaattggttagttgagggctttcgggcaacggtgggagattgtgctcttcaagacttaaggttgtatggtcatccatttacttgggagaaaggaagaagcacgcctaattggattgaagcaaggttggacagggtcttggttagtgaagagtggctgagaatttttcactttgcaagactattcaattatgatgtttctccatcggatcacacgcctttgatcttggacacaaatttccgaaatagaacccaaggaaaccgaaggttcaggtttgaaaattggtggctaagtgaccctgggtgtgaggaggtggttcggagttgttgggagataatttggggggttcccttcagttcaaaatcaataagtgtggagaagctttgacagagtggggtagtgagagggagggtagcttttctcggcagctcaaatggtgtaataaaaatttgaagcgtctcaaaggcagaagtgatgaggaggggttacaacaatacaatgagaccaagaaaaagctatttgaggtacttcaccaaaaggaggtttattggaagcagaggtctaagcaaatgtggctccgtgatggcgatcaaaatagtaagttttttcatgctcgagctagtgctagacgtagaaataatcagattgttcgattgaaagatgaaaatggtgtgtttgtggattgggaaaatggtttggatagagtcattttggattactttcaagggttatttacagcttcagttgtagattggagagaagttctatcttgtgtgccttctattgttacggataggcataatagtatggtgctccaaccggttttggatgaggaaatgaaggcggcagtatttcaaatgcatccagataaatctccaggtccagatggtatgaacccggcattttatcaaaaatattggcatatagtaggcggagatgttattcatacggttcggaatttttttagagatgaagccatgcaaccggggttgaataaaacaaatgtggtcttaattcctaagaagaaatgcccagataagatgacggaactcaaacccatctctttatgcaatgtgcttgctaaggtcattactaaagtcttggccaatcgtatgaaaggacttctcaatgatgttatctctgttaaccaaagtgcctttattccgggaagattaatcacagacaacatcatggtatcatttgagatcttacattatttgaagagaaaacaaagagggaaggatggctttatggcgctgaaattggacatgagtaaggcttatgacagggtggaatggtcttatatatgtgctatgctttctaagatgggtttcgatgagaaatgggtgcgaataatatctagttgcctttccccagttgagtataccgtgattagtggcagccatgaagttgggcctatcgttccatctcgtggacttcggcaaggggatcctatttcgccttacttatttctggtttgtgcggaaggtttttcggcattaattcggaaatatgaagaaagaagatggattcatgggtgtaaagttgcaaaccgagctccggtggtatcgcatatgctttttgcggatgatagctatctctattgcaaagccaatgatagtgatgtccaaaaggtgcaacaattgcttcggatttttgaagaggcatcaggacaaaaggtcaacttttctaagtcatcagctttctttagtactaacacgccgcaccaggatagaactcacatttgccaagtgttgggtattgtggaagcaggggaagatagcaagtatcttgggttgccaagtgtcacgggccgcctatttggacacccccaagtaggtggaacgtgcggcacttgctggcacaccgagctagcaagtcagcctaaacgcgcctgcaggcaaacaagttcaaaggttaggcacgatacatgtcgcacatgttgagtgcaaacaa

SEQ ID NO: 221016 - DNA, 2088 bp, Cannabis indica
gtatgagattgatctccaatttcaagttagagaaggcatacctccaataagaatcaaagatgatggtggatgcaagttttatgaacaaatacaaaagaaaaatgatgataaaaccaaatatcctattttggttaacatctcacatcaccaacagccaatgaacacaatgctagaatcaactatacctatattggggaatctagttacaaacaaggcaactgctaccaacaagaacataatatgcaacaaagatggcaaaatatgtcattgaacaaactcaaaaatcaatggaggaaagctccgaaccaaattaaataatttcaaatcttcatgttgctgaaatacacgttgactaggtgtttgcaaacaaggatactctaaaacaagcaatcaacctacactcaaaatatacaatcaacctttcaaagtaaagaaatcatcaaaacttgactataaactagtctgccttgataataactgcaactggacttttttagcatcaaagtaagactaagatgtttatcataagaaaaataaaacatacacatacatgttcattggacattacttctggaaaccatcctcaagctacaagcaacctagttggaaatgtaataaaaacaagtttgtaaacccgaaaagaggttacacaccaactgaaaattgtggatgatatgacagacgactacaatgtctcaatatcttacgaaaaagcatgaagagctagagaaaaaacaattgtggatgctcgtcgctacctgcaagaattatatagtgagatactatcagttttatacatgatgcaaatattaaatttaggtaataagatacttcatctacatagagtaataaatcagaaaattaatatgaataaatatactaattggctacctatatattttaattagataataaattaattggctacttttgcaacatgaacaataagtgacctagtgaataatcacgtcgctttcattgagtgtattcagaattaacagcaccagtaactaagaattggggaggaggaacacctgtaaacaagacatcatcaagatcatgtccaatcataatgggcacaacttgagatttccacgcaagaaaattcgtgcaatccaatttgagagtgagagaagtagtaagaaaactagagaaaggagaccaattcgatgaaggagcaggcagagcaacggtgatcgaagcaagtggagtaggatcggtttggacactagaggtgtcaacaatggaggccatcgaagacgcttagtcaatgacttctgatataatgtaaaagctttagcaatggcagtagaggtacacaccagtaaaagtacaaaccagagagaaagaacataacaaaaaaaaaaagagagagagagaaaatgccaagaaaagcttgtcaaaaactgacagcttaaactttcatttatacaactctttgatataagaaaataatagaaattagttacaaaaactttaacggactataacaaaagattaaactaaacttggacataactaacaaattagttggtatgactaattaacaaagttgtatttttgatcgatttattccatttaattttaacaatttattcaagttgggccgtttgtaaattttcatcagtgcacttgcatttccattttccacttcgcatttgttgtcgttttaattttccgcagtcgttttcgtgtatttcataattaaagactcaacacactaaaaccgcgaaggaggaagtgaagttgcttccagtgcagtacagtagtctgcccccacgccatagctcggctcacatcatggagaagaagcaaagcactcaaagaaaccctaaaatctcttccaagacaacgaaaaccttcgaaactggaaccagtggtcttaaggtaagcgaagacgatgccgctcatttgattggtaggatcgtcgagaagggtatttctgatgaaccacggtccaaaccctttccacccctaaaccctaccgttcttccctttcctgttgctcgtcaccgctcccatggccccggtaagcccctttctttcttttggcacgggattggtttctacgagaccgtgtttggttgc

SEQ ID NO: 221017 - DNA, 3216 bp, Cannabis indica
ttttgtacttttggtatcaacaccacgtttgacttattaaactatcgcaccgaagcaccgtcatttaagattgcaaggcatacttggctaataccttataatcaagacagaagtaatgaagattgagccaaccatctgaggaacagctcaacatggatgtaacttcattttttggtgaatcttaggaaatttttttggtgttttctctccctctctttgtgatttttgtgtttttggacctggattgatctagatctaagtctgtgtgtgctggtgtgaaaaccctaagaatttgagcttggtttagcgctactagggtttcgagaagaaggagaagaatagagatctaattggtatctagaatattctaaagattttgttgtgagaaattaaaacggtacaattttgattatttaacctttatttgatcgaaaattaggtttgggaaaggtcttttatgaccttgtgtttcaatactgattaaattgatttgttggagtaggttttattgtttatgtaattttctactcaaatatagtgaatgaattttgttcctttattatgaaaaaagggaaccatttcttgatggactataagattttcttgatgtaacacacgatttgatgcactttagatgtcaaccgttagatcaactcaatctttaccgttcacaaaatgcactccttatatgtatgtatgtgtatatggttaggtttgtcttcatttgtggtggtgtgtctccctacttatgatagtttccaactttcaatcgtaagttgcctctcctacaacatgtccagaagtaccaaatgtgcttttacttgtaattgagtttagtgtttctgagtttgtattttgtaaaatctttatagtgtttataacaataatatgtaccttgttgaacaattatagaaaaaataaaaattaatttcggttgaatcaatatgaatgtatttacatctattttgtccaaaacggtgtaaaatcttttatttaatttgtagattccatactatcataattggataggaatgtaaacctcttcatgaaaatggtataaactagtttaccaaagatgtccattaaaactcaatggtccatcttgtaagtaaaatgagagcccagtggaaaattggattactattagatgagagatcaagagatcaatatatgtataaatgttatattttcagaaactgttttattttgtacaactatactaccaataaatattctctaaaagggttcaaggtgcatgtatttcaagtggtaccccagcagtgggctctagtatctgtgcgtctggcaattccttaaacagcaggtcctacaaaaaggcagaacaaaaaaataaatatgtttacagaaggagaaaaaaaaatactaaaattggccactaagaaagatttattcaataaatgagcgaagttgagagaaaacaggtagattcatactatatttttttcaacacataacagagaacaagtgtatagtataatgggcagctaatgtgatcaagtgtcgacttttaagaaaatatattattgcattttacaaatgatgtatacacattatagtacagaagtcttcaaaagctgattttccatcatacccttgatacaaataatatttagataagtgcaatcaaagtattccagcttatattggaactctggaaacatataaggagcgagcaataaaatgtaccacactttcatagcaattattgcactttctataaacataagaatttatttgttaaaatgaacttttatattctaaaaaatcgatcagggccgagctaacaattcatttttaacgcatgcccacataccttgaatgattgtattgttccctctgattgaactaagctagcgagaagccctttgctatccaggtctccgtttttcattggaacaacaaacctgtgagaagtcatacgtaaaaataattaatcaacatgaatatatttgtgtgtgtgagggtgcgcctaaagttggctgcttcaaattgaggttgaaaccgttctgtacttggattgcagcagctttgcgagttgaacagcatcttcttgcccagagactaaagtaaaattcggtaaaagctgctttatgactggtgtgatgacaatatcagccttttctttctccagagaactcttgttgtatacacagtgaggttcatagtaaagagtcagctgatctcttggagaagtaacaagatacctggaaaacaaattgcataacaattaaaatgtgacaaatagttctctttattgttccattttagaaaataaaataaaagcattgttcagtaaaatgtgaccagtaactacaaaattcattttacatcaaaagaaattacatataagcttaactttatgtgaaaatcaaattcctacctaaatcacatatcaaagagcaattataacttctacataagaaccaagtaaataagttattgcatttaaagatatacagtgattgccttccttcgcaagcaatgcaattcactaacaataaatatttaagacacttcaataaaaaatatttaagacacttcaataaaaaatatttaagacacttcaataaattacagcaaaaatatatctatatacatttacccattttcaggacgctgccaaggaggaccaagaactggccctgcagtagcttgaactctgactttattgtcattacttgcttcgattacatagctttggccaggttctagatatgtggtctagagaaacataaaattataagtttgtaatagaattcagaaatgaatacgttaagaattattgcaaaactaaaagttcctacaaggcattactctttcaacataagactgaaaatagtcaacttcccattagagaatcagagtggtgcatctagatataataactagataatcaagcattcgccccagagaaaattactacaaaagtacaagtctaatatccagcattgttgtcctaagtaagaaattagctctaacaacaacctccttatcattatgaaaaaacatattgtcagaacttttctcttatcaagtgctatacaatatgatagaagaagctatagagaaacatgattttcaaacttaatatcatcagttcttaaccaaaccacaacttatttttacgagataattttctaaagtatatcacctatatttcacaacaaccaaatatataaccggtataaatgcagt

SEQ ID NO: 221018 - DNA, 1875 bp, Cannabis indica
aaattattacttgtataattaatctttcttcttctttttcatcattattttgataagacatacataaaacttggaagatccaatttctgattagtggtagtgattcaaaatggtgataagggaaatttgtaaatttcctcattatcacaaatgaaagtgacagatcagttgaaatttatgaaaatatcatttcttgataaatacaagccgtctaaattgtgagtgaggaggattccattcgaagaccccacaagtacattaaaaatcaaacataaaagatgaaaagtatgaatcacacaagaagttaattcctattttcttctattaaaatatcaaataaaagataaaatattatagcagataaccaaaacttataatcaaaatcaaatcaaatgaaggtctctacaacaagaaataacaacaaataagaacaggtggaacaaactaaaagcttaaagcttttttgcctaattctttgtacaactttttcatgactactgttcttgtcatctgattaaacaaaaactccaaattccttatccttcaagtaaaggaagcttctttgccattactagtagtagtagttgttgttgttgacaattttctcttgctttctacatatttaccggcgagtgaatcaaagagcataccggcgccgactccgacggccaagtcaatagtgtaatgacccctggttccgagcaaccttacagcttggagcacattgagagcgtcaaacgtacgcgccaattcccacctcttcatccgtctcatgtcaagagatgcaatcaccgatccagccacgtggccggaatagaacaggaaaaacgacacattccccaccggaaaatcaaccccagatcccaaaaatccctgctttgattaatactaataatgggcattaaaattcaattaaattaataattttaataagaaaaataattagggaaaattacctgaggtaatggaagctgagttgagtaacccaaaatgcctcggcatgtgaacatgaagagagttgagattgtagctctgggacgcccttctaccaaaaacgaccatagaatatatgtcgtttgcattcctacaaacacctacaattcataaactccaaacacttcattttcattcctaagaaaaataacaatctttaaatcagaaacaaactcatcaagatcgaaaccaaactactcgaataaaattaaaaaatataatataaaaaaaaaagcaataatccaaaatgtcgttataacaggaaaaacggtaccgtattgagagcagctaagacagtattgaggtgaggcgacgagaaagcaaccgatgaagtgggcgagtagcgacgaatcccagatcgaaaggcggcgatgaggagggtatcattcggagcgtgtattccacggccataaagaacaagagtcccgcggcgaagatacacggcagccaatggaatttggccacgtggagtaagtcatcggttgtccaggtcatgaaatgtggcttggcattgaggaccacctgtcctttcttggccattcccatgtcgtcgtcgtcgtcggatctgggccgaggccgtctgttgtttagggtgaggagtgtgacggcagaggggttcgatacgacgccgttcatggagtgaaatgtgagtttatatatttatatgaaaaaagattaaaggttgggtttgggaaagaaagggtgagaatgatataaatagtgtgaaaatggggttgggacggagtttacgaagaaaaagtgggtggtgttggaaatatgtataacatgaaagtgggtggggtccacaccctatgttatgttatgttgagtgagtcagaataatctggtgtcacgagtagtatagtttgaaactcatagggt

SEQ ID NO: 221019 - DNA, 1460 bp, Cannabis indica
tcctttatgttgatgacatcttagtcattggcaataatgtcaagaagatgactaatgtaaaagagtggcttagcacccatttcgaaattaaagacttcggtgaagctaattatgttcccgggatccaaattattagaaatcgtaagaacagatcacttgctctctcgcaagcagcttacattggtaaggtgttagagagtttctcaatgaccaatgccaaaggggtaattatgtcttctagacatggtttgcgactatctaaggaacaagctccaactgatccccaagaggtagaaggtatgagaaaatattcttatgtttcaccagttggaagtctaatgtatgctattgtatgcactagaccatacatttgttatgcagtgggaattgttggtaggtttcattccaacccaagaaaagaacattagacgacagttaagtatattctgaaatacttgaaggggataaaaaactttgtgttagtccacaagggggtgctttaaatctcttaggctatatcgactcaaatttttaagctcgtcttaatgataggaagtctacatattggatggttttcacccttgggtggagaagttatttggagaagtgtcaagcaatccacaatttgtgactctaccatgaaggttgtatacatacctgccattgaggctgctaaggaactagtctgtttaagaaagttctttacaaagctaggtgttattttaaatatgaaaaaattgctagtgttactttgtgacaacagtggtgcaattgccaatagtatagagccttaaagccacaagaggagtaaatacatggagaggaaaaaccacaacatcaaagaatatgtggcaagaggagacatgctggtaaaaatggttgatcttgaagacaacctagcccacccattcaccaaaacattgacagagactacattttaaaagcacagagaaaatttaagattagttgaaatggattgattattttatgttagtgcaaatgagagtttgttgggttttgtgtcctaactaaaagcctatttcaatattatcttaaatttaattatcaataaaagaatagaattattttattaattgtttagtataatgcttggttcacatgtttatttcatgatcatatatttaatatataaattctagtaaattcttataatatttctattattattttattgtctacacagtggaaaataattaagattatgtgattaaactaattaattccatgctttatctgtacacataatttacactgatatagtaatcaataattttgtttacttacacttgtatagtggaatatcttttccaagacattagcaaagtaaacttgtattagatttatggttatacattagactaggtcgatattcatagtggaaaaaatatcataaacttaccgtaatatcctttctaagtaatatcacttagttgatttta

SEQ ID NO: 221020 - DNA, 1696 bp, Cannabis indica
gttttttcatgggtttagggctgctatggctggctgttcttcacgttcagcaagttgtgaaatgaggaagacgatactgtagaggtctgatatataatcctatggtgtcggttatttggtattaaccgacgccataggtgccatgtgttgaataacggttgcacctatggcgtcggttaataccaaataaccgatgccgacgccatagggttaattattaatccttaattttaccccaacccccaaccgacggcatagatataattaaattctatacatacagtttttaccaaaaaaccacctttaaatgtcaatttcaaaccgggcgagtatttttacactactgcctctaattaaagcccataattgttgtagtgattatataaaagtcacaaatttgagagggattgggacaaatgaatccttactagcaagctcatcgaaccaaaatacttcaccaaattattaacaaagttttcaaaacagattccaataatgaaaaaattggggtgtttacaagaaaggtttgtaaatatgttaggaaacatcaaggtataaaactaattatattaactaactttggttttattaagctttttctctttaagatatgtattttcatttccgatcataacaagaactaggaaaggaatatcaattgcaattttatatcgaattattattttatttttataagatattaattatatatagcataagtccaatgtgtttgctctaggaaaaaacctctaattagctagctacctggtcaatttagataaaatgaacctgccaaatttgaatcgattacttggttgagtgtatatatgcaaattaaaaaattacttaataaattctgcataataagagataccttttatgaccaaattataacttagacaaagactgttaaagtaggaagtaacaaaattgaatactatctttgaaaataaaaaaaatattttgttttgaaattcttggctaaaattaggcaaaaacatatagttgaagaaattgaggtactatatatctttgaatatgtcctacaaatgctatctaaaagtgattcgtttgaaatcggagctcagatcatgcaatgctagctagacttgtttgactaattagttcgacttttacaataactacaaatacgtacacaataatattgtcttataaaatatgattagttctccagcagaataatttaaaaatatatacatatataaattagggaggaaaagcaagatgtaatatatatgttaatataattgaataattgaaaggatgctaaaaactattacatatatatatgtggctaattaggctcctttatttttttaaggtaggaacatgtttcttactgaaaataattgtgatgaataatcgttccaatataactgcttaaataaattgttagaatacataaggctattttcttcaaggaataatataacataatttttaaagtttaattaatagcaaaaacaccttagctccaatttgaaagattgtggctcggttgagtttttaaaagttatttttagattttggaaactcaaagtatttctactgctatatatatagttggtaattaaccaatcatttttagtttagtagtttttttgtgaaaagatttcttagaagctaaaagcaaaaactcaaaatggacctcaatgtacatagcacttttcattga

SEQ ID NO: 221021 - DNA, 1641 bp, Cannabis indica
cattaaagtaagtttcgtaaatagtgcaagtcttataattttcaaattgtgtttctattaaaacaaaattataataattatgaaaattcaataaaaaaaattcttttaattggcataactactcaggatacaataatattacaaaagatactacaacattttttttctggtcaaacaatatcaaattcattaagaagaagctaaaattttggtgagcacaaggggactcacttcccacaaattgagcaacccattaaagctattggacaaaccccgcataatagtaacatggacttctacattacaatcccttttaaaccaaaacacaaaaatattacaagaaaaaagtatctccaacagctcaaagaactcaagagccatctttcactcagggcgtttaccttttttgattgtttgaaccggagataaacaaccagagaacaaatcccaattcctgccctgaaaatcatgaatgaccttagctccccaccacgccgccaacaactaaccatgaagaactgatgacacctcaactttcttagcaaaaacttcctttgcatggccttttgcatccacgacgacaactccaatagcagtagaggagtccgagaaagcagcgtccaccataacctgcatcttcccatgatggaagggagacgaagatggcagacctgaggttatgaactttaaaccaagacttggcaactgagaggccatcttccaatgttcttcatgttagtttaatggtactaaatcaggtacgcagcgaaataataatcaactgattatcattgtaccgtagttctaaggatctccggccacgtgtgtatatatattaaatctaaaaaatataaattgcatgaaagaaataaatacctcttgatgactattagggtattctcgaaactttttgtaagttggatccactaaatctcacaccctagtcttccaaattaatccaccacacacaaggagtagtgtaggctactaggacaaagtgtatatgaagcttttgtataaatctcaatacatgagcaagaactatttcttatgtgatagagagaaaaaatatttactagtaaaatcctttttaggctttcaaaaagttacatgaaaattctattctcaaaaccttgtattcaaaactttgttatacgttatatttaaataaactcaataaaaattttatttagttaattatttaaattcaaatttatttattaaatcatatttaattatttgaataaaataatataactaaattcggttatagatatttacatctaataatcgattgagggaatccctcaactaccttgagagaatatctcaactagtttttaaattcatatatttatctatttaattaatcaattaatcaattaattaattaacctaaaaaggtaaaactaatagggacaccctacaaatgtggagtgcatgcaccgtgtttggacacaatgcatgtggcgcctcctatgtcttgttagagacaaggaattcgccttttgtcctgataatttttgtctttaccctattaaattaatttgaaaaataaattatttattacaaaaataaataattattattttaataattcaaaataaatttttttttgaactttcatctacaacttttatc

SEQ ID NO: 221022 - DNA, 5960 bp, Cannabis indica
atactggcatactttaccaatgccttggaaagaacataacacttatccaaggtgtaagtaaactttatcgctgactatcacatcagtgtaaatccagtgcactgatgaatcatgggacataaacttttaaaatatataatcacaattacctttcactgtgttgacattactataattgtgagtaattatatgttctgaatttaacagaaattgtatatcaaaccttaagcatgaaaaatacatgtaaagataaataacttcaattcttttattgataacaaataaaattatatagaaatgagttttatttatggcgtaaaatcccaacataaaccccttcactttctcacaaagggggatcaaaaaaatgacatagctgaagctttgctaaaatactctctaagctttcttcatcttcaagagaaacctaaagaactagagttagagttttctcataaacaccattcgtaatacattttacaatcctttaaagtcaatatactaacttgtggattagaaatatttaacgcctaaactacataaaatttattgtattttatttactatttttagtatttcttaagctcttacttaattagtttgtaaaaattttggtaaatacccatcaaaaataacttaccatatgaatgtattatgtgtatacaaatatcattactcatcttaatatgctttatcttcaccttggaatcctaacttaaaaggaagctgtgacaccaaaggatatactaggcgagatggtgctgctattacatcccaaattttctcatttgaatataatcccatgaatccaggttcacatttgtgtcaccacgtgtctcctcatgcaacattttgtgtggtcgataacagagggtccaatccaatccatgataacttagctttaataaaatctaagggaaaaaatataaaattttgccaaatagattgagaaattagtaagagccacagctgagaatgagataggataagagtttagaagaatgtttagtttccacaaaaaaaaatataataaaataaaataaattgttgagaaaattattccaacggttatgtcaacttcttgccatccaatccttaaatataacatatattttcttatcatttatctatttatttcacctccctaaatcacttatttatactctacatataattttctgatatcctttactcaatcatcaatcttcttcattgcaagtaaaaacactagaaaatggaacagaagactaaccaacgcattgcaaagatctcaggtcatctttacccttcaaattcccaggtaagcttatttccatgtatgttttgaaatgatatttgctatgtttgttatgcttagcatgagattttatggtgtaactatagattatggaagatagttctgaggtgatgatgagagctaactgccgagccaaaggtggagctccgggcttcaaagtggctatattgggtgctgctggaggcataggccaacctctggcaatgctaatgaaaatgaatccacttgtttcagttcttcatctctatgatgttgttaactcccctggtgtcacagctgatatcagtcacatggacactggtgctgtggtaataatgccttattatgttaattttcttcttttggccctttttctctttttagctcatagtgtttggaagtaggtgtaaaatactttattgtttcttataaaattttaggtgaggggttttctggggcagccacagcttgagagtgctcttacaggaatggaccttgtaatcattcctgctggtgtgccaagaaagccaggaatgactagggatgatctttttaagatcaatgctggaattgttaagacactttgtgaaggaatagccaagagctgccccagagcaattgttaacttgatcagtaaccctgttaattcaacggttccaattgcggcagaggttttcaaaaaggctggaatatatgatccgaagagacttctcggggtcacaatgcttgatgttgtcagagcaaacacttttgttgtaagaatcactcaaaagggttcattaatcagctttcttcatagtctactatgctacttagtaaccatgatacttgataatgttacacttgaccactgcttttagaaccactatttagacatgttcatcgactgtgttcatgttcgtttaaatgattttattgcaggcagaagttctgggacttgatcctagggaagttgatgtgcctgtcgttggaggtcatgcaggagtgacaatcttgccacttctgtcacaggtaatttagaaccttttcttttgttttccatcattgttttaaacaataataacagatacaatacatatctctctgggacaggtgaagcctccctcttccttcacccaacaagaaatagaatacctgaccgatcgcattcaaaatggtggaacagaagttgtcgaggtaatcccttgaaaaacgaccaagaatgatacttgatattgcaaaccaaaactgggattttgtttaacattacattgatttttaacagtttttttattcatttgttgcaggcaaaagctgggactggctccgcaactttgtcaatggttagccataatttactcaaaacatccaacatcattacatgttgacttaccaacttattgttgtaagtaaaagcttatgtttctcacaagtgaaaaacaaaacatttataggcatatgcagctgttaaatttgctgatgcatgtcttagaggactgagaggagatgctaatgttgtggaatgctcttttgtatcttctcaggtaaagtttggtgtcacgagcttgagatacatattttttctgataacaacttctaaacttgtaaaatgttttcaaatgacaggtgacagaacttcctttcttcgcaaccaaggttcggctaggccgtagtggagctgaagaagttttccaacttgggccactaaatgagtacgagaggtataaataaaacagctattttctattgtttttacataactaaatgatataatcacagtacaactgagttaatttactcatctctaatcaggattggattggagaaagcaaaaaaggagttggcagaaagcattcagaagggggtatcattcatcaagaaataaaatgaaggcagtcagtgaaattgttcttatgtaattataatgtattataacaagtagtttgtatctggaaccacctgatggaaacgaatctactttgttatatgattatagcagatttcggaaccagacaatttacaactatcagcttgaggccatgagttaagatcatgttaaataaaacataaaaaagttcttctttcttaaattcaactcaagatgtatcactatgttcaagtctcaagcctctcaaccactcactcatccgggttatgtacaatacaaacttatacttggtttttaatattatagtaaccaacctcggggaagtataagtgaaaatggcgacctacatagtgaagtccatatctttaacggtataattctattctaataaacttaaaatggggcaaaacacactttatctttacacttaaaccctgtgaccaggaaatcacaccttatgatgtacaccaatttacagtgtgaaggggtcaggaggagggtaaataataggagtccttgacattgtcacgttcccagtaagtacattaagtgccacagtgtcttccacaacaactggtttaataggtactattctctcaggcacaaccttgtcaccatctaccttagcaagtacctcaaaatgcatctttactgtctcaggctttgttctccattcaggtaaaccttcccagtaagcatcatctccttctttcaacttcttctctgccgcaaagccaatcttcaaataggtttgagatgaaacatcagccttcagcaacttaaaggagcctttgttgttagcattaggacccagaacagaagcgagtagcgtctcaaaaccaactacttttgagttggacccattgatggaaacaagaggccacaaggtggtgaactggctaggacttaagagggaagtgacctcatttgagagatcaacagatgaaagggtctcaatagctttagttttagagggcgaggacagctccacaagacctggcgcaagtcgcttaagcttaagcctgttactggaagaggatgatgatgacgatggagatgtgatagaagtggggccaacaatgcgaagtgagagcagtggagagccttgagtgcgggaagcatggcgtagccattcagccagggtaagtagaccagaggcaaagccattgccagttcgattgaaaggaagaggcagatcaagtgggtggcgcaaactaaccgatctggcacccttgatcgtaaccacggcaccatctgctaatataattttcttcaaaacaccagcatccacatcatgctgcaaatttgagttacatcgcaaaagtcagtgtcattataaacttcataacacaaatcgtatccagaatcttatcattcaatacaatgtatttaattttaaaagaagctaagcggctcaaatcaaaattttgatttcactctacagtataagaatttataagtcagccattcaatttttcaaataaaaaagcaacagtctttaagatattcttgtgatatcttctataccttagcaatccaaattcatccaagcaacatggattttcaacagaagaatcccctagtcatagtacgtattataactatcatcagaaactaaaaaaaatgctcagaaatatatcttccttggaattctgaaatatcaacacactatcttcatgatttcttatgatcttgtccatatatcagcaattgacactcatctaggcaactttgtttcacaagaaaatcatctcatactagtatcatcaaataccttatcaactataccaatgataaggaagagaaatttcaaacaatccttgagatatacttacagggagggagatcctcatatccttggcgtcttgaatccaaagctccattgggccagcgagctgaaacggggccaaaacaggaggtaacccactttccaatttactcttctcaactagcccattctcaaccctaaaaatgggcaaatcaacgtagtcccatttgtcaatatcctccaaaagcttgaaaggaaggaccttgttatcaacctcaacatcgaactcgtacgcaaccgaatgtcctacccgcgcatctctcaaatcaaaaccagatatcttcaagtcctcagcctgaagccccaaccatttcaccgtagcatctctcaaatcctataaatatatataattaaaagctaaaaattcaagaaagaaaaacagaatcgaaaaaattccaccaattacttacagaaatagcttttgggtatggggttgagaaatcggaagacgaaaccagagccgaagaagataaaggagatagcgaaacgacgagaagaaagaacgctgtgcgtaggttaaacgacctgggcgccattgtcgtttaataagagattttggtttggcggtggataatttgagaatgaaaaatggaatagagtcgttgaaaagaagttgggttttagagagaggaaataggcgagagaaggaatgttctggatatgtggtggggaatctaaggaagtaatgacgtggataatgggaccaatgggaagaaagtaaatgatgcgaaggattaaatttattggttgggagttgttggaggttgatgacgtggacgtttagaatagggaaaggatgatcgctagtactactccctcgacgcggttttaggcggggaatgcgtagagggttgagaattgctgattttataaacgacgtcgtgtgatcctcttgctgaatacgggaaaaatattaaagaaaaaaatctaaaacttgaaaatcatggcgtcgcccgggttcgaacaggagaccttcagtgtgttagact

SEQ ID NO: 221023 - DNA, 1249 bp, Cannabis indica
cccattttcaatcatagaattatggtcttgaattttggagttttgtctgccattaagtgggttttctttcctttttattattttcttcttctccatcgagttccaaatggaacccctaaacactctttctctctctgtgtaatctctatacataaaaatatataattataatatgatctttttcatcaattagaaatgtataaacccatgtcatttacagcatgtttataattagaaatgttactaaatttgtttaaccgactagattaaaattgtctccggattacgagtttagacaataaattaaattttcaactttctttctggtttttttattgtaaatattattattttatggggtagagagacgaaaaattgcaaatgaaaatactaattaaagtaatggaaattatttgtttctttttttaatggagattgaattagcataaacattataactagggatgaactagaaatttctttggaaagaaataaatcttgtacaaaccatgctgcaactttaagaaaccaggggacaatatatttaccaaatgagtctacgtaatataaaacgtgaggttggattttttcagttttgcaatttttggatccaactttcaatttctgtcggctcatagataagctacacactattatatgaagaaaagaatattccaataatcttgttatatatagtgagagcaaaaaaattaaaaaaataaaataaaacaaatgtttaacttttgttcatcagttagttttgatttccacactatgggtgtagtaataattgtgtaattaattatttactatattttttcattgtatgaagaagaaagtaacaagtatctcacattatttttctctctttttatatatatttgacatcttaatatatctccccaataaaataaaaaataacgctagcgacttatgggttatttaatcaaaattaatattagaatttttatcctttattataaatggttttttgtttttcttttaactaaaaaattaacttttactaaatcaaatcagctaccaaaatagttttcaaaccgaaagggacataacctcttcgtccgcgtgaaatacagccaagaatagaaccagaagaacgagctaaaaagttagccgccgagttcccggaccgtttattataaatcgcttaatttgcttattttttattaactatgtttgatgagcaatatctatatgtaattgactaagtttgggttaccaattaatg

SEQ ID NO: 221024 - DNA, 1923 bp, Cannabis indica
atttttattagatagaagcttccctgtcaataaatagtttattattgatgtcattcaagttggatttgcatcaattatctccacatcctggtcatccattttgacaatacttggttctttgagtttttcaatgggaaccaaattgaggttatccatcttaagctgtgaagttagctttgccaacacatcagcattagagttgtgctctcttggaactctcttgatattgtaataatcgaattttctaagtttttttgaaccttctctaaatatttagccattttaatatcttttgcttgatattccccaagtacttgatttactgtcagctgagagttgttgaaataatagatttctttaacttttatgacttttggaatccttagtcctaccagtaatgcttcatactcgtccttattgttagaagcatgaaattgaaaatatcaatgcatagtgaaatctaaagctctcaagagaaatcaaaatgattcctgcccccgagccactatcatttgacaagccgtctacaaaaagttttcagatcttttggtctaagtcctccccaacatttcttcaaagttaattccttctaccaaaatctactaaagcttgcccttttatggttgctcgtggatggtatgagattcaaattgttccacttcaattaaccatttcattagtcatatcgaagcatctggttttgaaaggacttacgttagtggttgataagttaggactttaattgggcatgcctaaatatatggttacaatcttcttgaggcattgactaggcttagcgcgagtttttcaagttgtggatatcttgtttctaccccccacatttcatgttattttcacacgtgggaataataatgagtaactgtctaaaattaaattatacacttaataactgttacttttgatcttatctttgaatgattattaactgggtcatctttctgtttaatacttgtgcttctcgcaaataatatgaatgaattggtccttcttattggttgctaaaaaagtgagcttcaactgatagaatcctctccttgtaagtgagctttcttaaattgtatctcttgtgcttcttgagatgaaatcattccacctcccagtcaacttggtcttcctcttgtcgtttatttcatttaacatgagtctttggaactcacatctcattagtgtttccagagcaggttattgtgtgggtctaaggtcttgcttacctaccattcttatgatcaatatttttagcttacccttaaggcgtaaggcaagacttaaattctaaattatataggtattttcaaagacaaattaaatagcacgttatttcttttaacatgtgatcctacttatcttcgagttcctgtacacatgttacagccatatttactgctcgaattatgggcataacaatagattgaacctcactatttcaatgaccattaagaaggacaaattcatccatgttatttgcaagaaacacaagtattgaacagaaagacggctcagtcaagaattgttcaaagataaaatcaagattagcagttattaagtgtattattaaattttagacggttactcattgttactctcacatgttaaaataacatgaaacgtggggaatgtctacgttttatgaactgtcattaagataagatcaaaaagaataactgacattgaagatccttataaatagttgcatcaatcattgcaaaagcgacgacctattctttccttacaaaaagaatattcactaagttatttcttgtaaacagaaaactcagaaagaagagtgacttgtggagtatataaattataactacaaaatcacgtaaaacttcattgtcctgatagatatacaattaatttccttactttatttattaaaaagaccgtgtttttgtcaaatgt

SEQ ID NO: 221025 - DNA, 4353 bp, Cannabis indica
tttttattttattttttggttttgataattatcattacttaaaaataaatgtatatatatattgaaggatattattgagctttgaagaatattcatattgatgaaatatttagctctctttttacattctttcgaaaaggtgttgttgaaggtgaaatatcagtcaaaagtaggataaaaatatactgatcgagcatgatgaggttgatggggcctaagagatatgccatgctagcccactatacagtaccgaggaggagaaggagattaaatgggccccaacaacgagcccactaactttatgaggcttttgtaggcccaatacgacacctaaaagacaaaaaactgttcttgaatttgtcgtctttttatgaccaaattagcctttggtgcttggctttcttttttgtgaggggaaaagttcaaagggatggtggatgacggcgattaaagagggttttgttgtgtgaaagtacttttgtgctttggttttgagtttttgaatgtttttgcttttttggtggctgatataagcttcgcctttggatatgctcaacattacatagttttaccaataaggataagtggaagttttattactggttctaattcatatcttcatcctgaaacattcctattcgatcgcgttatttgtattatgtaaattagtctcttgaattggttaattctaattcaacttcaagaaatgtaaactctaatctcacatcttgtgtttgcatctcaatcgcgtgtccaccattcatcattactacaaaataattttttcgaaacatttttttttgagaaaaataataaaaaggtagctaaaacgtccaaatatactcacttattaaaaataaacatttaaacgcggttattttataaaaattgtaattataaagtttatcaaaatcctatggctacccattcaaaaaaaaaaaaaaatcctatggctacggttatttaatcagaaataatgaactgtaaaatacatcttatgacatcgcttattagaaaataaccgacgacataggtatcatttaattttgacacgtgtactgtacactatgtgtaattgttgacccctaaaaattagtaagtgtaatttttgaagatctctagattaatgagatagaagatcctaaagtatactaaaagtgtatgggtaagaaaataggaggttgactaataaggtgagacaccacacgagaggaagagctagcacgaggaggggccaaggcgcgagttgagctccccgctcattctctctccctgttactctcgttcaaccaagggagctccctgctccctccctctctctcccctttcctccctattcaaccaagggagctccgtgctccctccttctctctctttcctccccagtcagctaagggagctccccactctcattactccctacatgtaccaagggagcagtggagatactatttatctcactctaggtacaagctgacatctgaccaatactggtccactacatatttgacacgctgacccttatagtacaatcataactttgtctccttatttttgggatcacttgtatttcagagccattagagctcaagtataaaagccccatttaaacactagtaaaagagttggaaaataatcatttataagggagtttagagattcagtacaacaccatttttctccattgatgttctgagtttctcttaagcttttcatctttacccttttgcatttgatttcctaactaaagtttagtttacgagtttttaccgtcaacagtaatgcatataatataatttttaaaaaaaaaaaattaaatattaaagtattatttactttattataatatatatttatttcaaaattcctttttattttaagtaatatatattaaataagtaaatatattttagtacacaaaaaatattatagtgttttaattaaatttatcaaaccatttttttcatttttttaagcagtgtgagcagatttttgttttttttcttttattattatagtgtttctttggtggctttatcttgatgcgatacatgtagctataaatttaaggctaattaaaatttttgcccctgaactttaacatgtactaaatcatgctcactgaattttaaggtgattaaaaatttcccttacactattgagattgttggatttgaggacttttgtccaattttagtaaggaaagtctaacctaaataaatgttcagggggcataatttggtacatgttaaagtttgaggggtatcatttggtggatcaaagtctaatgatcatgatttagtacttaaataatcactgaattagtaaaattgaattaaattttataatagtccttaaatctaacaatcttaatagttcagggggaatttataacgactagaaaagttcagggggcataatttagtacatgtcaaagtttagggggcgaaaattctaattagcctaaatttaattaagggcaactccaatggtgaaacttaaatttagtgtttaatcaacaacaaaaaaaaaatactattttagcactaatttttttttttctaattctaaccacaatactataaattacacaaaaaaatatattctttattatttttatatataaatataaataatacatatatatattaagaaaattaaattatttaaccattatttaattattaaaaactaaaaaatagaaaaacaattttagtatggtatacagtgtcccactaataatagtgggaactgtagacaatcctttatatatgatagcttttagtgttcggttaggataattttaaagaaaaacaacactaaatttgagtttttttgtttcccattggagattccctaagagtaacatcaaattagatccttggtgtgttggttatggccttagggatgtggaggcggcttctcatgtagttattttctatccattacttgaaatggtttggcgagagcttggtttgtgaagggagctgcaatatcgtggtggtggtctaacagctaacttattagttgatttatttcatgtgctaaggcttagagagtttgcaatggttcttttgtgggtgtggtttgataaaatgcttgtatttatggtggtgctcattctcgtttggaggtcctggtttccttagctacgaatgcattagtgaatttcttaggtgctgtgagtagaggttcatggtgcacggggatggtggtggtgaatttggtgtgggtcatacggttgggagggtggatatgtgggtgaagtcggcggtgggtgagttttctttgagtattgatgcttcagttgtggttggaagggagtttatgggtcttggaggggtgattcgagatggaaatggagtggtgtgggcatcatgggtgatagggatgcctgggaagttctctattaacgtggaagagttactggtagtcagacttggtcttcaatgagcaatgaggttggggtttttaataagcaaggctgaacaatggtggtctcctagataaactcttcagtttgtaatgtattgtttgttatttgtgatgtttctcattttatagcctcgacttatggtggctcttactatgatatctcatgttctgtaaatggtgtagctcatgcacttgccaaatctattacgtctttgtaaggagttttagtttgggaaaatgtttgtcctcattttattagtgctcctgtaacagttaatttgttggtttaatgaaatccttcttttttgaaaaaaaaaatagtgtgaaactggtcctaaagcagaaacaaaataacaattgcttcttcaaaccttaaaaagtttgtcattttctcgcaagtcataatcacatcatagagttttgataattggatatatgagagggttgggcatccgatccaatctaaatttttttgcttgatctaatctaatctaactactaatcggatttagaaaatcatcatctgatccaatccaactagaccaaaaaatccaatccaatccaatccaattactaattggatttgattagttttttaattggatatccaattacacacctaatttttaatattaacttaaaataaaaagaaaaatacggaaaaatattaccctttattttaatttaatactctataaaaatatcattgttacaagtttaatgcaactaaaaatttaaaataactaaaacaataatactcacaattaataaaaaaagaacaaaatatcatgaaaatatatacaaaaaataaccaagtgttacagattcaacatacaataaaaacaaccactaaaaatataattaaaatatatattttttttattttttttaatacttttaagaattattacatgaaaa

SEQ ID NO: 221026 - DNA, 3703 bp, Cannabis indica
atatagtaaccctcacaatcgtaacaacacaagttatttgcacatttttaacaattctttttgagtcttaattgtactccattattgagataaacaatgttgtcaaaaggtaagtcgtatgagcagtactttgtatatttcagagaccaacaaatataggaatatcaaatatatatttgattataaaagtattaattagtactatgccagtggaggaacaatctatgattttgtttattgaagaagattcatactgaaaagaagaacgttcatcatctccatccataatcaaataatgttgaaaaagaattccattaatgaaaagaaaagggggaaagttgaaaaaggacataagctttctgtacgataaattttagagaggacctaaagcagagcatgacagcaattaagattccgcaaaagccaaaaacagcatatttgaagcagacagttttttatttttaaatgttgtgaaatgaaaagcagcacaaaacattttgtctcctctatatgatttttctaaggccaccaacggtacaagtcattgtactgtacgatgggtataagatgtggtgatcctaatggaaaggataatttatccttaaacatcaggtggtgtcaaggccatggccactcgttcattgcataatgaaatggttgttttttgttctgaaacataaatatggtattctaattatgtaaggtttggagttggtggagtaggggagacatagcataaacatggttaggctcagtgtatcaaaaatgatgagattcctcttgtctcccttacattcccataccatatttgagtatatatagagaaatggcaaagaagtaaaacaatcaagttcaacacattcaatcaaataccaatacatcatatatctcatctcctctgcaacataagaaaaatggcagcttaccacgttcgctctaatagctttccctcgagccaacaccctaccatccctgaattcgatgccttgctatgcagattgaggtcttcagaagccacttcttcctcatcctcatatgtctcctccaacctaaatggacttcaagatctccatgattgtcttgataagttgctttccttgcctcttaatcaacaagcgctctccaaagaacagaatcagaaaaaggttgatgttgttttggatggatctcttagactcttggatctttgcaacacagccaaggatgccttgttgcaaatgaaggaatcaactcaagaacttcaatcagctatgcgaagaaaacatggcggtgaaatcagtctctcaagtgaggttaagaaattcttgagctgtagaaagatgatgaagaaggcactctccaaggccatggaaaacaaatccaaattcagtacttcatcagttaagaaggaacaagatactcctgaaatcgttagcatattgagagaggtcgagttgatcaccttcagcgtttttgaatcaatggtgtctttcgtctctgaatcaaagtcatcaaaatcaaacagctggtcattagtttccaaggtgatgaactccagaagagtagcttgtgagggagtcaaagaatgtaacgaattcacaagcgcaaatggtgccttggccaacctcatcagtaagaagacaaagaaaacagataacaaggttgaagagatcaatgcacaaaatgagctccaatcagtggagtcttgcatccaagatcttgaacaaggagttgagaacctttacagacgtttgatcaaaactagagtttctgtgctcaacatcctcaaccactagctagcgcagtttaaacacaatagtacttaggtagaaacttaggaatatgaaaattcatatagcagtagaaaagtctgggaaccatcttttcatatacacttgtacataaattagatacaaaatcaaatactcttttggcctatatatttttcagtcatcttattatttcttctaaacatactattactatacaattcctagcagaaacgccttatgataattagccgtaatctagttctaaattcaacgtgtttatgattttaatgtgaaaaataaaataaaataaaacaagaatgatctttaaaaatcaatttataagacatactttacatatggtatactttacaatttatgatttttttactgaaagattttgtcaaaaaataagaatttttattacaaaaatatagtttacatatgatacaggaaattctatctcaaaaccaattgacaatgaaagagtatttatgttatatatgacaatttattttcatatattaataatgtgggactaactctaataacatcacccaattcagttaaagtggaaaatatctcttacagatgatattgaagatctttcacttatattttgcataattataagtttccgatctctaggataattatagtattggctgtaaatttacttcccttgctaataataatactacacttaataaaatctctatgtaaatgaatgcatgagcagcgctccaacaataagagctgtatttactttaaaattatcatacaatgaaacataattaataatcaagataaatataatggcacttgtcttgaactattattaaaaaatgtgtcatacgtgactcgtatgctttgcatataacatatcaaaaagtagtattcattaaaaaagattctctaagatattatacatgttaatatataattaagagaatgagttggagaaatgggtgggcagggagcacggcacaaacatcgctacactgtatatatccaaatctcaatatcatgtgttgatttagaagatgcttcacgtcttcctcacctaatgattttaatataaatacatatagagtagatggcaaagaaagcatagaaaaatttgcaacaacttatcacattcaaaactttagctcaaaatctcttgagaaaagaaaaaaaatggctgccttaagatccaacttccatgtccgctcaaacagcttgccatctaaatcacaccctgttattgaagagtgcaataaccatttgctaatattaggggcttctcatgcaacttcatcatcatcttccattgctcaccaactcagtggtcttgaggatttgcacatttgtgttgagaagttgcttcagctacccctcacgcgacaagccttttcccaaggccgccaagagaaatgggttgacgaattagtggatggatcacttagactcttggacttgtgcagtgcagccaaagatgctgtcttgcacacaaaggaatgcgcgcgagatattcaatcaaccatgcgtagaaaagttagtcttgagagtgagattaagaaatactcagcctcaaggaaagtggtgaaaaaggcaatccaaaaggccttgaaaagtttgaaaggtgttgaatcaaaagacttagcctttaacgccaccaaaagtagtgaaatttctgctttggttagtgttatgagagaggtggaggctgtcactcttgccgcgctagagtctttgttgtcttttatttctggaccaaagacacagtctaagctcagtgggtggtctctagtttccaaactcgtgcaaagcaagagagttgctggcgatgaagatgttgtaaatgaattcgcaaaggtggacgctgcccttttaagtcaggagacaaacaaagctggccaagctatgctagagctgaaaaatctcgaaatgtgcgttcaagactttgaacaaat

SEQ ID NO: 221027 - DNA, 1527 bp, Cannabis indica
tgatggcccttcagtctggagtggttgttagttctttgttgtggggagaaatatgaagaaagaaaactgaaaccttgactaagtttatgtcaaaggcccaagttattattaacctcaaggatgcctatatataagcctttgaagtacctttggccccagccccttccacgactgcacccagctttacacctcacattctggctccaactttgactcttcctgagactcagttttttccaactattcacggacccagtgcctttggtattgcacctacacgaacccattttttagggtacaaggcagcatagaccgggtataatgtagctcctaaacacacacatagaggctctggaaccaaatgtgagcgatacttagaataaaagaggggtaaaggcaataactgtaatgattcttcaaagaagctaaggaaggagtatgaccctaaatacattgagtataccagtttgataggcatgcaagaaaatgtctacaaagtgacttgcaatatggtccactatagaaatcctctacggatgtcgcacggaggaaggaataggtgctactagaacaaggaacttgagtatcacagagaaaagggccagaccattaatgagtgtgattatctaaaaagatgagatcgagactttggtcaaagtagggcatctaggacagtgggtccaaattctaatcatttatcctagataggggtcgtccataggcatatgatcgttctgggatggcaagctggggtagcattactcacactaggacatagaaccccatacccacctaaactcgctctgcctccagtagacggacatgtggccctaatcttgggtggaccgtttatcacaaaaagtacaaggaacttgcagatgagatacataagagaagtagaataagcggaagtgtgggcattgcttagtttctagcacaatgccctaggatgatgaatcttcctatcaccttcaccgaggatgagctagaaatgtgcattccccccacaatgatccattagtatttgacgcgcagattgtcagtaaataagtttccagagtcctagtggacaatggaagctcaataaaaggacgattcaaatttgcattctaggatagggcttatagaagttgacttaactccttgtcccattcaactgcaaggtttcaaaggagacaccctaatgcttatgcggaaaatctagttacctatcaccctcaaaggagaaaacaatgttagtgcttttaagcactctacttttgtggtggtggatttctcaacatacaatgcaatactaggatgaccaagcctagtagactttgaggcaataacttccatcaaacatttatgcatgaaattcccctacgataatggatgtattggcatgattaaacgtgatctaaaaagtgcaaggaattcttacaatgtcttaacccgagctgtgttcatggtcttggaagaggcatccattgctcctaaaatggaggatcaaaagataactcaggccatctgggaggattttaaaga

SEQ ID NO: 221028 - DNA, 1465 bp, Cannabis indica
ggatagtgatatggcggtggagggtgttgtgatggggctcatacatgtaaggaagatagggtgtaggagtagattattgtgatggtagtggtcgtgaaattcgccactggcatagaaaagttgagtgcatgttggagttgcttcctgaaggttgaaaagaggaactagaaccatctctagacatttgaggatcatgcctcctagttgagtgcttctgaattaagtcatctatctcattgtttggtggcaaacgcttcttttgacttatatgttggaccaatttaattgtaactcactccaatcattgtatttcctctgaaaaatcttgagtaggcatcgtctgtgtttggtagtactgactatgactagttgttaattgactcttcacttagcgtcccactcctcggttgtaattgctcctctccccaagcatttgttaaagtatttgcatctgatcaattgaggaagaagtatgagaactaaagtcattactttgctattcaaattatgattcatatacttctttccaatctttcctatattgaaagaacaacacacataccacaaatgtcatctattaagtataaacaacaaaaactaaaatatagctcaaagtataaaaagtattttaaattaaataaaaaatctatattatgaaagatgagactaaaaatttaaaaatataaaattcttttagattttttctgataaaagaatattgagtatagatagtgaaataaaaataaaaaaagagagagatgagtgagaattattattatttattcctcttttcttatttcttatttataaattcaattctctatgaggtccttgtttcaatttttaatggagaactaactatatgtctattcattcattcttgagaataaaaataaaattaaataacttacttaatcttcttgagatttttggttgacaaaagttttgttgcattatttatgtgaacttccctcaatatctcaatatattctagtttttctaataaatataagagaatgttagaaaatttttaatttagtatactttattaaatttatatatatatatatagataacttaactaatttgaatctcctttcaccaatgatttttgcccttgtgttattgtgtacttctttttctttcagttctccatatattttttcaaacgaacaatatacgcaggagacgtaaataagtcatagatttttctccaatgttctatgttggcttatttttgggggtgatagacaactaattcaaagtcttctgattcttaataatgctctttgaaatggtgtatctttttgtcttatgatctctatatctcgtcttcatctccgaatcaacaatcgccataattttgtcaaaaattggaattccatctagctgataataatactgtatcaaaagaaaaattaataactaatttattataatgacatatttgtaaatgatttgcaaa

SEQ ID NO: 221029 - DNA, 1909 bp, Cannabis indica
caagcaagataatgggtcggacctataatagcgagaatccagaagaaaaacacttggagcatccgaagaagtatccaacacatgtccggggtccaactccaaatcatattcattaattatcaactcccacgaaatcatgatttaactcccaagatctcgccagtggatcatatcttccccatatggaaagatagtaagtgagtaacaagaatttaatatgtctttattattcatgattataggacacgaaatggacaactagcaacatgatgtggcatccacattagcctaccatcaacacctcatggattgggctccaccttatgggccctagtcaatatgttatctttatttaccccatcagtgggcaaagtgtaaaacaaagaagaaccctatcactataaatataagaacaccaacccatgcaaagggttgaaatctcattcctcaattgctcaggcgaattctagggttcaaacactttcaaattactgtgcactcatttcctaatcaaagggtttactgaaaaagtgcgaatagtttaaattttcataaataaacttaaaacttaaatatataaatacattacatgatttgggatcttgtttacaaagttacaacaatttttcaaaacatataagttacaaaatttgtcgcctagcgactgccaaaataaagcctaactgcccctaagatcgaacactccaggtctaccacctggatatgtacaatcttcatctagcccaggctcactattgttcagcctttgctttgcctttatctacacatatgacaatatatgtgagtcgacagactgaataagaaaaacataaacataaaccagattgttaccaggcacccatacacccaatcacaaccctatcccgcgtccaacacgtactagtcctagaacgttcgtacgacagtgcgattaaccataatatcaacctatactcggtactctagtcatactgatgtgatagtgttaatatgtactttgccaaacatatatctgttggtattcaatgcatctctatgtacactaatattgctcttactgatatgttatctactaggtaatcataaaacaagcatgttaaacatgtaaacatatgcaaccattatactagtcttgcctcaattctgaattcaggtgtgctggtcaacctgagtggaaactgctgctcgacgatttaaaggcccctaagtcacaacatacataaactgataagtgatccgctaaatcacttttcagggacttaaacttaaaactaaaagttttcctatcaataaatagcgtggcagtgccctaaatatcaagaaatcacagaataatgagacttcggcaaaaacacccctaaaaatggcaggccatttttcctggtccctgcctgctaaaaacggtagaccgtttccggaaaaaggcctaccatttttaactacagatttcataaatcctcatttctcacacaacctatcccaaatcacctacaaagctccataacatcaatttaaactatatccaacataatctaacagaaaaaaccatcatcaaaccactgaacacaaattaccattaaaggttcaagcttgaacttgaaaacttaactcaagcttaaacactattacacccaacaaagcattctcaaaacaacttaattaaccttaaaatatcaacaaaaaacattcctagacaacttcaactcacacaaaggtaaaaccctaagattaagcatgaaaacctaccctttttaattgaaaattcaaaaagaaaaggaaggaagaaggttagcttgggttactactagaaatccttgccaaaatccctcgatctaggtctgaaaaggaggagaaaaatatagtttttccttgggcttttgtcttggccaaacagagagagagagagaga

SEQ ID NO: 221030 - DNA, 2763 bp, Cannabis indica
agtaagcactaggaacttccagtaaatgttgaaggagttagaccgagaaggggagacgtgtgttgtagtggagtcaccagcgtaacatcctcgaccaatgaatctacctatcactttcatagaggaaaatgcctgacatgtatactttcctagtaacaacatgttggtcattaaagcccaaatagcaaataagtgagtttctatggtcttggtagttaatggaagctctgtgttgttcgagtttgcctttcaggtaattgggctcaccaaggtggacttgtcaccttgtcccatccagttggaaggctttagtggggacgctctgatgcaaaaggggaatatccaagtacatgtcattcttaagggtggaacaatgtttgcgcctttaaacattgtaattttgttgtggtagattgtcccacagcatataacgcaatactaagatgcctagtcttattagattttggagaagtaacttcaaaacgacatttatgtatgaagttcccatgcgacattggatgccttagggttgtcagaggtgaccgaaaaagtgcaaggagttgttacaatgtctctttcagatagtattcatggtctaggaagagacacctactactccctgaattgaaattcaagcataagctgaaactgtctggaggacattaaagatgagcttgacttcccttttggaaagacaagaatgattgaccaaatgaaggacatggaagaggttaggatatgtgataaagaccccacagaggccattaaagtgggaagaaacctgcctccaacaatgaaggaaagcatcataagtattgttaaggggaattgggatctattgcatggagccattctgatatgacagggattaattacaataccatttaccatgccttgaacattaacaaagatgtgacaccagtttgccaaaagtgaaggccattagatccagtgagagggaaagcagtgaaaacagaagtagataagctgactacaaatgacttcctctaagaaacggtttatcttatttggttaacaaatccagtttcggtcagaaagccaaatggcacatggagaatgtgcatcgacttcacagaccttaacaaggtctattcaaaggactacttccctatcccgcagatagattagatagtggacgcaatgtccaggtaccagttgcttagctttatggatgcttacttcaggtacaataagataaaaatgcacatagcctctgaagaacataccaccttccagacggaaaaatgtttgtattgctacaaagtaatttcatttggtctaaataatatcatagcaatgtctcaacgactagtcaacagaatattcaataacaaattggggaggaatatggaggtctacatcgacgatatgctggtaaaatctaagacatctggagaacacaataaataccttaaagtagccttttcgattcattgaaggtacgagatgaaactgaatcccaaaaaatgtacatttggtgtcttctccaagaattttctaggtgtcatcattagctcttgggggattaaagcaaacctagagaaggtcaaagccttcactgatatgccatgtccctaaaagcacaaggatgtgtagagttttactggaaaaatcacaacctttagtaagtaaatcttaaaatcaatagacaaatgtatcccgttcttttacgtgctaaaaaaagatgtttgaattgactaaagagtgcgaagaggccttctagaaatcataagattcatttgaccaaagctcttatttttccaatgccagtggaaggggagaatttgtatatttacttggcagtatctgtttacaccataaatgctgccctagtgctagaagaagaaaaggtccagctacctgtgtactatgtcaacaaaagattactggatgcagaatccaggtatccctagattgaaagattgatatttttcttacaattcagctcttaaaaggtcagaccctactttcaagcccatgtcactaaggtattcacgaactatcctttcagccaagtgcttaagaagttagacggatttggtaggctattaaaatgggcaatggaacttagccattttgacatctagtattagccacacatgtgaatcaaaggtcaagcattagctgacttcgtgatggaattttcggggttgggtgacctcctggacaagtcagtctcggagtcacctactttgaaagtctatgttaacaaatcattctgaaaagggagccagagcatgaatcatttgatgctccgcaaggacatcttctccaaagtgctctctagtttgaattactgcctctaacactgaagctgaacacaaagacatgctagcaggactacaatttgctaaagaagttagagccctacatgttgaagtacatagtgactctcagttagtagtgaaacagatatctggggaatatctaactaaaggcgaaaggatggctacctacgtgatgatgtcctaggagttgttgcaagggttcaatggctacaacatctgtcaagtcccttaggaccataatttgttcgcatatatgctcgctaaacttgctacaaactcggagatcattcaatacggagatggtgcctgttgcccaccttgaaacttcaagcattaaagtacaggggtaaattccatcactaatcattccaacttctggatatggtccatctacaagttcttatgttttggagaacttctactggacaaagctgcttcctggaaggtccagtac

SEQ ID NO: 221031 - DNA, 2711 bp, Cannabis indica
ataaaattctaaaaattattttaattgatcttgatttaaaattaataaaatattaattttcaacataagtataattttttcttttaattagatgtctcaaaaattatctaatatttaagtatcttgaatttaaaagaaaaaattacttagttatttattagtatttttatatgaactctcacttttattttcgttgtcaatgttattagttttttagtatgtaatgttttaatatttcatatgaaatttctttagtatattattatgttcttttatgtttagctctattaatatttaatataaaattattttataaaaaataatttaaaatctaattaatagttttattaaaaatttatatttttttagtgaggacaaatttatcactaatagtgttatcagtgacgacaaatgaccttataaaaaaaaaaaaaataaacattatcagttatgacaatgtcgttactaatgtttatttttcagtcactaatggtcatcatcaatgacgaaaaagacattcgtctgtgacgaaatctctcctcattgatatctattttttttgtacgtagtgacaattgattaaattaattaataaattaataattataaaaaacggaattttaaataataataataataataataataataataataataataataataataataataataataactataactgcaagcttccaaaacaagtaaatgatttgaaacaatcatttttcaagagaaaagcttgagtggaatattagtttaccctacaactaaatatcaaaatgacaacgttttttaatctattcaatattgctaaaatacaactaagaaaaaaataataattaaaatataaaatttggagagcatgaatgttttgattaagaccataaattatatttttggtcaaaaaatttctgaacactttctttttccaacacataatcaaaacttttgggctctattagttttgctactttctctaatattttttcattcacatcatctctcatcattgttcattttcatccttaatttgctctctttctctcttatggacttattctttactttctctttctctctcaacttaaacgaactttctcttatatgctctctctctcaaatgaataaatttttaatttatttttatcaattattgataaaaataataaattttttaaattttaaataacacatgtgagtattaatattgcaatgacacattagtcccattaacattttgttagtcaacataaaacttagcataaatctagattttaattgtgtataatttgagagaaatatttaacaaatcataagaatttaaaagttggaagataacaatcttaaatatatatgttttttgttttcaaaatgaaagtttacacacataaatcttcttgtttctattaaaaaaaacactcacaatttatatatccatgaattattaaataaagttcattagtgaaagaggtcaaatgcataaaagaaataactttacactacacgttgataataaagtgagaaaaaaggatccaaatagacaaagataatgttgttattgccttcactttgctatcttttttgctttgattagtaattaataattagtaagagatccacaattgatttggttccttcctaattatttctcatttctaattcaaaactttaagaaagaagaaaaagtaaaacaaaaaagtttaaagaagatgatataatggtttgcctttgtaccttcttataaaaatattatatattttactattcttttctcatattttcccgcgtaatgaaaaaaaaaaatgtgtgctatatataaatattatgatataaaaatatccaattcaaaaaaatattattactatttggtgatgctttcggtgaattattagttagaaatttgcatgtggtttgcagaagtagaccataccataccataccaccagttagtcacttagtgtgactgttgagcagctaataagctggctaaggctaagccatccaactaagttcaccagaaatataattagactttttataaaaatactaaattttgggtaattttttttaattttactgcaacacgatagaaattacatttgtattgtccttctctttttttttttttttcttttatattgtaaaaccaaagtaaaaaaaaaagagatctccatctttcacatcaacaaataaaaccattacagtaacatcaaaacagtcagaaaacaacaattaattccggcgagattgaacataaacattaaatcgacgtcaaataaataatcatgataaacaataccaaaataaatcaaagaaaaaaggaaaaactgattaaaaaaactaacaatcttctgcacagttttaacaccagatgcaatagtggctatatttgcaagttcagtcctaaaaaatcagaataaaaaactactaaaacaacacaacaacaaatgtaaaataatgaagcagatataaccacttagaaaaacgtaaaagaaccacacacctagattacactctgtacccactttttattttttatttttatttttacctttattttattacactttaatttatacccagttttataggtcatatccccattatgtgcattaaaattctaattttaataagttatgtaaggttatatttgatactttgattataaaagagagtatttatcaattaaaattattttagag

SEQ ID NO: 221032 - DNA, 4158 bp, Cannabis indica
agtgggggtttactcttactttggaaagctgatgtaaatgtaacagttcttaattatggtataaactttattgattgatacattgtgtttcctgatggtcctcattttcatttctttggtttctatggggcaccaataacttctcaaaggccactcacttggcaaattttaaaaagactaaaagatattgctccattgatgccatggcttgtcatgggcgactttaatgaaatcttatctcaatctgataagcttggagttcctctgcataatgatggtcaaattaatggattttgaaacacaattgattattgtggattacatgagctgtcttatactagtccgagattcacttggcacaataatcatgtcaatggaacgaatgtgaaggaaagacttaactatgccttagttaataatgcatggcctagcattttcgttgctactgaagtggaacatcttgtttttttttttaaaaaaatcagaccatcgtgctctactagtacctctcaagttgagtgctcaaagtcctgccaaaagacacaagttaagatttcattttgaaaacatttggttaaatgaagaagttgctttagacatcatcaacaataactggaacaattcttcatctgatccaatcatacaagttgtcaacaatctgtcttcctgctctcaacaacttcaatcttggcataaacataagtttggtgaactgcctagaaaaataaaagttgtagaagcacaagttgcagctttacataactctaatgataccactttccaacactttgaacacatccaaaactgtgagaacatcattgatgaactcttggcaagaggaggattattggaaacaaaggtcacgaatgaattggcttaaatcaggcgactctaacatcagattctttcatcagaaagcaaccagcagaaagaagaataacacgattaccaagttaatcgatgaccaaggtgtcaagcacacaacccaaccaggaattgctaatgtagttcaaagttattttcaagaaatttataccactgatggtatggatactgaagctatgcagtatattatgccgaaaattccttgtacaatctcaactgaaaataacaatgcactcacacggccatacactacagcaaaggtatttgaaactctctcaaccatgaatgcagacggaagtctgggaattgatggcatgaatgtgcgcttttacttgaattattgggatattgttggagatttagtcactacatcagttcttaaagtgctaaatgaaggtgcagatccctcaatcttcaataacaccttaattacactcattccaaaaattaaaaagccaaccaacatgtcacaactgagaccaataagcctttgcaatgttctctataagttggtgtccaaatcaattgttttgagattgaagtctcatgtcatatccgaatcacaaagtgcttttttatcttcaaggctaataactgacaatgtgcttatggcatttgaattaatacaatctcttaaacatttaaagagaggtaaagaaggatttgccgcaatgaagcttaacatgagtaaagcattcgatagagtcgaatggcatttcatccaaggactgatgtatgctatgggatttcatcaatctgtagtagagcttattctccgatgtttacccagtgtgtcttactccttccttgtcaatggttcagttcatggacttttggttcctactcgtggcttaagacaaggtgatcccttgtcaccatatttgttcattatatgtgcagaagcactctcgagactatttcagtatgaagaaatgaatgggatgcttactggtctacgtgtttcacgaggagcaccaacaatttctcattcattttttgtggacgatagcttggtactttgtcgagaaaattcacggtctactgaagcaataaaacgttcactaaacctttattgtcgtgcttcaggacagaagttaaatgctgaaaaatcagtactctcttgctctccaaacactacaatgcaaaatcaaaccaatgtccaacagattttgcaaatgccactcggactgccttcatattctggtaaggataaaaaaattcactttgctcaaatcaagaacaaattatgaaaatttctttcttcttggcaagagcaattattttctattaaaggaaaagaggtactcctcaaagcggtggcacaatctatcccaacatatgcaatgagttgctttcgactctcaaaatctctcatcaatcaaattgagactatgatgaacaaattttggtggggctctaattcatctggaatcggaatcaactggaagacttggaaagctttatgccaatcaaaagttgaaggtggaattgatttcaaaagttttgtccatttcaatcaagcattactcgctaaacaagcatggtagatttttttaaaaccaaattcactccttagccgtgtactaaagcaaagatacttcaagaatatcctttttggatgcagacacatgcatatacccatcactcacttggagaggaatcatatgggggaaagaacttttgttaaaaggtttaagatggaaagttgggaatggtggaaatatcaaatgtgcaaccgattcatggctacctagacttacatatctgaaaccactgctgttcaatggccatgacagagaaatgcgagtgtcaaatctcataacagatacaagacaatgggatattcctctactcaaatcactcttcatagattcgaatattgagaagatactaagcctaccactcactctgttttcccagcatgaccaacaagtttggcaccatgaatccaatggattatattcagttaaatcaagatacaaacttcttgtactcctcgaggaacaacaaccgaatactagaaacactgaagctataaccagatggaaaaagttttggtccctatccataccatccaaagttcgaatcttcttatggcgagcaattcatgattgtttaccaggttttagacacgttacacactcgacatatcagcgacactgctagatgttctctatgcaatggtgcaacggaaacaattattcatgctttgttcttgtgtaaaaggcctaagcaggtttggacagcctcaaatttctacatcagtacttttctctcaagtgatatgtcactcaaggagttgatactgcatgtgtccaaagtctgggatgactagaaaattgagcaatttgcttgtatcttgtggagtatttggacagaactaaacaaagaacgccatggcacaaaaccaaagctatatgagctgctactgtattcaactctctcatatgagttttattaagcccgtcactcacctgcctcgagcacttctcaatagcagactcaaaaccgcagtgtaaatcatactccatgatggttaaatccaccatcaggtcgactaaaactaaatattgatgcggcagtcgatgcatacaaataaacttctggatttggtgtcatacttcgaaatagtagtggcgaaacaattgctgccatgtctaaacctttcccaagttgctttaaaccagaagttatggaagcattggccttgatgtatggcttgcaatggcttaaagaactacgattaccaattcactacattgagtctgactcacttgtagttgtcaacggattgcaatcacatcaaaactctgtctctgatttccactgtttgttatcaaatttctcactgttagtgtccaatttccctggagtgcagatctctcatgtcaatagatctacaaatactgctgctcataggctagctaagtatgctcttttagtggatactgagcgtttatggttagaggaatttccacctccactaatgtctattgtatattataactattgttttaatataatagccgttattagaaaaaaaaaatcttgccagatttattagtatttttttggtatttttatgttaccgtggtcgctatatctgtcgacaaggaagaaggagacttcattctcctattttgtatttatagtataaaaaaaaataccaaaatagtataaaagttatttttatcgtgtagaagtatttttataaatattgtgccaaaatccaatatcttggtaaattttcctaaaaataaagggaaatttaca

SEQ ID NO: 221033 - DNA, 1561 bp, Cannabis indica
tttatttattttaatttaaaaataattagataaaaattttaaattaaatgaaaaaaattaaactacaaagttttatggtgtatcattgcgctggcaaaagtcaaacattcatctgttaaatgtgacttttgtcggcgagttatacgcttgcaaaagtaagacttttcccagtgcatatttgctctggtaaaagtaagacttttcctagtgcacatttgcgctagcaaaagttagacttttcccaacgcacatttgcgcttgcaaaagttattagacttttcccagcgcacattttctctaagcagtagttagacttttgccaccgcattaatgtcctgggaaaagttatttttgccagggctttccattttgcgccgacaaaagtttcaataccaacatggattttccaattctctttgccagcacaaaaatgtactcgcaaagtaaatgttgttttaccaatacaatatctaacttttgtcaacgcaaaaatacactgacaaaagtctcatttcttgtagtgaattattcatgcatgcatatgcatgcctatatatagctaatattaagcttattatattaaaaactgaatttggcttgcgaatttccacttggtattgattgcctcttccactccttctttcatggattcctctaatgaagaagactcacgcaatttctcgtactcacttatattcttctgcaactcatcaattctcttttttagaattgttggacgtctgtacacaacagcttattcatttgttgatagtagaaatctcctgtgaccttctttacacattcccacacaaaattcacctcaaagtcaccccaaaattctacaaagaatatgtagtgataccattgttgaaaaagatgtttagtgatgtctgtgaccaaagtagtatgcgtctcttataatttttttaagcatcagtttataactgacgctaatggttagcatcaatttacagtcaattctattagtaatttttctgacggttttggacagtcactcaattttaatactattggtcctcaaaaaattcaattttttaaccaactgaaaatctctcttttctagtagtggctttccaaaagtatttgggtaagaaattttgaagaaaaaattcttttaacatggaacccagtaaaagttaaacgttcttttaaatattgttagaataaaaaaaagtatgtactatatccaaacgtttagtttgaaatatatttttgaaaattaatttttacaaaataaaaaagattagtctaattagaattttagtttaccccagaatattgtcatgtactaatcatgtcacccgaacttttcaaggcattaaacaatttcctttcaaactattgagattgatagatttaagagcttctattcaattttttttcaattttactaatgacaactgtccatgtacaaaatcgtgccatatgaagtttgatatgtgttacaaaaattatgatcactacgcaagtatacgcaatcaagtagtaaactcacacaggtaagcttgaaccacagggaattggattaactaccactaaa

SEQ ID NO: 221034 - DNA, 3526 bp, Cannabis indica
tagcacacaatattatgatttgttaggatctgatacgacactatggaaggaaaagttcaaaactcggatgtatgatcaaattagaccttcaaaaaccttatgatactcttgactgggattatttggaagagattctccaagcttttcagtttcctgagaagtttatcaaactaataatggtctgtgtgcatactcctcgatactcacttattttcaatggatctttacatggttactttgaaggaagaagaggtctaaggcagggtgatccaatgtctcctctgctatttgttctaggtatggagtacctttcaagaatactatagaagataggatctaagccagagtttaaatttcatgatagatgtgctgagttgaaactgtaccatctgatgtttgttgatgatgtcattatgttttgtcatggagatttcaagagtatatactatgtcttacaaggcctaaagttattttcttgttcctctggactccaaccgaatcgtcataaatctgcaatttattgttgcggtatgagtgagcatgaggttcaacgtatcattgacagttcaggatttagcaaaaaagaggtacctttcaaatacttaggtatccctatttgtgctaaaagaatttcagggaaagaatgtgttgtactagcagataagatgacagccaggatcaaaagatggagttcaaggaacttatcacttgttggaagggctgtacttgttcaatccgtactcatgtccattcactcatattggagtcaaatcatggtgttacctaagaagactattagagacattgaagctatatgtcgtgcctacttgtggaaaggccaccatgtgtctgtgggggttgctcctatagttgggattttgtctgtcaaccaaagaaagctggaggaataggtctgaaaaagattgctgaatggaatattgcagcgatgacaaatgggcaattgcgaataaggaagataacttgtggattaggtggatctattgtgtttatatgaaaggggtggattggtggagttatcaagctcctcctcaggctagttggtattggaagaaactagtggctgtcaaaaatcaagtcaaagaagtaatggatattcagcaagctgcagctattccttatcgaatttctaatggttacaaagctctttgtccctcacagattaaagtgaattagaaccatgaggaatggaatagactaaatgttcctagacatagttacagtttgtggcttgctatacaggatagacttgaaactagagaagactgcatagattgagtattattggggaagattcatgccttttgtgtagtaatcagattgaatcatctaaacatttattctttctatgttctttctctcatacttgcttaactaaaattaaggaatggctgaactagagagtggaaacaataaacttgaacaggttgattaggtggatcgaaagagcaaaaatcagctctttttgaaaagctatcataacagctgctgtagtttaccagatatggcaggtccgaaatagtgttttgtggaattctgagactatactagtcgagcaggtagtgaggaagactaaggaggatgtgaagaatagaacattgtgctgctggccaagcaaagccaaacaaatagacagggcatggttttcaaaattgtaaacctggaagtgtctctggtttgtttgttgttacttgcatctggttatttgttggataaaaagattcttttgttgattgtttgctgagtgttgtgctgaaaagtactggctgatgccaaaagttgattgtaaagaatagtttctatagttgtaatataacagcaggtataggaatatggaggaaaatagaagaaacaatctgtatagattaaaatgcaggcctcggctggaggtgctgttagcttgtaatgtatttgttggtaatgaatttcctgattgatcaaaaaaaaaaacgtgagaataatgctgctgactcgtgtgagagtggagaatgccgataaattctgaatacatgggagtgtgacaagctttggacgtggctattggagtcatggataagtgctccgaatattgtgctaagactttagtttggatcttttgaattgtgattaaatttgaacggaactcatctcacaagctgaagtatttaattgggctccgaaaagagtggacccaagagtccatggcttgattggaatgtctcttgctgaaattgattattgaagaccacgttaatggatatgcttgtgtatagttcgaaattatggatgtagttgggctttttaactttcaattgggcttgataccaaattatcactttaccactttgctcaaatttaaaaattaacaccaattaaaataaattaaatatttctaactaaaataaatttattagtaaaactatgaaatattcgatttgtattaattgtatgtgcataattaaaggcctaaaatataccaatttgagtcttaatcacatctcttaatgaatccatgaaaaacaagcaactagggtaagatagataaaagtgataaaataaaataaaaaattctcatagaagtaacatatttggtctaattttttgcaagcaaaatacaaaaagatgtttctcataaaaaaaatacgaagagatgtaaaaggaatttcgtcaatctcttttaacattttaacttgcatgtcttgtatttaaatttcaaaagcatgtcttgtatcctatttggtattaaataattttaccttgtaaagttgtaataactaataataaaacattaatgaataacttatgtacttgacaattatataagaattaagaacaaagtaatggaaatgtgtaaactttataattttctattacatcattgttttgggtaataaaactattgttgagtgtttgtgcaaaaaaaaacgattaagcttaatcgaatcgggtcagacctgattaagcttatgaggcaatcggggcagggcagggcgaggaaatgccttgttgagtcggggagggttactggcgggttgggccagacccaacctgtttaccatgtaagaatttattggggtcacaattgtatatataaaatgtgtgttgagtcatcaaataaataagtcaaatttatgtggtctatttcagaataaagtttatgacttaagggcatgattgttatgattttaatatgtggataccataaggacaatttctatattgatgaggggccaaatagaaatagtcaataaatattaccaacaggtttgtctgttggtaatataacgggtaatggtccccatttccatcgtatcttttcactcttgtatccccatcaccaagagcaaaattttacaaaaaaatgttttgatgcaaattggaagatcatactcatttaaaggtcgattttatggactctggtacgcttccgctattccttaatcctattctcatgaattaattagggctatatacagatttacagtatttttaacatgtggtatcagagcagcctacattttgaataggg

SEQ ID NO: 221035 - DNA, 1180 bp, Cannabis indica
aaattttttttatcgtgcatatatataatgtggatttctcttagtcttggaaaataattaactttttcacattcggacaattcttatagatgaaatatatatcctatgatttatatatatacctacctatatctgaggacattttatatagtatagctaggtgatgatgatgatgagattattagaataattataaactagctagctctaggcggtagctgcaaatatatattgatccaattatgagagcaagaaaactaagatgaggagaatctataagctatatattaatttgtcatttagtgttaacacttttaagcatgtatatatacaaatattccttgatcgaaagaaaaaaaatcactataatttatttttcaccgtatatagttctgtggatacggattaggatttttaatactgcatgacattagtatgagctcgagaagtacgatcataatttccatacaaaaaaaatatgtgattaaatacgatatggtacgacataaaataatattgacttagacagacgaaaaaaaataaatttaggtacgacacgacaaattcaaaaatataaataaattaactcgaaaatacaaaacataaaaatgtctaataatttgatattaatactaataataataataataataataataataataaatatatatttaccaattaaaatatagtaatatatattcaacttattcttattttaattattttttatatgattgtgtgtaactattattgaaaaaatatataaaagtacctaaaactataaaatacatatattttagggtttagattatcaattgtaataaaaatataaagtacgaattagagcctgtataaaaaataagttggtctttttaagaaaaattggccagctcgaataaagcactacacgaatctaagcatagtacaaaaatactggactcccatataagagtaatttgcggtataaatatagttgttattgcatctggtgttgaggctgtgcaggttttagtgttgttttacaactgttttgtcatgattatttattaacgtcgattttaatattttttctcaatctcaccagaattaatggttgttttctggctgttctggtattcctatggtagttatgtccgtgggtgtagaagatggaggtttcgttttttatatatatata

SEQ ID NO: 221036 - DNA, 2447 bp, Cannabis indica
gaaatgcttaagaatgacttgaaggttatatgggacaactttctttgctgtgaacgctttccaaaaagtatcacagaaatttccaaataatgttgtacatttcagagaagctggccttggacgcttttctcaactataaataccttaattggtttttcattgttagtattttgaagagctttatttattgttgtgccttgtgcattttttgtctttaggaagacagcactcactagttcattcttagttctattttgaccctatctttagtatagggagcctttatacggtggcagatgttcattgctccttgttttttgtttgaataatttgtttgctaagagaacctagtttattgttccttctaagttgttgttgctaggttctttctttttattgtgaacacttacatgtctatattttttaattttagtttttaacattatcttattatttggtttttgaaaaaataaatattatcttctggtgtattatttacacgtaataggaataattaagtgcatgtttggtatcataattaaaaaactgttttttgtttttaaaagtagaaaattattttttgaaaacaatttggcttgtttggtcttaattttttaaaacagttttcaagaaacaaaattacaaaatattgttttctgttttaaaaaccaattcactttaggtcaatattatttttaaaaaatactaactaaacgtgacttgttgtaaaaatttcaaaaactatttgttgttctcatttctaaaaaataatattttgaaaacaaaaacaaaaaaagaaaaccaaacatgctctaagaatcagattcactcttcatcggaattataaaagttgtttttacttatgagaactagaattaaaataagcggtaattctattaatgtgaacacattactttagaattaaaataaattattttctatgacaaaaatacaatctatatctatatacttatataatcctattgttaatcaaggtgatgtggcattatggatgagcttctaatcctattcctaattttcttaatttttcaaattttctatcatttaaatagtttaaaatgtttttttttttccaaaaagtgttgcactaatagttatttttcagttttgatttataaatgtgtggggttacttatattaaagaaaaatttataaatgtgtggagttactctctttagctttgtcttctcatttcttcattaattcatagatgctactaaatataacatataaataataataatctatatattaatatataacattttgattgtaatgctatagttacaagaaatggtaataataattaaaaataattatttgtattgtcatcaaatatagtaattgcttaattgagtaactcacgtcctttgataatctaaattaatacattaaggttttaataatttttttcaaaacttttaatcttcccatcatagaatcatcatatataattaataaaatagaatcaaaatttacaaaaataagagtatatgtacatattaaagaaagggaatttctacatggtcaaacaatagtatatatgtgtaatttgtgtatatctatattccttttttaaaaaaatgttcttcaatattataacattattaggacattcttatctccacgaggggttggaaattaaatatacaaatcaaaattttgtaaaatttttatctcaacagcaccaaaccaaatgtgtattataggaactcaaaaattaactattatttttgggatccatgcatgactccatgttttatgtatatgtatcttataaaagtgaagtaaaacatattagtttctggagatatataaactgtatgatataataaatcatgtgatttatcagttaatatatatttacacacaaaatatttaagctcatatttagttatttttactcgaatttctattcgatgaaattttattgaatatgcattgcagaaaggatctttaagacattaaagaagatcaaatgtcaataaattctataagaattccaggcttttttttaaggagcgagacaaaactttaagcaagttcttgccaagtatattattatggctgagcaatacttatacaattttccatttttgattatatcttacaataattttatggcgattattagaaaataattttgatcattttttttttgtgtatacctctgttgacttcgcttttagccaacgacaatgagtctttttgataagcgataaacgatatgtcgtaataagaatatgtagtaaagcaataataagacacataaattttatagaggttcagccccgagcagttcggtaatagcctaatcctcgttagttgtattgacttaagaataaggaagaagattccttttcttatagctcttacaataatatctctgaatatataattcttagatagccttagcttatagcgtt

SEQ ID NO: 221037 - DNA, 1503 bp, Cannabis indica
tcttataaattgttttcaaaagagggactcataactctagatatctcttgcatgttttatctcaggttaacaagccctatcttccgttggcctcgggagaatattcagttcaaactggtgtcatgattgttgcatcctttgctatcctggtatgggaagcatctttacaaacgaatttctcatttgtgtatttggagcctattatattacattctaatctagccatcactttgtttttcagagtttcggtcttggatggatcgttgggtcatggccattattttgggccctcttcatcagttttatattaggaactgcatattcaatcgacgtgagtttatttagtctctcatatgaatttccatacataatcaaatagatttttcaaaacgttaagatgaaaactttacagactgtttcttatgtcctagctttgacacctttcatgttaggtgccccttttgagatggaagagatttgctttagttgcagcaatgtgcatccttgctgttcgagcagtcattgttcaactagctttctttcttcatatgcaggttatcatttatctattcctcttgtcttacagttaaacttttgataaataaatcaacatatctaaaaatgtaaatgattaatgaacatatagcatagaaacagaaagtgaaaagaagaatgctttacagatttcaatggtttttcttttagtaccgaaatatgtaaatatgcattgatttttcagacccatgtcttcaaaagaccagcttccttctcaaggcctctcatctttgcaactgcatttatgagcttcttctcagttgttatagcattatttaaggtatatcaacttctttctctttattgaactttttagttttgcttttggtcaagcacatgccacatgcaacttggtcagaaataaattagcttaattttatatgttggtgaaaaatgtataggatatacctgatattgatggagacaggatatttggtattcgatcatttacagtacgcttgggtcaaaagcgggttagtcttaaatattcaatctattttgttcttgcttttcgaaaacgttactaaattaacgacattgtgcaggtgttttggatatgcatttcgctacttgaaatcgcttatacagttgcacttttagtgggagcatcatccggcttcctgtggagcaaagttgttacggtaatgtttgagtgttgctaattctgtaggaactattgctctttattcttattggatataatgatacaaatagtactatgaatatgaatgctaacttagtatgagcggtgaatagaatatccacttaacaatgctaacggtgtggtgtgttgatggttaaatttttactacagttgcggtgcgatgcagtttagcaaaacaaatgttaaaaaaaccgcaatatccgcactgcaccacatgtatataatattaatattgtacttattattatagattaacaaaaattgtttaatgtaaaaaagataca

SEQ ID NO: 221038 - DNA, 4748 bp, Cannabis indica
aaaaatctcataaaataattttttgaaagtgctttaaaaactataaaagtgaaaattctgtaattttttttttatatatgttaggctattccaaggacaatagtgcttgatcctagtggaaaacaattgctacaatggcctattgaagaagttgaaactttgagaggaaaggaaattgaaattaaaaatgcaaaattgaagaaaggagatattattaaagtgaaaggaatcacacctgctcaggtaaaattaataatatataatatattgttgttgtgtacgtacttaattatttttaaaatattgagattattattaatttgattatatataggcggatgtggatgtgaccttttcatttgcaagcttggataaagctgaaaaattagatagaaaaggatgggacactgctgaagccctttgtggtaaaaagggttctgatattagtggtggtgttggaccatttggactattgactttagcttcagaaaagctagaagagttcactcctgtcttctttagaatattcaaaactactcaaaataaacacaaagtgctcttgtgctccgatgcaagaaggtacgtactaattatagaataataaaagaattaatgatgatgatgatatgtatatgacatccacaccaaatatgcacacaaaaattacaagtatcccagatttttatttaagatgatattctttattttcaaatataatatcatatcattattgtctatgtaatatttttgtgcatatattctattattttatatttattacccaatataaaaaatagctacttttagtgataatttagtcacaacataaatttttaatcataacaaaaaattaattatttgtgattaaaacatagtatttgatataagttatcactaatttagttttagccaaaacaagtaatgtgattaaaaacacattagtcacaacaaattgtaatttttgttactaatattttttgccacagattttttagtcacactataagaatgatgatttataattattgttaatttttttatttttagtcacaagttttattgtaggtaagagtaagattttttttttttgtagtgatatttaatttgtagttatgatatatatcttacatgtattttatatttttgtgtgacaattaatattccttttttaaatttgtttaatttggcataatgcagttcttcgttgggtaagggtctgtacaagccatcatttgcaggttttgtggatgtagatttaactgataacaagctttcacttagaagtttggtaagttaattaattttaattatttcaatatatattctcatcttatatatattattaattatgacactttaaaattattattattattattattattattgtagattgatcattctgtggtggaaagctttggtgctggaggaaagacttgcatcacttctagggtttatccaaccatggcagtttttaatcaagctcagttgtacctctttaacaatggcagtgagactgttactgtggaaagtctcaaagcatggagcatgaagaaacctctgttgatgaacaataactgagagagagtactgaatattgttcttattataactttagggttatttcacttttagggttcatcatatatataatttgcaataaaaattaaaaagaaaagaaaaaacaaaccaatgagctagctttcactaaatggtttgttttctctctattaattagtactgccctgtttaatttatttttatgtttatctgtgatctttttcatatcaatatataaaatagtttttgtatattagtattgaacattaatattagtttactagtatatttgtattgctctaagtacataaacataaataaaaataacaataaataataaattatatcaaaaggtatgacgaggttaattactaacaaaactaagtgtatataatgtacatattatagtgatcatttattgggttgggtagctaattaattaacaatatagctaattaaaaaataattatggatgatgcatgtccactaactattaagtaaatttatacaagtactaattctgtaccttataaaaattaaaacagaactaatatataaattctgaaaggtagatgctctatattccttttggctttaatttattaattattactagtagtagtactaaggtgagaaagtacgtagcacgtgtaaaacataaacctgaaaaggtaagtactttgtttaattacaatacctgactgacaccaatacatgtagttttttatttttgtttttactttttttaaggaaacaaaattcatataaaacaaagattacaaaggcaggtctggtcagccatgatagcaaaaccagcagctagcacaagtgtaatcctcattccactcagctatagcttccaaagctattctaaacaaacaatgggcagctaaattggctggacttttataaaagtattcttattagattgtagtgtgtttaattagtattatttatatgtgaaaattttgtaaatagctaatcatattctattttagttgttaaggtaaattatttgagactcgatacttaataacgtaaaccgccgtccaatagtgatatcacacttctaggtaatattaagcactattaatacttttagtatttctctaaaattaaatgagcttgggccagtccaaaacagccgtctcaaatgaacaaaaaaatgttttgttgttatatcagtccctgataaaccactcataacagttctaagttgttaattttttaactttgtactgggctccttatgtagataaaggatgtctattattaattaattctaagaacagaatatagacagagagagagaactgtgagatttttttatggtgaggttttattgtaacttggagcaagagggttaaagtcttaaagatgaagagaaaagaacgaaattgagaaaccagtgggaagcaggggtcatcaagggggtttcctaggtgttgtagcttcatttgaatattggtaaagggaaagattaacattgtaacaagttcaagctatcttgaaccaagctttgtaatctaccattatcatagtgaaaggagttcaaggggaataaattctctataaaatgtagaggaaagttcgaagacctctaaattgcttgtgttatctattgttttctatttccaatttttttttctgcatttccagtttttgtttatgtggtgtataaattgaatggttaactgcaaactctttctcttcgttttgcttagctaaaatagtatcacgtagtgcatatcccttcctcactctttcagtaacttagacaaatctcaaagaccacatgctagttgtaaaggtcttacacctcgttcttccttaattgactttaactaatgagtaaaaacaaaataagaaagagcttaaacaatatagaccagattggggcacatcattttggatagtaaataaaagattaaaaaaaaagtattatccttaaacaatatacattccactatccagctacaaattgccaaaatcccaaggtgggatttattgacaccctcaataagaaatacccagtcccccagatccctctccaggctccatccatatattcttctgctacatcttacaaaaacaatagcacaagcaaaaataatcaatagtgtatacactaattatacagatacagcattacaatgcagtgaaatgagcttttaaatcaataaaaaatctcaattgatttgtgtaagaggagagcgtggtatgagggacggtttcaactcttttccatcaaacgattcatatgcattgttttctctaaattcctcaacaagagagtccattggcatggctctgagtgactctattgtccctttggttgggatgtcctgctcagtccttattggggtgtttccagtaggctcataatcctgcacattaataaaattaacacaaaccaagttcacatcatcaaaatcacagcttttgttaaagcggctcatcaggttatagagccaccatgacttaccatatactggttgatgaaggtttcccgagccttctcctctatggttgtagcatgaccagagtgatccacccggaatgtttctaaggtacttgaatgtgctttgacagtttcctggattccagatatcgactccctttcttgttcggacacacctgcagcaagtttcaatgggatagtttgcataagaagaacagtaaaattattaagttaaacttaaaaaacttggaacttgtcagaatgttgttaagtttgggactgaagagtgtgactatgggatattgactaatgagcgagaactaattcagaactaaaaacttactatcgacacaatgaagcagatccttgttattctttgctacgtcttgctcagccacttcccttgcagaattgatctcagcatcatgttgttcattaccctcagaagcattccttcaccaacaaattttcaaatgataagttgaagtcacatattatggaatgtttataaaactatgtccagaacttacaccaagagcaacccttcctcttgaatcaatatcagaattaagtgcaaaaagcaaaaaaagccgctaacaaaatgtattaaatgaaagaaagagcaactaaagcaaaactggcagccacctgataaatgtcgtaaacggctgacacatgctttgctcccatctcattcacagactcttgagtcatctccattgcttgc

SEQ ID NO: 221039 - DNA, 4258 bp, Cannabis indica
aatctcaatgtgcttaattcgctcgtggaatacaagatttgagataatatgaagtgcaacttgattttcacaccacaattttgctggaattgaagtcttaaacccaactttagtcaaaaactgataaatccacactatctcacacatagcctgtgccatagctatatattctaatcagattgccgctaacaaagacataatagcctgcagtaaatcttctttccaccttggagcttgcccaatttgcatccgagaaatactcaatttgggtgtgtctatgatccttgtaaacaacatctcgtcctgatgctcctttcaagtaacacaaaacttgctataatgttgttcaatgatgaattgttggtgatgacataaacttactaacaatactaactaagagtgcaatatgtggacgagtcacagttagattattcaatttttccaccaatctgcaatatttgtcaggatcttcaaatagttccccatcacgtgtaagatgcatagttggattcattggagtactacacggtttggctcccaattttccactctcagttaataaatcaagtaaatacttcctttaagatagaaaagtaccttgtttactccgagtgatttcaactttcaagaaatacttgagcacccataaatccttcataggaatgaacgatttaagagatgagatgcctctaatatcattttcagtaataacgatgtcatctacatacacaaccaacaaaatgataccaccagttgatcttttatagaacaaagaatgatcttacttatttttcaacaaaccaaatctctcaacaacttgactaaatttaccaatccaagcacgaggactttctttcaaaccatataaagacctgcgaagacgacaaactcaccctaactcccttgagccacaaattcaggaggtttgctccatatacacttcttcctcagatctccatgaagaaaagtatttttaatatcaagttgatgcagatgccaatgatgagtagctgccatggaaatgaacagttgaacagatgttcgtttagcaacatgagaaaaagtatcacagtagtccactctataggtttgagcataatctttggcaacaagacggaccttgaaacgagcaattgttccatctagattgactttaaccgttaaggcccttttgtgccctatggcccgttctcttgaatgtaaattaaccaagtctcaagtaccattcacaattaaaccattcatctcttctatcgttgcagcaacccaaccaggataagacatgacttcatgaacatttttaagaatagtgatagaatcaagagaagttataaaagagcaagaagaagagggcaaatgattataagaaacaaaagaagagacaagatatgtacattgtttaccattacgtagtgcaatgggaagatcatcattggattttggatctgatgacgaataagtaggtgcaggacatgaaacaggaggtggaagcctagagtacactataacagaagatggaggaggtgggggatgtgtaggcattgcaggagctatgactgaggcaggtgaaggaacaagagactcgtcagaacatgtgtcgagcaccgaggatgtgatagaatatatcagtaaatcatcatcctctcctctacaagtaggagtaggtgaggatgaaaaataaggtgtatgttctacaaaaataacatttatagaaacaaaatatttgttaagattaagacaatagcacttatacctttttgaagcgagaataaccaagaaagacacttattaagaaacactaccaaatatctgaggagcaactagaaacaatgacttattaagaaaaaagaatttaagtggaatctcaccattaagtatagagggtgaatgatgattgataagaaagtatgttgtgaaaactgtattggcccagaaaggtttaggaacttgtattagaaacaagagggcacatacagtttcaagaaaatgtctgtttttacgtcctgttacaccgttgtggggtgcagtatcaacgcacgagatttcatgaagcattccattagaggtcatataaaattgaaattgagtagatgtgtattccttgacattatcacttcgcatagtacgaacggacacataaaattaattctgaatcttaatgcaaaaaatataaaatatagaaaataacttagaacaatttttcaataaatataaccaagttacacgaaaataatcatccacaaaagtaacaaaatattatatccaaatttagacaaaataggaaaaggacaccagacatcattatgaactaactcaaaaggagcactagcacgtttattgacttgaagacttaaactaacacgactaacaatctaacgaagagaccttatcatattggggacaaagtttcttgagcaaaggaagggataaatgacccaaatgacaatgagcctcaaaagcggaagcgacactcggacaagtaatcagggttaagggtagtggatcaagaacatagatccgtcagattcatgtcctttagcaataatattcttcatcataagattctgagataaacaatgactgcgaaagaaagagatgcaacaattcaaattacgagtgaattaactaatagaaagcaaattaaaggataaattaagtaaatataagaatgatgacaaaataagcacatgtgtaggagtaatagtaccagattcaagaacagaagaagttgatacatcagctaaggtaacagaagacgtgggattataagattcaagagtggaaaagagattggaattacttgtcaaatgatatatagtaccagaatcaataatccatgttggaaagaaggcatgaattaaatttacctgaatcaacaattgtagtgacaaaaatgagatgaagacttgagtggtttctgttaccttgagaacttggcaaattcatctgcagaaatgatgtccgatttgtcagatgcatcactagtgctagcaacattagcatagtgtttttgctgatttttaaagtgtagcttattacacttgaacttggtatgacttggtttcttacaatagttgcacatagtgttcctggattccagtgttcgattgtcaggcccttgtgaattgctttctttgtaaccacttggagtagagttttttcatggtgcatgattattatgactagccaaagcactattaacagaaatagatggagtagtttctatgctaagaatgggactaaaggcaacctgtaaaaaggatacatcagattcagaaagaacttgtgactttgcagagtcaaattaagatgagagtcctgctaggaagctcatgataatcatctgctcttgctggtgctgctaaatcttcacattaggactaagtggcaacaacacattaaactcttcatatgtcctcttaaatgccataaaatagttcataaatgactaatcttgtttcttcgcaagataaaaggctttgcaaacataatgcatacgacatagattgtctttttcagaatacaaaaactccaagtaattagttagttttttaacaaattcacattaattaatcaaactaattacctcattatcaatataattttgaatttgaagaaacaagcgttcatcttcacgtaaccacacatttcttgaattgtctttttctttgggaggatcatcagtcaagtgtttatctctgtcaatactcattagataaagttgaattgtcttactccattttaaataattcgatccaataaatttatggtccgtgattttggacatcacgagaaccacatcagaaacaatcgttggttttggattcgatatcgtctctaacataacctcaaacaaatatcggaagagacaaaacataaatgaacaacgatgaacagataaagaacaccaaaatacgaagaagggagaaataccaaactacaatttgagatagatgcgagtaggcttaagaggagccgaaaaatgaatcggagaagatttgcccttgatatctccattgcacgtgcctccacgtgccatcgtgtggggtaggtggcagtgacaacaggcggtacgtgagccacaggtgcgaggaattttgcgaacggacttcaagttttggcagattagtagctgggcaatctttataagtgggcgatgagaacaaatgattactctaaacacccaggaggttgctccatatatacttcttcctcaagatctccatgaagaaaagtatttttaatatcaagttgatgc

SEQ ID NO: 221040 - DNA, 2008 bp, Cannabis indica
ttttttaattaaaattatgagtttgaccaatatactttgatatgttacaatttcaaataaataaacaaatagttactaacaaatttacaaaaaaatgtaaatttatttttttctaaaataatcagtcttcttatttgttgtccgcactttagagaaggtcacgtattactacctttgtcctaagagaatggttaagaatctactaattaagtatagttggtaataattatcttgaatgagaagctacttacgttctcctaccacgacttgcaggcagcgaatggggacactgccctcgaggcccgatccgaataactattcaagtctcgcaaaaatttcgctgttcgggtaagagttcaaatttcactattagtggcagagccacaaggaatcatggtgggggtacatgatccagctcaagttttaaaagattacatttttatatagaaattttaaaataattttaatatcctacttatataaaaaaaatttggctgccctaaactatatcgctggctccgccagtgcctattacaacccctcataggaagaattatatgttttgacctttttgagagattagcttgttgtgacagtgtcatttttaatgggatgataaccctcgagatgcatactgatgacctaattatgggagatgaggtataaaactcttataattggtacgtggttctcaaaattatttaagctactaaaaaattagggaagaaatttgcaccgggtcatattttcttaaataaaaaaaaacacatgaaaattccctcccacacataaactagagcgttcatgctgagctcatgctttgttcagtgataagagttatagttttttttctttcttttttttaaaaactcaaattatatagtatctatcttgaaaaattcttaactttgaaatctccacataattagtctgcatggatactattttgaatatacactaccttttagattacgtgtttactttcctccatgacataacacaattcaatcatatacccaccattaagggagaaaattcatatatataacacaaatcaaacccgtgattggtctagatatatatattgagtctactcactatactactattacatgcatataaagaaattatgtatagctttattaaaagtccaaaagtaaagataagtccaaaattaaccattcaataatgatctagtatataaaaaaaaaaatagagaagaaggggtttgttcagttgttgtaatccttattatgagctttgtccctttagaaatgatatattaatttaacacacctactagtactagattaattagatatatataatatgcttcaaaatgacaacattaaattgatttgtagtcatgacatgttgagcttaattcatgtaaataatattggttcataaatcatacttcaatttcaaaaatctttgtatatatataataaattaagatgagcatttagtcaatgttgacactacattttaactaaattagctatcattgttacttgagaggtggataatttttctataaagctcatgattaatataataaaaaactacaaaaatactcacatgacatgttaacagccaatggggaaaccatatcattggctcatgttacgagccaacttaagtgtcatatgctccatggacccatttttgtttgtttttggtattaattacatacactctagctcaaaataatttctatctcttagtgtaatttaaatagtcttttttcatcaaattttggtttttttttttttaaaaaaaaattattttgtttattgactaaaatattacttgtcttaattctattctagttaattaatataagaattttaccacggctttcatagagccaaagtcacgactcacgagcactttaagagttcatttggtacgttgtattacattatattacatcgtattgtataatattatattgaattgtattgtatgtaatatttttatgtaaaactatatgtggtattaactt

SEQ ID NO: 221041 - DNA, 2361 bp, Cannabis indica
atatgcccctttgagtttgcatttttgccaaataaaaaagacgacgctttattcataatagacaacattatcaatggcttctttgccattgacatctttcttactttcttcgtagcctatttggatagccacacatatcttctaattgacaatccaaagaagattgcaattaggtaagtatatattaccagaaaagatcatttctcgtcggttaacttctttaataaaccgacgcaataggttaatatgtctatttataacaaacgaaaaaaaaaaagtctttttttgatagtggtaaactaaactctagttcatcatgacaagattttttttcatctaattcaggtacctatgtacttggttcattttcgacgtgtgctctactgccccgtttcaatccattagccttcttttctcaaatcatcatggtagtgaactttgttttaaactccttaacatgctcaggctctggcgcctcagacgagtcaactctctctttgcaaggtttcattttgttctatttcattccatttcatcatcgatcatatgatcatataaatatttattatctttttccttttttcagacttgagaaggatatccgattcaactatttctggactcgttgtacaaaacttatttcagtatgcacctgcctaaacaaaacatattattatactatgttatgattatcactccattttctatttttttgagctttttaggtgacccttttcgcagtacacttggccggatgtattaactatttgatagcgaatagataccctaattcaagccaaacatggatcggagttgtgaacctgaatttcaaaagagatagtctttggaacagatatgtagcttcgatttactggtccatcacaacactaaccaccacaggttatggagatttgcatgctgaaaatccaagggaaatgcttttttatatcctatacatgattttcaatttgggattaacatcttatctcattgggaacatgacaaacttggttgttcactcaacgagtcgcaccaaaaattttgtgagtatatacgttgttatttgtcatcttaagatatttaatactctataaactatgttagaaagttttaattattatgaaaatactatttataaaattatagacaactctatttttcactaattgtgtggtgttgagcaccaagattactacttatataagaatttcaacaatgcataattttaagttgtcaacaatttttaatattacttattacattaaaatatatatagctatatttatttgtacaagtaacaacataacattttgtagtatatgatacatttgagcatctccaataaagtgttaaaagtttaatgatgatataaaattgtctaaatttagtacatgttaaaagttgtattaaatttagcatagaatatagtacgatagctaaattttatatcacaataaatattacttttttatttactcttttgtaatatattaatataattaataattttttacatttatttataaattaataaggttttttactcttaatgcattcgagtacaacctaaaatttgagataaatataacgttgacttattttttaagctgaatttaactcaaattatacaccatcaattaaagatggtgttatgttctattaggccggcgtagtttctctgtaataataatactcccaataagattaacacgcattattatgttattagatatcgtaattacttttaaataatactcatactaataacgatatgatattttatgtagtactggcgaccatacttttaaattagtacttgtgtttatgcagagaaatacgatgaaagcaacttcagaatttgctcggcgaaaccagttgcctcgcgcagttcatgatcaaatgttgtcacacttatgtgtaaggttcaaaacagaaagattgaagcaacaagaaaccttaaacagtctaccaattgcaatacgttcaagtattgcataccatttattcttacccactcttcacaaaacatatctcttccaaggagtttctcaagattttctattccaattggtaacaaattaaccctacatacatgactttaattggcatatatagtattttttatcccaaatcatttcttttaactttttcttcttattacattccaaaattatttgatttcacttaattagtctaagacaggctagacccgtgtcttggactctgaaattttgattaaattttagtaaaaaattgttgattaaatttttactttcagtaggtacatagttaaattgtaatttttttttgttagttatgggggatttttcaccaatttttatattttatttcttaaaaaaa

SEQ ID NO: 221042 - DNA, 1566 bp, Cannabis indica
tttatttaaggcataaaaccaaccattttagttaattgatggcaaaaaaaaaagatatatttcaactaaccctaatattaggccagacaatatgtcataacatttttgaaacttcgtgaaaacatatataaaattttattttattaatttctaatagaaatgtacattatatattgtgataatatttagccactcatttaggttgtcggcttatttaaattttaactatcataaaggataacggagtcttttttataacaaatttgattttcaaatccaataagttaaaaatttggtctcataaatttggttgctttctttgttcctcatgttctataataaacattagctatttccttttagtctaaataaatcatattgtcaaactttttacaaggccaccaaaagtacttactgaataacttctgccataataaaataaaataaaaaaatcatatattgattgtgaaacaagttgttgataataaagcttcaacattttcattaagacaggatttcactttgaatttcttaaaaaattacccaattaaagtgataattatcatatcaatcagttatttaattatacttttttaggagaattatcgaaaaaatttgttttatctttcatttataattttacaacctaataaaatttttatttacaaaaataaattttaaaatttttaaaattatataaatgcactttttgctgaaaaagtaaaaaaataattaaaaaaacaacttaaaatcaatctcacaataattataaacaaattataaaacaataaaaaataactagaaaaataattttattataactataatataattataaataaactaaaaaacgatttattattttactaagggctcgtttggtgctgtataagggtcgtattgtattaaatcataaataatattatgtttagataaaataatatattgtattaattattacgaccaaaatatttaaaacaatgtatgttgtattatttaatacataacaaatagtccgtattagtttgtattataatatttacaaaggattcggggtcaacaccaatctccaatccggacctgggacccagaccccaatcccgacccggaccacaaacctggatccgaatccaaactcgaacctagacctggacccggacccgaacccagatcctgacccggactcgagatcgggacccgaattaaataatactaatacaatacaatacaatacattaatacaagttaatatcaaacatagtattatattaaataatactaatacaatacaatacaatacggcgtcccaaatgagcctaaaaaagtatttttgtaatttattttttaaaagttttggtctatattaagagttagtcccacattattaatgtgtggaaataaattgtgatatataagatgaaagggctactcctcccattgttaatttgttttgtgatggaacctcattcatcttattcctcaaattctaacatggtatcaaagccacttgtgatccgttgtgagcccaaattgccactggtcgaaaagccgtttgtgatccgttgt

SEQ ID NO: 221043 - DNA, 1832 bp, Cannabis indica
gatttggtgggtttatccattttttttagtatgtttgcaagtgtacaaagttttgagatccgaggaaacccatttcgggttctttgttctctctaaatttttgttgaagaaattattgttgaaagtatggcttggatttgtcttaggacaatgttctctatcattgttgtatgcatatcgtgtgatagagatgctcaaagaaaaaatggttgtacaaactcattttggttccttattttcgaatttattgttgtatttttctgggcaaaaatggagaaaattattattgaggtcgacagaaaataggatgaggaacaaaacccctaaaacgtcgaccaaaatggtggccggaggcgtgtttttcactcgagtcacgatccaggtcctacggatccgagacctgacccgcgcgcctagtttctgggcgaagaagacgggtcgtacgacccaaaggacagaaaaagacgtggtttaaaggcctgaactctttcgccgtttcaaacccgaacgatacacgacatgtcgttttcatgcccagctatttaaaaaaaaaaaaagagggaaaagaaacaggcgcattggggcgcgtgtacaactgtttttggacattttttttacaattttgctcaatttcaattcacccacttaattgtgtgattttattttgtgattggtgaatttcaatgattaattaacatataattatatatttaaagtaaactaaattattttataataagtattctcacaattttattttgcatattttattgattgaagacgtagttatattcatgcaactaaattattttatgttattggcattttgtgaaaatataattatgctatcaaataattaattgagtgcttatattttcacttatcgtggatctaagtatgtcaattttattaatcataaaattgtgagaattgtaatattttattgttaattaatttaatctcatacaaggccaattttatttatttattattccataattatattatatatatgtatgccttttgtaattttgtgagttttattattgtaaattctttttcggcatacactatgaataacgtgtcataaaatattaactatggttagcgcatatactatggaattttgaaaatgtgcaattggctttatttgataattatgagattaaaattatttattgaatgtgttatacttacctgtcgtaagttttcacatgtcaatcatcaaaaattgtggttcctgttgatatttaattttcccgtattaatcacaattaatactaagatccataaatgcaattagtcatcctgtcaatgattttaattgttagttaggatgcttagatgatgaaggaaacacattagatatcatgaaccacacaatcttttctacccaatcggtagtggattagctgaatttggttatgatatttgaagttgttgtccttacttgtgtaagagtcatatgttttgtttaaacgactttagcatgacatgatcgtttctgttgagagatcattgagaaagctaagaaaacgagcagattgcataatctttgttttcacataatggcactactctaagatattttcctttagctttaagcaatcctaaaacctaaaccgcctagttaccaattgggactatagtatgttttgttgtatcgatctctcattagaaaattggactaggcctcaaattgataaatcttgaaatcacatttgaatttaaagatgccaagttattgtatgctcagtgggagtattgcgacgggtgttagttagttttagtgaggtatatatgtgtcgatcgatccttattgataaattttt

SEQ ID NO: 221044 - DNA, 3301 bp, Cannabis indica
cttgatcgagcaacgatgttgcttttttgctgaccaagagatcaagttttctcctaaaaacatgagatagccacatgttgatcttctatcatctatgcagctggcccaatctgcatctgtatacccttgtagttgaagagtgtcactttgtttaagccatagcccatctgataaagttccctttagataccgaagcaacctcttgcaggcctcccaatgtttgacagtgggggcatggagaaattggctaagtttattgattatataagcaacatctggtcttgtcaaattgaggtattgtaaagcaccaatggtactcctatacagtgtgacatcttcaaacagatcactgtcatttaagctgagtttggatgaggaactggtaggatttgaacacgttttagcaccctccatgtgaacccgtgtaagcaaatctgtaatgtatttgctttgactaagatacatacctttgtcattcctgtaaacctccactcccaaaaaatagtgaatagggcctaaatcttttaaagagaactctgtgtttagaccagtgataaaatggttgatgagagatgagttgggtcccgtgattagaatatcgtccacatacacaaggatgtaaaccagattgtttccagctccatgaataaacaaagaacaatcagatttagatccttggaaaccccaacgaagcaaagtttggttcaacttatcattccaagctctcggagcctgctttaacccgtacaaagctttgtgaagtagacaaacgtgatctggtctagaggcatcaacaaatccaggaggttgttgcatgtacacaacctcatttaaattgccattgagaaaggcattactcacgtccaattgcttcacgggccagttattgttgacagcaagtgaaagaacaagtcgaacagtgaccggtttaacaactggactgaatgtgtctgcgtaatcgatgcctggagtttgaagataaccacgagcaacaagtcgtgatttacacttgtccaaacttccatcagagttaagcttcacatgttgaacccatttatttgtaatgacctgcatatctgttgtatagggaaccaaagtccatgttttttggtgagtgagagcatgaatctctgagttcatagcagccagccatttaggattactaagagcctctttgagattttttggttctgtgggaataagggattcagggagagggtgtttagtagcaaggtaggattttggtttggtaatgccactttgggatctagttttcatggaatggcttctagtagggtgagatgatacatttggctcaggtgcaaggctttgggttaatgatggttgagcttcactggtttgagataaaccagtaggttgagatggtgcatttggctcaggtgcaagtgtttggcttaaggattggtgatcttcacgggtttgagataaaccagcaggtaaaattggtgcatttggctcagctgcaggtgtttgggaattatgctgggtggtattggggggttggtgtaaattctgaggagggttatttgaggcagtgggtagtgaagactcagttgcagcaggtgtagtggatattgcaggaccagaagcaacaaaagttgggtcagtatgcagagatacagagataggagagaatgtattagaagtagaagaaggtgagatgtttgattgtacctgagtcatagtagaggagccttttgcaggatagagatgctcattaaaaataacatttcgagcaatgtacaatcggccttcagggctttcacagagatatcctttatgatgtgaggaatagcccaagaagaggcattgttgagatcgatactccattttgtatctgttgtaaggcctcaaatggggaaaacaagcacatccaaaggaccttaagatgttgtaatcaggttttgtatgaaagagagtctcatatggtgagagatactgtaagactcttgttggtaatctattgatggtaaaaacagcagaactaaaggcataccaccaataagacaaatccaaaccagattgtgctaggagagttaggccagtttcagtaatatgcctatgttttctttctgccttgccattttgctcatgagtctttggacaaggatgttgaaagtgaataccttgatcctctagaaacctcttaaatggtctgtactcccctccccaatctgcttggacagatttaatgggaagattaaattgtttttccactaaacttttccattttagaaacacttcaagggcttgagatttgacagtaagtggaaagatccaagtgtaacgactgtaatcatcaagaaagtgtacatagtatttatatccctgcttagaatcaacatgggaggggccccataggtctgtgtgtatcaaggcaagaggttgactggttttagttgcagatgagggaaagggcagggtatgacttttaccaagttgacaagcactgcagaaattcaaatctttaattgagccagtgtgaggaagatgaggcaaaagtttgattaaagtgtttatttattgattgaggagaaagtacaatttgttccaggattattatacttggaacatgtttgattacagacacattcagagtcaacaaactgactagacacaagattgtattggagagtagttgaagaggatgaagaggaggcatctgccaactggtataacccatctttaagcttccctcggagcagtacctgtccagtgtctttgtccttaacaaagcaccagtttttatggaattcaagaaacacattgtagtcctcagttagtttagaaacactgattaaattctttttaatggagggtatttgcaagacagaatttagctttaatggacaattaatggatgaaggtaaagaggtagatccaatgtgtgagatacgaattttcttaccatcagcaacagcaagagcttcggatccagcataaacatttgacgattcaagagtctctaggttgttggtgatatgatttgttgccccagtatcaacaaaccatgatagatcatcaccaaagtcaggaagaacagtggtgttatgagaatcagtagggagtttcatattcagtcaagtaagcacgaggagtaaagacaccaggtttgggggagacaaaatttttgtcgaatctatagtgacacacagctgcggtgtgtccagatttcatgcagacttgacaaatgagcttggagttgacatatgaaccacgattgaagcctcgtccttgagttctggcataaccatcagttgttgagccacgtccaggattc

SEQ ID NO: 221045 - DNA, 4333 bp, Cannabis indica
agctgatcaaacaaatcattgatcttagggagagggtacttgtccttaattgccaacttgtttagttcctggtaatcaatacacttgcgaaacaatcaatctttcttctaaacgaacaacacaggatccccccagggtgacacactgggttagcaaaaccctaagttaagcatcccttgttgttgtatctttaattccttgagtttagcgggagggattctatatgttgccttagaaattggctctactccaggtgctaagtcaatcacataatctattttttggtgcggtggtatggatgttattccaaaagcacatataaaaattcttgtaccactttaatatcttaaggttaaattgacttcggtcgtgtggtatctaacaccactgctagaaactctatgcatccctcctgcaataagtctcaagccttcaacaccgagattattggaatttgagaaacctaaagtgatcctacaaatataaatcgttcttcaccctcaggttgaaaggtcaccatcttccaattacaatcaatgctagcaacatacttggatgagaaatccattccaagtataatatcgaagtcttctaagcatacctactagatcaacactcaacttcctgctcttaaccctaattggcatagacctaatccaccttttaaagataagtaattctctgctaggcagtagggttcaaaccctgcttcataactatcacatggcctacccaacttatcaattactctatctgccacataagaatgcgtggcttcaaaatcaagcaatatagagtaaaaaagagttattgactgaaagctaatctatcactactgaaggacttgcttcaacatcagcttgggtaagggcaaacaccctagttggagcggtctttgcctctgtctttcactcttctttcttaaattacaagaaatctcttttgtaatgaccagttacaccacacttaaaacatgtgtgacccttacactcacccaagtcatgcttcttacaactagggcattctgggtaagtggaacgactctctaaatcaccctgacgaatgccttggctttggttccctcaaaaccttttgttttgactcaagccaccagatgtaaatagaacttttctcagaggttaagtcactaccaccccaaccaaaaccagaggtaggaggagcagtgaccccaccagaaatttgagtccctcgggacttctgaatatattctactgtgtccttagcttgcagtgccttctctaccataagatcatcggtagtcgcatcataagtggtaatcatcaattcatgtattattttgggattcaaccccgccagatacttttccttattacgaaaatctgttggcactattattaaggctaacctagccaacctatcaaactgagtcatgtattctgtaattgacatattctccccttggataactgggtgaactctttcctctttgtactacataataccttattatagtacttaacattaaaaaagtcctagaactcttcctaggtaattctggtaacatccctagtaagggacaccatctcccaccaaactagggcatcttcctggagttgaaaggtgtaggaaactctatcattgttagtaatacccatgaagttaaatattttgttcatgactattagccatcactcgactttcataatatccgaatgtcctaaaaaaactggaggttcctgcttatgaaacctttcatatatcagttccatacaattaccaacaacaacctaatcctcttgcaatacatgagcaggagctaccaatactttaggagcaggcatcgcatgagcaccctattgccttaaacatcagatttcatcatcttattcatttgttctgtcttgcatttttgcaaatctctgttctcactattgggcagcctgtggtgggttaacattacctcaacaacaaaatatacctctttggcctctacctcgaccacaaacattaggggtattctgtccttcctgatcgccatttgatctgactaatttgccttggcttctcatgtttcacccggcgtccattccattggactaccctacaaaatcataagttagcctggtcagactatgatcaaggttaaaatataattaccactttcttgggaatttaaaacatgcacctattcaactatttgactactaacatgctttctaacaagcttttcttatgtcatactaataaatcaaactactagagcataaaatggcttactgaactgtgaatcgagcttatctctaatgatgattgtacatatcgtgatgatctttgaaagacaacttggcagctctgatagcatattgtaacaccctactagattaggcacgttatcgtgctttctaattactgtgcacttcatttcaaatcaaggggtttgttgaaaaatgtgaataattaaaactttcataaatacattagtacaatacatattacaggatcccgttcactcccctagctggacaggggtgcagcagtaggtggctggctggccaaagactagccaatgaggactgttgttgagcctaagatccttggccagcccctaggctgttgggtgctgggatctggctgttcttgccattagacctttgtggcaaggcgtgtcctcctttgggtaggagaaggtctgtcttggttcttgaagaacttagttggacaacttgtcgatagaccctccctgatctgttgactagtcttccttggagtggatctttgatgagatcttggcctcttccggtagttctttgattgaactaccttattaggtcactgtcttttctgttgtggcgatccagctttgcttggtgagatcaaaggatgtactcttgatcatccatccatctctggaatttgcgtctttattgtacgaatacatcgcaattagtagcgcatggttcttcaatttggcttgcttggcagacggtctctctaagtctaacaaacttgagatcttctcccaagtccacatggggctcgccaattcctagtctcgtgtctctagcatagtactgaggacaaattttggttgttgttcctgggggctgttcctcaagggtctttcctttagtgggaggcgtcatggagggtattccctttgagagaaaggccaatttttatatccaccgcagtgtttgtgtgactctggccagctgtagtagcaaagatcgaggtgcctaccgagatggtaggattgaccacgtcacatctgtagtgttcatgggaattccagtcatggttgggacatggacatcaggatctacagttataagatcttgagggagaactgatgatgtagatggtgcaacaggtattctcctcgtgttaaccatggcatttgatcagatatgatattaactttggttgttaaggctcaattcctagtctagcttgctatccacgtgtaatgttgtacaccaaagtcctactaggccaagttctggacggccatgcaccgataggttgtaggctggtcgaccttgtgctatctagaagctggccagccagcctcctcgagttggcttgtttgtcattcgtcatctcgtttaagtattgggactccctgttagttgaactgctgagtaaatgacttgaccttctatttggtgagctatatttctatgtggcgctgatattggcgatgtagatatgccacgtcaggttggcaaaaatcaggattatatatacacactattatatataagcttttctattgtttacatttatttgtatttttgaattttgaattgtaatttctttcttcttctttttctttatttatattttatgttttgggattgtaatttttatttaatcttataattttatcgcataactagtgttgtagttggttttgttattttattcatattgtttttattcttctatttaatatctcatatatttctaacaacatataagtgagtgcaatttattaaaaagatacttattaagtaaagtttcagctgaaaaagcaacaatcatgttggattattggtttggccatttgacccataactaagaggatgagttaataatatcataggaccactctacatagctaaacgccgatatataccacatgagttgtgtatattattagtgctacctatttaatgtgtttttaagaataatatttatttacataatagccaaggctttatctaaacaaatagtgctatctctctcaaaaattagactagatagggcatggtataggtagggccggccctgaaacaaagtgggccataggggaaaaaaaatttttggacccttatattagaaaaaatgt

SEQ ID NO: 221046 - DNA, 1805 bp, Cannabis indica
tgacgcaattcaacttgtatttttaagctaatttaattctctatcaattcatgtctcacactctagacataattctaaagatatcgtcataaaatttcactccaagggagttacaaaaataagcttcgagttacccacaatggcaccagccaggctccgaaaaattgccatcaccacaaagaactaattttcaccgttagatcatcatcaacagtaaaatatcttttttatttttctcctatttttgtaggcctccttcacatataaaggagagcttcataagctcatttttcaagttctaaaaattactcacaaggttagagcttctctctctagtttctctgtctagaaattggagcttttgacttttagtcttattttgtaattaaatagacgtagctccattattgtcgtgatacagggagtaaactactataaatttattgtgactctcttataattacttaaccacttatttattctcgccaatctagtgagcgagtgtggtttagaaatctaacccaaatttcggagtcaacatatttcttttttggtatttaagttttattgtatagctttctagaagcatctctattttatgtaagttacaaaattaatgttgcggcccatagattggttcaatatgcccttatgatagacaatgaatttttatggatgaaagaaatctcttcactttatcttttggctttttttctaacctataataacagttaccattacaaaataaataaataaaattaaaaaaaaaaaaaacaagtatctttacaatttcaaaatgaaataaaaattaaataatcccaaacattaaaattaaaatccaatattttgctcgtgatagaaatgaaagtattaactctaagtaatgttgtatattcgaactaaaccttttgccacggtacaaaattgatagcaaaaaatatttgcttaaatgtagtatgacacaaagaaatatgaatttagccacgacatgaaaaatataaataagtatagtagacacgataattacaaatgcacaacaataacacacacatatataaccatgaaaacacgatatgaaaacacgatatgtaagcgtgaatataaaaacacaaattaaatatataaatattatttgtatatatttcaattcatatatttatataactgtaactatatttaaatatttcttttgtaagaaaatttcaattatttttaaataaatatatatttatatattgtcaactaatattataatatcaatttattcattgtttaaaagaatatttttttttatgaatcaagtgaatttcattactccaaaaaattttgtacaacactatagcattctccaacaagagagtctaaataatctctaatatttacaaggtttcaaactatattctatctctattggtcacttttttctgccaaatacaagagattcagcactttgtaatattctttacttgtgttgtgattacatcactttttacaactttgttttcccaaaagattgaatttcgggagcaccacaatgtatacaccaaaactgcaagtgcaacaaccattacacctcttcgaaacttgctgattttggcctttccaagccattttattactcctggcagcgaccttttgcacatgttccagttcagccacacctgaacttgattcaagcaagtctgcccgaaagagcagttaaaaaacaagtgttccatcgattcttcttccctactgcacaatagacaaattttatcaattttgggttggtatttggcaattctatcctttgtcttgagtcggtt

SEQ ID NO: 221047 - DNA, 4638 bp, Cannabis indica
agagagagagagagtttattaggcttgaaaagatcaagagctttgtgtctcaagtctcaactcctaaaaagagataggaataatttagttttattatggtgaaggagtgaagagaagcgggaaaagtggatccatacgaagcataaaacagctccatttgatttgggggaattaagtattaagtacaacaaaaggtttgcttagtaatatatgtacggtagttatatttagtacaacacccacctctattctactttctccttttctatctctctatctcttacaccaaatttatttatttgtaatttttttttttaattttctacagttcaaacactcactcccaagttttaccagaccaaaaatcagaaccaactctgcctttattatctctttctcattgggaattgaaacccaaagaaaataaataaaataaaaattgaattagctgacgatatagatggtcatccctggccccattacctcccacgtattaatagataataaatatactctgtttactgctaatctatttaagctcaatttacaatgtgatgattcccccctcatgccagccacgggacttgaatatattttttactcttattttacaaatacgagggagagtgttaataggggatctgcaatctaatccaactctttttgttaatttttaggattattatcatttacagatattataagactatatcctccatacactatagttttgcttgcttgagactactccctatttttattatcttgggcctagaggaggttactccgaccaaaacagaacaaaaggactaggcaatgatgggtccaaggactttggatgaaataattgataagttacaccgtcctttataatcatatatcatcatgccaagaaatttaaaatcccacactaatcgaaagttgcaaaatatatagtttatatatgtggtttctgttaatggaaaacatttacggtacaaattaagttgaaattataatcactaatgatgagtcccctcattagaacctataaatggtttctgacttcagagtggtataattcgttaattgtttgatgaattgagctggaaagcaatcaattcaaggtataggcaattatagaataggaaatgtagtgcaaattaatcagcaatactattatgtacatataacgagtttgtttatgtcaacaagttttttcccctttttaccatacaccctctagttttaattgggggactttattgaatttcaattgatgggtgggtggtcattgatgtaatgtgagtatcccaatgtaacttatatatatataaacataactatgtagatctaagaattaaaagaaggaaaaaaaatgaggcaaaatataaaatttgaaaagcatatagacattgtgatagaatattggtgagtggtgagtgtggtgagtggacccatgataagattattattattaataggaagcgcatcatgtgatggtacaatggcgagttgtatatatatgagcattaagcagcagtagacttgtaatctaacagaggacgttggaacaaaacgacgacgctgcatggggccccaaaaacttgtaataaaatccgagttgcactggcatttttaggcgcatacttgcagctccaatggtcctactgttataaataacttataacgacacttaattagggaccacacataccatacgatcccaacctatatgattcttctctacttctagttttaataccttaatatgattctattctttttttttttttttgaaatgacattatataatatatacttttcaagggtttaatttgttccctcagtgcatatcccaaaaaaatcattagcaatatgcgtttgtgtgtgtgagttatatgtatctgcttgtgagaaaaatgaaaaagttatgtgttttgaatggttacactcacatcatctattacgttttatatctcataattataaatttaagtgtaaattgctagatgtctaacaatgaaaaattgagaattactagcgacaataatgttatctctagatcctttttaggtattgtaataatttatcacaagagaaattaaagatttgaaaaattaattaagaaagaaatgtgtaaatatatattaaatagagaacattgtataaaaaaataaactgctaaatctcagttttaacattaaaacatatattaaaatctcagaaagagacgttgtaactaagtatgcttccaagccaattatatatatacaatatatatataatttttgaaatgacccaattatatattgaaggaaaatgagtacaccatcgatcaattttaacgtttggccagcacatggtgaaagtaaaatattgtatttttacgcattgctagtgggacaatacttatattttatatattaaatttaatttttcccccactaattaaacaaaacatatacccgttcaacgtcgacatttttgttttctttattagctaagatcccttttatattaaaaagtatactgatatatgtattaattattttaatgcaggaatattttaatatatataataaaagtaaatatatagtgtgaaatagtccaatttcaaattcagattatgttgggagattcacccaacacaatattcctgaccattaacaattttctctaaactccaaattgaatctttcagatagagtatagtgtctgtggtatgtatacgttgagagagaactatttgaaattcaaagtggtccttataattctcttcttcgcggggaccttataatattaataatacatgcatagaatcaatatcttataatatttgagaccataccatatgatataatatttatatcaaagggagaaaagcgagagagagagggaacaggtcataagagagctattattgaaaatgagaagaaatggaaataatagagatgtgatcatgtgagagaggtcccataagtttatgtgttatgtgtatagatatatatacataatagatattctttgtaaaaaggttctaaaaaaacatgatgattgaaagggaaaggcccatacaacaacaattaaaatagggtgagatctctgttccacgtggtgctgtgttgcccttgattgattcattttataataagtttacacaagaaaggacccaattcaaaaggcgcctgccttccctgccctatatatatggttgtatatgtaacgttgaatgctattacagtcaaaacttggctttcttatctacagtacaattattctaaatcataagctctttctcatgaccagtacaataatttttagtttcattcttcagtggtaaatcgtaattgtttagtgggaaatttacatggtatactaacttttgctatttttttacaaaaatactgtcagacggtatatttacttttttactgtatctttttataagtttcatcttgcagtatactgtgttaaattttcactggtgttctactggtgttttgagttggtctgtcttgtgttctattggtgttttataaaaatacagtatttttgtaaacttttccgtgtgacagtatttttgtaaaagttatcccaaattccagtatttttgtaagtttcccttgtttagtggtacctgctcggcccagaaaactaaaaacttaaggcccatttccatattttctacaacatttagactaaaaaaagggatatattgagaattactatttttttgttacaaagtaactaagtataactgtgaaataattttaattaataaatactttttttacaatcaaagtatcaaatataacttcagataatttattaaaattagaattcctaatgtatataataggaatatgatctataaaattaggtataaattaaaaaataataaaaaaacataaaaactaaaatagaaaataaaaagtaaatatacaatataatttttttttaaaaaaaaaagaaatttaggtagacatattttctttcgctcattatttacacaaataccatttattattttatttatatatatgtataccgaattcgaaaacaataatttatttatatcaaaatgtttcatcagcatcatatattaaaatataaggcaacttttattaatgaggaaaaagatgaagaaaaagtgaggaattcaggaaaagataattattttggaagctgaagtctagaccaaactcaacaactaccaacgaaattgatttaaaatagttaaaacaacttagaaatgatttcagaaacaaactgtaaccctaataattaggcacgctacagtaatttttagttacaatgtccaccttcgctaattaaaaatattttttgaaaatcgtgataaatttaaacttttaatttatttaaaacttttataacaataaccatatatatctgtacaaaaggtcgggattccgcttttaaacttgtttacataattaaaataaactttacaacttgtagcacaacgactaccaaataaaacctaagtcatcccgagatcgaactcttcagaacttaccatcttgacatgtacaatcattcctgagctcttgactcactgttgtttagccttagtctttcctttacctacacatgaaaacaatatctgtgaattgacagactcaataagaaaagcat

SEQ ID NO: 221048 - DNA, 3356 bp, Cannabis indica
tcttttcttaagtaacaatattaaaagaaaaagtttttttttactattttattttatgtgttacgttgttatttagttattttatcttggtaaaaatagaaattatttcgtgaactatcaatgttatgttaatagagagaaacttttcttttatagaaaaataattagttgattttatctactaggaatattataaattattcaaatagttacgcccgtttcttaaaaattttattttagaagaaatagaactaaaatttaagaggcagtactgcttagacgatcaagttagctaaatacaaacaatcaagaaggaggagcttcaacacctacaaggagtttaagaaggtgacgaactacgaggctaagctagtcatggtagaggacaaggctaacgacttgtactattatggaagaggcacccgtgtaagctgagctgagaggacgctcgtttttgcgagtagttggtgaaagagaatgtcaagcttagggaacgactccaatctcaggatgaaaagttgtgttgcaataagcggtaaagcacgaggaattcatcttaacaaccaacacactgctttgagccaccatatgaaagaatcgaaaaaaaaagaaccatcgacatttgaaggaggctttaacccattggaggagaaggaatgacctagaattgtagcacccatattagaccatattagatatatggaactcaataatagacaactggcgaatgacttgataaagctgaaaatgaaggatcatgatgctacactcgatttggattggatatccatcatcaattgctaaaagtattttgtcacttttggtaacaaaggccagagaccagtttactttcacaagagttaagatagccttatgaacttctttaatctcatacttctagccagctaaggaaggtatgatgtcaagcattgttgactaatgtagtgcaccaagcagtggagacacaactaacaatgaaaaacatgcacatagtctgtgaattctaaaagatctttctaaaagatctaccataaatacctttcagatagtgatgtagagttcataatcaagttagctccaagagtactgctgtaattgtgaaggctccatacaaaatggaaatttacgagctgtagaaactcaaagtatagctacaagagctcctagacaaagggatcgttagaccaagttgctcaccttggggtactctagtacgcttttttaagaagaaaaatggaagcatatggatgtgcatagactaccatgagctcaacaaggtgaccatcaagaataagtaccattttccaaggattgacgatctctttgatcaattgcaaggcttgggtgtgttctcaaaaatagatctacagctgaaggtttggaaggaagacatacccaagacaatattccgaacacgatatggacactatgagtttttgggtaatgtctttcggtctaacttatgtcccagaagccaccatggatatgatgaatagggtgttcaaggagtacctagataagtttgttgtcgtattcattgacgacattcttatctactccaaaactatggaggaacatgaggaacacctgaggatgactctaaaccaacttaaggagaacaaactataagaaatgtgaattctagttagagaaggtggaattcctaggcgatatagtttccatagatggagttgaggtggatcccacaaagatcgaagcagtcaagagttggccaacacctaagactgcaagtgaagtaagaagcttcttgggtctagctggttgctacggacgcttcgttgaaggattttccaagatcgcaactcctctaaccaacttaatacgaaagatgcagaagtttgtctggccagaaaagcgtgagggtagcttccaaacacttaaggaccaactaataacagcccctgtattatgtgttcccaataacaaggataagcttgtggtgtactgtgatgcatcaaaacaagggttgggatgcgtgctgatgtaaaatgacaaagtagtagtgtatgcctcaagacaacttaaggagtatgaacagaggtacccaacacacgatctggagttggcagcagtagtttttgcgctaaaaatatggaggcactatctctacggggagaaatgtgaaatttataccgaccacaagagcctgaagtacttctttacgcaaaaggaactcaacatgaggcagaggcgatggctagagcttgttaaggactatgattgtgaaatccactaccatccggggaaggccaacgtagtagcagacgcgctaagtagacgcagttatgccagcttggcaatactagcacaaatagaaatgccactacaacaagaactcaaaagaagtcgtatagagatcatactcaaaaactagctaacctaaccattgtctcaacactgctacaagaacttaatgatgcatagattgttgataagttcttacagaagaaaagagcaggcttgccagagaaggaggcaacgaatttctccgaaggtacagacgacatgctaaggtataagggaagagtgtgtgtagccaatgacatagagcttaaaagaaagatcatgatggaagcacacactacaccctactcaatgcatccagggtcaaccaaaatgtacaatgacttaaaaaccttgtattggtggccagggatgaagaaggatgtggctgaattcgtagctagatgtctcacatgtcaacaagttaaggctgaacatcagagaccagcagggatgttgcaacccttggaaatcccagaatggaagtgggaagatatagccatggattttgtgacaggactaccccgaacaaccaagcaacacgactcagtttgggtaattatagacagactcacaaagtcagcacactttgttcagtaaagtctacttacaacgcagagcagtacgctgacttgtacgtacaagagatattgaggttgcatggagttccaaagacgatagtctctgatagaggttcattattcacctccaagttctgggagagtctacataaggcaatggggacgagattaaaacttagtacgatatttcatccccaaacagatggacaatctgaacgcaccatccaaatactcgacgatatgcttcgagcgtgtgcactagacttcaccagctcgtggagtaagtatttacccctaatagagttctcctacaataatagttatcaagccacaatcggaatggcaccatatgagatgttgtatgggaaaaaaatgtagatcactacttcactttgatgaagttgaagaaagacgctacttaggtccagaagcagtaagagaagcttcagaagcagttgaaaagatacggca

SEQ ID NO: 221049 - DNA, 3093 bp, Cannabis indica
taccatgtgtaggtaaaggaaaacctaaggcagaagaacaatgagtttagagcttgataatgattgtacatatcatggaagtacaacctggagggtttcagtcttaaagtattttaggattaacttttgtagtcaccatgtgacatataaaaaaatttgttttgtttttagaatcgattttgaatttgggatcccgacttgtaaaactatatacgtatatatatatatgtatgtttatatttgatttgtatgattaaagtttaaatccaagtggttttgaagatgggtgttacatattccctctagccatgatgtcatgattaaaactctcctggaggaaaacgaaaagacatcctatagcaagtcccaacttataacaatacaagctagggtttgggggtaaatattttcatcaattttaaccaatgtatgtggcctactagaataaagccacgtggcttgtgcgaccccgattaatgggaaaggagaaattatcattggaccataattaggcatcactttgggagaagtaaaagcatctgggaaggtgacatgggccttgagaacgtggaaagactaaaataatagtacaagcctccgaaagggacaaggccttcaggagcccacaaggtttatgcttgtactccattcacgacaaaactttcaacgaaaaatactgttgctaactccctttgtacgattgacaaaacgagtttatattaaaaatgagatatattttaaagtattcactacatttttctaacatgcatcctcccaagacgcctggcgaagacatgtttctctgtagtaccataggttgcaaataggtccagtcttgtctcaccaaacgtctaattttgacctactcaacaaacccaatgtaaagaaatatttctctgtatagaaaaatggccatataggttacaactgatggcgaaaatgtattgagactccgttgtactctctaatagtgcctgtaaataatgggtcaaaccactgaaaaaaggatggaaaatattaaagggaaaatagctttaaaacaatccttgcaaaaaaaaaaattgtaagaacttgattaaaaatatcaatacaagtgactcgtggactaaatttcgttaatgttccaaccattttaaaattcatatctaaaaattatttagtagttaataagtaactaaaatttagtattttctgaaaatctcgaccaacaatgtatttattaaaatgttatagataattttataaagaaaatatttttattgtttgcttttgtatatgtttgaggtatgtttaatatttatttatataacacttaataaaatttattatcttatatagattgtataaaaaaaaatataattatatttatgtatttaataaaatctataatcaaatgtaaataaatactttgtattatatatttaataaaattacataatgtatataaaattataaattttcctaaagttagtcactatcatgtttggggcataagtgataacttaattttaatacgatccatgaatgtatgttgtattgtaatatttttgggcctaagagtctataatttattggaaaattctacaatgcatccctaaaaggaatacgccgatgcacctttatttgtttcgacatccgagagaattttttagttcaatttttttttcatgatcatgtatattatagttatttaaaatatcatgtaaaatttttagaaattaaaaaaaataacacaccaaaaatagggttcaaacatgttgttgcacgtgtcactctttaattttatatgtgtgtgaagtagactgtttgaacacttctttctatattgtaaattaattagaatttctcaaaattttatagtatatcttaataaatataatatacacgtctattaaataaaattagactaaaactaatattagggaggtgcatcctagaagcgccattgtttattacactttcataaactcctctctctagaatcacctcctcagtcctcaccactacttcatctttttcctttaggcatcataggtatcaccattctctccctctagttcttgatcctagattttagttgttttcttcgattttttattcttgataatattgatttggattttgtactacgaataattttggataaagagtatttggattgggttagggtgttagcttaggctgtgattaattgggtttttcactatgtttatgcatagtgaatttatgggtttagatttttgtggcaatacctttttctttctttatttctttttgttatctcaaatttggtccatgtgacgtggcatgtctacatagtgaagattgagaacacgtggaatacagctcgtcaacaacagaaaaagttaccttacacgacatatcaactgtcaaggtttctgaagaaatcaagaaaaattatcaagcaataagcaagaggagttaagttggccaacaaggccttaaccaaccttgtctggccgaccaaaggaagtgtataggctggccagaggaagcttttatggtcggccagggtttgagcataagctagtcgaccaaagagtgattgtcagatcataaagggcttgttcgaccaaggaagcctgacttttacaaggaaagttatacaaagaagctagaaaagctggtaggcacataccaaggttggcagtcgcatggaaaagctggcaagcacatgaaaaagctggcagacacatggaaaagttggcaggcacatggaaaagctggtaggcacatggaaagctggcaggcacatcctggggctataggagtaatacctggctgaccttaggagtgcataggttggccagggtcctacaaaatagggctggccaaccaatttctacttacaactttgaccatttgagcaaagttacgagacatgcccaacaacccacgaaaatggggattttccttcgagatattagtcatatttcctaaggatccagttatccttttttgtaacataaacaatagataagaagattaaaatattcttatttaaaaggaatatctttatctacttaaattatatcttttgtaagccctacactatataaagggcattaggtc

SEQ ID NO: 221050 - DNA, 1189 bp, Cannabis indica
catatgattcaacatgcacaaaattaagaaaatacaaatttactaaaatcctaataaaatagataaatagccaaaaaataattatagaatgccacttcatctcatttgtgctttcctttatattaatatatagattctttaatgagtctttggttatataagattgactttgaatccctaatccttgtatattttgaataagtattcaaaacttctagttaaatctcatttaattattaagtttaaattttagaattaaaacaattttattcaatcaaacttaagtgtaaaaatcttttataagttactagctaaatagttttaacttataaacattattaggaataaatagtaaaacattcaacttttaattttaaaattatactatgagcattgaagttcttatttagtaaaagttaactttgcacatttgatttgaaattaaataaatatttattaaatttgacaaaaagttcaaataaatttatttaaatagaaaaaaaaaaatatgcaactaacaattaaataacaaagtaataaattaaaataaattatcttttaaataaaactcttaaactaaaattaaaacttggattcctttaatgctcttctaaaatttgcctctaattggacctttgaagaagtctcacttccttaaattatttacctagactccaaaaactgcaagcaagagaagatattattagtggcaaagaacaatttattccactgatataatagggatgtagagtaaatcaaatttaccttgtcttatcatgttgtaattttgtcaaaatattcaacttattttgaaaaacatttctctcttaaactaaatgttcatgagcggtaccgtactagttgtgaagttccttccaaatatcacaagtgtagacaaacatgtcatacttttctctaatcttttcattgaatgaagtcaacaagatattgttattgtgcaaagacattcctggccgcgtgactcgattgttcacatacttctagccatgagtcttgttcagctactaattcatacaagttctccttgagttgtagaagttctatgtctactctctactcggacgtgaaatcaccatcaagtactgttaccatattgtaagggtaattgttaatattatattgttagtgtgtcattttattattagactgaaataaaattaaaataaaa

SEQ ID NO: 221051 - DNA, 1425 bp, Cannabis indica
tcaaagtttgaggggcatgatttggtagatatcaaagtccggagtatggtttagtacataacaatcattgaaacagtaaatgaatgaaattagacaaaagtccttaaatttacaatctcaatagttatgaggaatttgtaacggttaaaaaaattcaggagcatgatttggtacatgtgaaagttcggggaaaaattcctaatcacctaaataataataggaagaaagctttcgaacttattgaaaatttgaagtgacccctcatatttgttaaaattgcaaaaggggtcaatataattgtccagttcccatcttcagattctttctagggtttgaagggttttcgcaatctactatcttcttcatcttcgatctgcttattccttttcaacaaactcacccttctccaatggcgcctcctccaggaccctactccggaaccagcacccttgctttggtaaatcaatctcttcttcttcgtttcataatataaaaagaaaaatctgaaatagttacgacaaatttcgagttgaccttcttgcttttcgcttcgaatcttcaattttcatttctttggatgctaaattcaaagggggggtttttgtgtttttgcaggtggctcgtgcttctgctttctcaatcggcctcgtttatggaagcctcaaactcaagtacctacaggtacttcattatatgctcttctctatcccctcaatgtctcattttacgcatccaatttcgcagaattaaactacgaatcacgatctcacagtataaagtaatacataaatggaatcataatgggtagaatccaaggttacgaaagtttgtccttttgaggggaatacatgtttgatagctaaatttctggtgaagaattggggctggtgtatgtatacattgtattagagttcattggttatttatcgtaagggaaatctgaaattcaacttaagatcagatagtttattctaaagcaaccaattcacacccattataggtaattatgatatctatggtgcacttaatgcttagatgtgattgtgtgagatgataattcattgttgttggaatcatgggtgcttaggaaggataagtaaagatattagagcaaaaagaagatgcctgtaacatactaacaatatagacgcagttatatgatataccaagttatatgtcctttgtaggtgatcaaaatgtaaatatattttattagtgaatattactatttactgatgtatggggtgaggttggtggcatatgctgaactttcatgtaacataggcaatatgcccattttgctaatttttgtatagatttgagttttgagtgttaagtgtgtttttgcttcttgtaaaatgttgtcacccttggttgatgcactaactaatgtagagttaatagccattggctgtctgcttgaca

SEQ ID NO: 221052 - DNA, 2614 bp, Cannabis indica
tacgtttaaaaatcacgtaacacgcctagtctagttagggtgttacagtgaacccttaatcaatcaaagtcttggaaagtcgaccggcctccgcagcaatatagcaccaaagaagaataaggttggaactttgaaaataaaatataaaaagaggcgtaaaaaattgacacttattgctatcaaggcaacactcatgtctcggatccagtaaatggggttagaagaagcacaagctacatacctcttagtgggaagctgggttaaattagcaacaaagtgactcaccatctctgaagcaaatggaacaagattagggcccacgaagcgcttaaaccaatctgtcatggggtccaagttttgatcccaaacatctcctgtatactcacctcgggaggacccgtcttgagcctgcctcaaccacttctttataacctccgcttcaacgtcccccttggacaactcttccataacatagttgtctttagtgatgcggagctagatcgtttccttgtcgggatgggcaggggtcaagttgatgcctagaggggcaggatactcgtcaatctcagaaagaatccctgaatcgacactggggtcggcggtgtcgaccctcttcaacttctttgaagattttagctcagaggcgtcgcttttacattttcggtcaaggttagggagcacctcttcttcttcttcatcgatcaaaaccacctcctggttcctaatagcttcaatagaaggtcccgttggagtcatagtcactcgagggtgcatcgacatgtttgactcggggctgtgagtttgggcaagggcgtccagaggatcctccatgggtttcactgttcaaaataagcaaaaggtcagggtaacaacaaaaaattacaaatgcaagtatagtgcagcgagactaatcctaccctgttgatctaattcagtcctagcaaattcataaattaaaaagctagtgtcgtcatctcttaaaaagctatttgaaggaagaaaccgactcaaagtcatgtaggaggaatgatccaaaaggattggtacgggaggaccagagcccatccaggaccgacccaagaaatgacttaaattggagaaataaaaacccttggcattatcgccccaccgggaatggggcatccgaaagctatatagtcttttatcaaattccactggccttaagttagcgtaagtctggacaaaaggaacgagatgaatattcaaaggagacttacaaactctggaggtatttgcgacaagggacccagagtttggaaccaggaatgcaaacttaggccggactggagttttttctttccctgcctccttttgggaaaccctcccggaggcagcctgaaggagagcatacccgagctcttgctcccttttgtatctatacttgttatatttatcttttgcggatgaaataatgtctgccctgagtgccttttcactcccaagattttggatgttgggacagaagaccttagacaagttgaagtcatcgacaaattgactctctaaaataaacttggccctcctgcaattggctgtcgtaaccaggtcacccacattcaagtcttatttcttgtaattggaaaacacttgcgcatggttcaggaagaattgggtgggggtagtacaatgcatgggggatatcttgacccagtctattagtagatctagacactcgaaggccttgaacccagaagagaagaaaaatctgtggcgatactcctttacattcttttagaaattaaagggtactaaagtctcattggccaaatgggcctgaagtttgtaaaaatcgtctttaaatttatcccccttcttgggcactgaaagtagttcgtaaaaatataaaatttcagcgaggttaggcggagcctagctcttggctacataaaaaataaagaagcctgataacaggcggtaaacttgtagaatcagttgatagggtgaaagccaacgaaaacaaggaagtcaatgaagtcttggagggatagcatggccccggacatcagatgagtcatgactccaaccccggagccattgtagttgtggtttggcgtctcttcatccttgggaagacggtggtaaactccaaaaccagagggcttaatcccagcaacagtgagaatcttctctagttgatgggcgcaagttaatatcgaataaagttcgtcagcctcccaaccattggaatgacacacaagcttcttgtaaataactgggcccttcataacctcctctaaggtggccagcttctttggccccttcttggaggatttaactcaggtagccgcaggggtagacatagagtcggcttgatggcgattgagaatttcttggtcgaacccaaagaaactgtgtttgtgaaggtcataggacttcactcatctaaaaaaaaataagaaatcccaggagttagcccccacatcaaaccctaagtcaaaaaggggaatgggggtcccctaaccgatggaaagaggtccccttcaaatggttgtcaaaaggaattaaacgattcacaaagacagacatcaggtgcaaaatatccaagcaacacaggaaaatcagaaacaaaaatatagaaggcgtgcaaaagcaa

SEQ ID NO: 221053 - DNA, 1656 bp, Cannabis indica
taatattttagtataaattaaagtttaacactattatataaaaatatgatataaaatacaatacgacttaatacgatattccaaacgagcccttgaagagaaaattggaggaggagattacaattttatctacacctaattgagaacttgacgcaagtacactcgctcaaccactcatttctttttgtttctttctcttaattaggataaatagtcttcttactgttatgtttttttcttccttatttctttacatgttatttaaatataagaggtttttttagttttacattttaaaataatttttcttttatatttttatagaaatccacataaaaactctcatagtaactaattgagcaacctaaattacaaccaaaatccacatagctaacccttataaaaactagtaaagcaacccaaatcatatatattaaaaggaaaattaaaaaatcgtatataattttccaaaaatctaatacaatttgtctctattccacatatatatagatgcacgttttatgcacatttacataaaaagagtatcaaactttgtcatgatgagtgaatgagactattcaacaattcaataccattagattaggcaagtagtagtggtccaatttttattttggagtttttcatattttgggttaatattacattaaataaatatttatactactacaagcaaaaataaatatttataatatttcaaatatactattttgaaagttttttatatataaaaatacggtatgaaaatacacttcactaccatatgcaaattacataggtatgaaaataactctaagaaactaaaaaatacaactaatgtataaattaaaataaatgtgtatatatatatatattcattttcacttggttgaataactaaatataacaacaaataaaaaactgtacaacaatttattataatgtataaattaaataggcatgacagaaacccctcttttaaattgtaatcatataaaatttaaataataataataaccaatggaaaaaaaaataccttcacttaatcactcctttaaccattttttaacagtcatgcatcctcttgaggaacatatcttcttgttttcttaacattataactctcaataattaatttggtgattaatgatgctataaaatttatttgaagatttatgtagaatctagttgctctagtagagaagttaattttatctattcagcttaaatataaactaatgcacacaaacatatattattgtatattaaaatattgaatgacagtagaagttactatcacaataatagatcaccatcttttccttaaaagttatctttaatgtgactaaactatatataaaaagtaataaactgaataataagtaaaagaaaaacaaataaactaatttgttaactttgatgtttctttttttttaacaatttcaatatcaccaacaccacataattaacatcgaatagcatcgatatataatatagaaattgtataaagatattagaatataaaaatgaataattaaataaaaatttaaatattaaaaaagttaatatttttttttttttgtacttaagtaaaaagttaataattagcataaatacctgagagtatgtgttatcatcaacatagtaaattaaccaaaa

SEQ ID NO: 221054 - DNA, 2542 bp, Cannabis indica
tatatatacactaatatatataatataatataaagtttgtctaattctctcaaattattcagtaggtccagatttaccacacgtcttcaataactttttgatgcgacatgtgacccaaaaaaataaggtagatatatgttgtaaatgattatttttttaaaaaatatatttcaatgtgttctaagttaattctaaccagacaaaaatgatgtactcagaatttagcatcaatatatgatatccatccaaatttaaacatgtagtacgtataacaaaaaatgggagttgtaccgacaacagtttaaatatttttttagtgtgttaaatttttttaaaatttttaaaattttaccgtatatgttaaataattataacgtacacgattatgaaaataaaactaaattaaaaaaattttgaataccaaaatagataggtgtgtatcagtacactcttttaaaaaagtacatagtaaaatttttctatatcttacaagtctcattataaaaaataaataataaatttatagatacaaaatgatcaaaacaagtgtgaaatcaaatattaaacatacaagacagtagataattaagtagaaccaatatatataatcttcagtattaggcacaaaagaaaacacagtgtagtgttttacaagaagaagataggaataaaataatatattgatttgtatacactttttttttttgtcaaatgctccaatcaaatcatttaatttcaactgaaaaaaattaagctagctaaatgagagacaaatgagatttggatacgttatagttgcttaaaccttacttaagataaatctaagaattattatttgtattattattggtcatacattgagaaatctaataattttagttattaaacgtttataatattcatgattctcctctgtctcttttttttttttttttttgtatttagtagaatattgaatggaaattcattaataaaaaaatatatttgtaattgaatacatagggttaggcattttatacttgtagggagacttggtgtaattaatataaaaagtattgttatgagttattggtgtcttaattaataaataacttttttaaatatataattgttatcaaattaaaatatataatacataatcttagataacacacctcttcctcttgtaatccttagcatagtcctatagtaattttctagagaaacacaacattgtcctatatatatatgtaatggctcccacagaatatttcgtgtgccctaccctataataatgcttcaacatagaaacatttattgacaagaactttctcatcactatacccatttcaaagtaggccctacccaaaatattataaaatataggtataaaaggagtgtactatatataaatatgattactattattgaatattataacaattattgagagtgagttgtggaaggttagtctagaataaattttccttgagcaaaatgatcaagtatacttattagctattaagatttgtaaatattattattattattatgggtcatcgttgctgcaacaaactgaaagtgaagagaggcctttggtcacctgaagaagatgagaagctccttacacatatcaccactcatggccatggcaattggagctctgttccaaaacttgcaggttataatctctctctcactctttcactattatgtcaaaatcattatatacttaagtaatcatgattagtacatctatatatatctctgaatatatattgtgttaagctttaaatatacatgaatagaagtaatgagtactaatgggcacaggattacaaaggtgtgggaaaagttgtagattaagatggataaactatttgagacctgacctgaggaaaggttccttcacacaagaagaagaacaaatcattatagatgttcacagaattttaggaaacaggtacattttattttccttatatttaatatacatgttaacactttcaacagtttttaataacaataatttatgttggctaattattagaatttttgccccttacatttggatatgtattaaattatgctctctgaacttttttgaccattaaaaattcttcttgaactattgacattattggatttaaggacttttgtccaattttattcaaatttactaatttagtaattgtttatatactaaatcatacccccagactttaatatctatcaaatcatgccttttgaattttgacatgtgtcaaatcatgtccaactttcattcatgttagacttttcttaataaattggacaaaagtccttacaataatctcaataatttaagggagatttttaacaattaaaatagtttatgagacatgatttgatatatgtcaaaattctggaagtaaaaatataattaggcatttatgttttaaaattttttgtaaatataaatgacattatttatgttaatagatgggctcaaatagctaagcatcttcctggaaggacagacaatgaggtgaagaatttttggaactcatgcataagaaaaact

SEQ ID NO: 221055 - DNA, 2535 bp, Cannabis indica
aaaatatatatatatatcttaataaaaaattaaaagaaaagaatatgtcctaaggaggagctagttagctttaactgtttttcgtatatttttttataaagtaactttttgaaaagatttttatttttacacgtggtaaagaaacctataaaatgtgtaatttctaattaagattaagtaatttgggctatagaccataaatagtcgaagatactaacataatttatatagattttctccctttttcttctgttagctgctgacagtcatttcggttagcatatatagagttttgtttacttaaaaatttgtcctgatgacatagacaatgcttttgacacgtggcaaaaataaaacaatcttgggccccagccactaagactaatagtggtgaacttaggtattagaaactgtgttagtgccttggttgacattagtgggcgcccaagtaggcactatgatcctgcgaagatgtttccacttgtcttccttcgacaaagttcaagtcaataggtcccagtgaccttaaaatgatgaaccgtgaagttgaagatgtaagttggacgtcccagggctcaacctgggtccaacatgaatgttgagcttccaagttgacatcatgtgcgccatctcgcatcaattttggttcccatcaacttcttatgggaatctggttagcgattgtcctaaaatacatatgagagacacgccctagccaagtttcagacttcggagatgagtttacatgaaatggcacccaggcacccgaaaagcccttatgggcgcctaggttgacatatagtcaatctggccgcaccatgactggggtttaggtttttggggacatacttggaccccgattcctcaaatccatcaaggatcattgcaaggacatgaaatttcatcaacaacatctccaatgagccaatacataactatgggcacccaagttgacatttcaacctgggcaccgatttcgtttaccaagttctgcccgtgaaaatcagacgaaactaaaatctatggagcaattttcaccaaaaagaagatagaacatcgacaaaaccaattttgaagatgtcgacccctacttgggcacccagtgcatgccccaaggccatagtgggcacctaggttgacatatctcaaccagggcagaaaagttatccatgcatttcccttattttaatccatgaggaagatacaagtgctttcaggaagcaaacaaatccatctaggccccagctgaagagctgagcacccagattgtcatcaccccagtcactgggggcccaagttgacgtagccacaattctagtggtttcgtcgatccaattgcaattctatcttgagcattcttcttatttttctctaaaaatgagacatgagacttggaattaggagaaaatatcgttcgtttaccaagtcatcccacatgaatgactaggcaccagtgtaaagcaattgggcccccatgttgacattggcctgggccttagtgttctatccttcaaataacaattttgctctggacatcggtcttattttacccccaaaataagatttgaacacttttgcaagtcaatatacatgtgtcacgagcaagttcactaacacccatgtgcactagtgatcacctgggtgacaccttgtcatctctagtgaaacattgggaatcaccggtgcatatcaaataagatttccaagagaacttccccaaggtcaaagaataaactaaggataactatcacatcattcaagcatattaaaatttggataaatcccaagaaaccaagtcttagacgcctaggttgacgtttaatcaacttgggcgcccaaaagtcaggttgttctcgcagtcacttttctacagtgcacaccgcttagtaaaatgaccataattttctgaatatttatccaaataatgtgattctagtggaaaattaaagctatttctaaggtgcatctaagcgtgcatacattcctgccgtaattttgaagtttaggcctcaaaattgacttgtgagctagtggaggatttcctagaaaattttcatattattttattataatttaattggatctccttccctatgaaaggtgagtttccctagatcatttttcacaatttactttctttcaacaaggtcagagtttctctctcttcacactttctcactctacacttagtcatttttctatgttttcttgtgagggaattagcttttgtgataataaaaggtctaagtagacgtagctccattaccttcatgataaggggagtgagctactataattttggtgttctcattttactttctattcttatatttattgtccgctactgcttatcagatggtactgagttgactgttttttatcgtcaatattttggtgctttcattgagagctccacttgagacccttggttgccttaatgttgttagtgttcgaataagtgcttcattttaaaattgatttgtaggcacaagaatctaaggacttcaaaaactgtggtgactactagggccacta

SEQ ID NO: 221056 - DNA, 5254 bp, Cannabis indica
aaacgtatgaaatgtgagaatacacataatgcaacaaaaattcaaatcagaatgcaataaaataaacctgaactgctccagaaggaatttgaagaagattttcgactggttctttgcgtagacactcaatccattccttgtcaattgcttcccacagtctatcctgaaaaaaataaaaacaataactataagcgatgcagcttaaacatactgaaacaaatttcctgcgttttttcaagagaaacaaacagaaagtggggggtctcttctgccttgaaaaaattgacgacatgagcattcacgaagaaagaataaggcttaaggaaatcaacgatggcgtggatccattgaagtgtctgagcggctgtctcacatgagtacttgcaattggtggcgccaatagtggccatgtccaattaccagtgcgggaccagaccagaccaccatgcgagagaagccttaaagggaacaatacaactaactacaaggatttagctatgaaagtctatatttcggcttattcttaaacgcctatgtactctttataattataagaataacacactaatcagaaacattagcaagtttaggaatgaaaaaatggaatagaaattattttatttcaattttgtttttatttggttgctatgtaaattctactgtttaatttttttttttaaaaaaaaaaaacaaatgcataaattttctaatacaattgtcgtttttcattaagttgtcgttgcccaagatatttgctgttttcattttcaattattttaacagagttgtcgtttttctagataattgtcgttttgaaagagatgatataaagaggctaacacacagttgtcgttttctagataattgtcgttttgtagataattgccgttttcctagagttgtcgtttggtattttgcaatttcactgcctatatctccatctcacaatctcccactcaaacacagggcagtgaaaatggcgggaactataagtgcaacgattggtgaagaagtggactctcttctctccacgttcgaccatatccaagaggtaattcccttctggttttcagattatcatcgtttattattaatattttgaaacagacagatcagatcaattatatcaggttcctgaatgattgagatttctaatatagtttcataggctttcttggtaaccaaacagaaaatttagttaactccaagtgttaatggttgcaatggtgaatttgatcgtttataaggactttaagagcgccctaatggagatccagcggctgaaatcgaattccaatggagaaatcaagaagcgtgaagctcttgaacttgcttgcaaaagtctcaaacaaggtcagaaaattccctctctttaaatttccaacttttgctgtttcagcttattttcgtagattattctttgcattttttttccaattcactttcaaatgttattattagatactccaagaatccgtttgtatcttgccactaaattttgccaagttggattcgaatcaatacttgtcgaaagtctttccagttctagaagctgaaattatggggtggatgacaatgatatttaattcaaaagctattgcttgtagtcaaatccacttcaaaagaaagagattcaactctcaagagagaatactcgagccttgcaaagttgtcttaggcttgaagaacctagttcacaaatcattcagaattaggtaacactctttctgattctcacacactagtacgtaccgtagctaatccaatctacagaggctgatcaatcaataaaggttcctgggaacctgattaataaagtgcctcacaaaccaagttccaatctttaaagtgagagataaataaagttagtaggctaactccttttttaactatctgagtgaacaaatctaattggttgactatgctgaaggatcagactcatactttgcaccaagattcgatgtttaaagttgtaactaaaattttaatgcttttagattatatttaccaaatgttgatttgttaacttcaatacataaagatgggttgattgtgtgttagatagtgggttgattgtggaaagtgttgtatgtattagctctatgcaggtttcacagcagaaaaaagagggaagaaacttctagttgctaatttttatgttatcaatctttcataacatgcatgactgactggtgcttattcaaaggcactctttgctaatctaaatgatattggttcaatctcaaatagagtgttctgtcaccttgcagaaaatgagcgacttgttaagctctacacagaatcacttaacaatgttgttgatcaggtgtgtccatcatttttttcttcactcatatattggtcttacaatagatttgcttgtgttctcatgctttggttttgtgttcttacaaagcctttttttccccttccgctttcattttggttttatagttggaacaccgtactacatgccagagcttaaaagagcaattgaagagaatgaatgatggatgtctcagtaaagaagatgtaaaccaccaccctgcttgatctaataattttttctgatcagaatccagctaatggaatttggggcttggtttagtgaccaggccttttctctatcaaactatcgtatagactggaggtcaactattttggggaagatgtttttatgatgaaaaacatttactacaagcactatccatgataaatattacagcttagaacttagaagctgaattctgtaagcaggagcgcaggaagattgaggagtcagttaaacaagagtatgctaaaaagatttcggacctagaaactcagattaggtgagttgccttgcataagattataaggatgcattactatgttatgttggttatgaaactttttttgtttcttcatacagagggctcgtactcgaaaaggctacaaaggaagcaactctaaatcaacttcgacaagatttaggagcacacaaatcccacattcaatatctagctggcagattggaacgagtaaatttaaacgtcgaatcaaaatgtgaagtctcaaggaacttcgtcatttgaaaaatccaggttctgtcatatcaaaacgttaactatagtttgtaatgattctgttacagatgagattgagattcggggtttgagggactgtataactaatgaacaagaggagaaaagggagttgaaccataagctccaacaattggaaaaggaatgtgagtgttgctttgcccacgatttttataatgtttattgcttatcgttgatgatgcctgttttggctcccgaacaatatattgttagttgctaatacttggttcatcgttatgttataccataacttaaaaatataactaaaaatgttacttgtttcatgaagtgtggatttgcagatcaaagattgttaagcagcaaccaaatctgacttcagatgtgcataatgaaacgcttcaaaaaaccaccgtagagccaaggaaggaaaataagacactaaaacgaaagcttgtcaaaacagaaagggaatagaggaagatgagttgttagctaattttttgacttggtgcacttactgagtttattgtaaaagtaattagtattatagtgttctaaatcaaaattctaacaatcatttccaaattttacttccatccacatacaaaagaaggattttttattggtcctttaaaagataattttacctcatcgtaaacaagatcattcattagatttgcttgcttaatgaggaggaagctattatttcaattttatctttgctatcttaagaaaatttgaattcgtagtacacttgccataaattccacattttgagtaatatcataacccatggcaattcataactaataatgatactaatatttgaaaaaaccacaaacatttagaattcggttgcctagaaaatatcttaccatatcaataagacttgcaaaatggaggataatttaaccaaaattcagtagctactatcagacatgaaaccttgaaatagaaaaatcaaaaatatgattacgggaatttgaagatttcccattagtcaatccctaccactgttttaaacacaagcaaacatttgaaataaacaacattgcacaaactaaaatatagtcatagactcatctaaaagttggatactaggcaacaagtaatttgcaaaatactaacaaattcatgaaaagatgtctcatttcttcttctctgtagttcctccagccctgcaagccaaatcacaaaaaataaggtaagtgaagccccataaatgtctatgaatctatgtttcctcttagttatcaaaatttacaattacctcatcttgcggagaacattcgacatctcctcacgcttcttctttgctctcttgtgggtacctagctttcttttagccactttcagagcacgcttgtcctttccaactttgagaagctcagtaattctcttctcgtatggagcaaaaccagcaacctcacgaatcaagttgcgtacaaaatgaaccctcttactggttttctacatgaaaaggcaataaattagcaagagatttctgagataatgatttacttcaagccttaaaaaacataaatgtaaatgatctaatctttgacccaaaaaacacaaaaggcaaattatgtattgaacaaacaaaaatgaccaatgaaagaacacaacagaatagaaaaacgatagtatattaggtatcagacaggatcaacttactcctttacgatcagagggtcgtggagctaattctttcttggtcacgacatggcctttgttcaaacccacaaagagacccgtgtttggctgttttggagccattacctggtttcattcaatagcaaaaacctagttttaggttcatctctagtatataaaacattcatctgaacctttttcaactaatagatattataaatctcagtaagtgaagcaaattatagtacaactatgatccctattatatcccaaaaatctacaccaggataggcaaaatacatcttatctccttccaaagatggataattcaaaggtcaaatttaacataaaaatttcattttagcatgtaaccacgaactaggcaagatactgaaaatctttggcaaagtatacaaagagcaacaaacagacgacttaacactaaaaaaaagcaaatgaaagttggcaacacccaccatcccaaatataaaaatcattaacaagaaaatcagaaaaacacatatctacataaa

SEQ ID NO: 221057 - DNA, 5301 bp, Cannabis indica
gtaaatcttccactataacaatattaaggggtacacaatccaacactcttaagttttgacaaatgcttaaagaatacactcaaaactctcactcactagtatggcaatctcatcatctctacaaatatttctcacaattttgtaagaattatctttttcttttatatttctctcactaagagatattttctttctattttctttctcaagagctccactcttcacttttggaatagattgtgatggggtgagcaaaggaaagggatgtagttcttttagtataagcttccttggatgtatgaacaagacacaaaaaatcgactctacatgcataatcaaatatgtccatatgcttcaagtcaaaaattaccgtcatagttttcacttcattcgtattaacaataatgttctgggactggggtttaggattcgggtctaggtttgagtccgaaattgaagttggagttaggatcgaaattgaatttatggtaaaataattaattttagacaactaattaatacaagtcaagtcaatactaaaagtaatattatattaaataatacaattcaataaacctaacacaatacaatgcaatatactaaacaagcccttaaaaagtaagggaaagaaaaaaccaaagtcccttgtgatgcaaaatgggcgatgatcataaacatcagctaaataataaaaagtggacttagaacccgatgatgaaatcagtctaaacatatatataaaatggtaattacatcattacttgaaaaataaaatcaccacaaattaggtataaattaagcaacgaaaacgttttgttaattacattatcaaatgttgactagacatatatgatttaagtgtttaaggttaatggatgaacttgaaattaagtagtaaagaattaacattaatagtactgaggttataatttcaatacgcattaattaattgattaaaaataaagaagaaaaatataagtggatcggtttatatagatatcttgaatatcttgctatacataccaactcaaaccttgaaaaaattcaaattgtcaaactttactgtcactgaagtgaggcccatatatatactaactaccccatttgcccaaatttctttcttgaagagtgtaaactatatgaatattatgaagtttgatatcatatttgaagatccctaggtagatatataattaagaacattatcattctattaattgagatttgttttccactactaatacataagcttcattatttgtggagttggcatggaatgacaattgtcatcatcattacacctagatcatatagtttggatattagaatattcttttccccattatattggtttggaatattcatgaatatatatatatgcaaaagcaagtatgatgagcaggtagtgaaactaataattaataaaacgtcacaaaattaggataagctagcttttaggtcatgtattatcatttcatcaagaatttaggtcatgacgatcgatgcattaattatataatattatctatatatgtttgtgaactagtcaatgcaaaataatatataaatacccctcattagtaatatatatatagtactactactacttctaattaatcaatcaaaacttaagaaaattaagggtcattatatatgatgatgagcaaagaaaatgttgtggaacttggttatgaagaaggcaagagtagtagtaatagtaagtcattttcaagaagaggaatatcaatgttggactttgttctaaggcttattggaattgttggtaccatggcaagtgcaattgccatggcaacaaccgatgaaacgcttcctttctctactcgtttcgttcgctttaaggctaattacgacgaccttccaacttttacgtacgttttcttactcttaaatatattcttcttatactataaaatatgataaactgttattgatgcatttgaataaattttaagtcctagtttaataaataatattgaaaactggtaaataattataattaaggatgtggttattttttttaataaatcatattaatatggtgttgaacaacaacttaaaatgccaattttttttttgagtattaattaattgatgcattattattatgtgacctaataataataaattgatgaattgaataggttgttcgttgttgtgaatggcgttgtgggtggctatctggttgtttctctatctctttctatcctacacatagtacgaagcaccccacaaaagagtagaatacttttgatcatcttcgacacggtacacgtcatcttgtaactagttagcgggatttcttaaaagttattatttaaaattatatgagtttcaatacttaattatattaacaagtaggatagtatttggtatcactgacatcttttttagcatttcttataaaaaaatagtattgttattggacatcggatacttaacaccttctagatgaatggaatgcctataactaataactataatgtagaccgccgtataaaaaaattgaattataattttttatatgtcaataacatagatgatcataactcatagtttgcggtttttataggtaatgcttggttttttaactgcgggagcatcagcatcggcagctatagtctatttagcacaccaaggaaacaccacggcgaattggttcgcgatatgccaacaattcaactccttctgcgggcgcatctccggttctctcatcggatcttttgttggcgttgccgttttcatactcataattttgctctccgccgtggctcttgcgcgcagctagatcacataattgactcatagtaatgtcaccatcgtttgtgtgtgtttgtgttacttactatatattatttagttaatttggtaaattcattatgagtttaaattttgtggatgatattattcatcatgatcactagtagtttttttctctctatacatatatcatgttgtgtgattggctccattaaatttactacttttatgtattttcttaatttatcttttgttgtgatatgaatgaagtatatatgtttttcatgttcaagatgatattcggtgttaggagtattagtgtaaatagcgatattaatatctaaagttttgaatttgtaagtaacataaatttaatatttttttagcggtataagtacccaatatttgtaaaactataatttttttctaatttcgtcagcacaaatttcaatttgaattcattaaaagaagattggaagtaactgttactgatgtttccggccaaatccaataatttaaaatctaccaatttgagtcttatatgtgccctatttcaaacaataataaagtttgtactaatgaaacttaaaaaaaattacaattgtacaaacattatcctacttaccaactcaaaaccctaggtaattatactactattttatccaacaaattatcaacttattcacaattatataccatgttaatatgttattatggtatatgacatatgtattaatacattaaaaaaatgtaaacatttatgtatttataaatattttcgtacttttttttgaaagaatattttctactttaaacaatctcaaccatgtaataaggaatcttaccaaatagagatactgccaaaaccaaaagagctaaataacagagcaagaggcaatgagcaatgagcatagagaaaataatacaataaaacaaaattatataatattacactaaaaaggaccttaactttttgccatgttggtctaattatatccataatctttgtttgagttggctaatatgaatgaagaaacaaactattaattaaagaaagcacaaaagattcccaccagcttaagttctatgatgttatcatttgtgattcctaatatatattataattccatcatattctagttaaatttgaatggttccttcccttaattaataacaattggtttactttacctatatgctttcaaagtcaagttagaatgatacaatgcctttcaatactagtatgggagatcagtttaattgagaccaccaattttagaataattatgaaaatagaaaatactttttcaaaatatatatttatcaattaattggtaaaaatactattttggattttgtattttacaaaagttattgattggaccatcagttttgttaaataacaattcaaaccctatattttttcaaaatagtacaaaatagaccctcagttgaattttcgtcaaattaaaactttataataacttgacttgaatgtgttattagcagactcattatattttttgtatcttttcgtgctagacactgactttaggttagttatgatgaaaaaaaaattacagaaaattgagttcagaatctattttgtactattttaaaaaataaaaaaattaaataaaaaaattaaattatcatttaacaaaacaaatggtataattaattactttacaaaacatataatctaaaatgatatttatcctaattaattcatttgttgcaaattagcttgagccttacatacaaaaaccactgcaacatgttgagaaagctaatatatttataaattgcttctcaagtaaacgattttgttacatctacaaatgttttaattgacttaactaacatccttgccttctaatatatttatagatttgttaacttttgaatcaaacaaaaactggttaacaaacatgttattattggattcaattagactaaagccagcctctttcatcacaccattgtcatccatcgacttcctcaccttttcagccccactccactctccatgtgaagcaaatatgttagaaagaagaacataatcaccgctctcattcgttttcattcgaagcagttgctcgttcgctcgctgtccaagctcaacatcgccatgaattcgacaagctccaagaagtgtcctccacacaatggcattaggatcaatagccattgtctctacaaactcaaacgcttcatttaacagcccagcacggcctagaatgtcaaccatacagccatagtgttttatattcggctcaatcttgtattcacttttcatgagattgaaatacctcttaccttcttcaacattcccagcatggctacaagcaaccaaaaacaccaacaaaaagtgatttcatttggcttaattttactcctcaacatgtcttgaaacagagtaattgattcctcagcatggccatggaaagccaaatcctcctatagctgaattccaagttgaaacatcttgttcatcatcccactcaaaaaacttacaaagtg

SEQ ID NO: 221058 - DNA, 1994 bp, Cannabis indica
gaggctcaaatttagttaacaaaaatctgcgttaacaaatgatacaagcttactctgaagtcgctggcctctgaaccattcctgacttgatgttgcataggctctccattttcggaaaatctgcttccaccagtgttgatggttttagcttgtgaagttcgtttcatatttcccgtgatgctcatctccctttcaaggcttacttcgcgagtttgattgcaaaaattgggattgcacccttccagctgatccctttttttataggcttttggctgggtggtatgtgctctgcaaaattaataaatgggaggttccttcaccagaggaaatcctttacttttactgtgttaaggctaatccaatgaggactaataggtcaaagctggagttttttcgattggataaatgtcagggctcttacttccctgtttgtcagatggaacatacccacgatctctaggaatattggttcttttcctccaggttccctactagtagggtgccatcccttgaattgagctaccaacttccaggtattttaacaattcattacaagtcttactcacttttggattctgccaatttttgtgtgtgaattaacgtttttcaatttgcagcaggacttcctcttcaaagcatcagaatggaagagatagccaggaaagagggccaatacaaggccttctctgaagagcaactgaaggttgaaagcttagtgacaactaagctgctctgcaagtcgggtttgatcaccaagtcccaaagcatcgacactataagccttcgtgggtagtgtcaacctcttcaagtggtgaaggaatccatctctgccgattcaactgttatattttccaatgcggccaaaaattagcatgtcttacgctgtgaatgggagttacatcaccctgaccctttggccaaggaagaagagatcttagagagattttccgtcgcctaccctgacatgggggctcaggggggcagcacattaggaagaggtaataggcccttcctcatcttctgtagccccagcatgagtcccatgtcccagaggaaccggggaggatttgacaagtattttctaaccataaattgtcgtaaatttgaaggagtatatagacaaagtagacctaatagttaggagcactagtagctcgagggctccttcggacatcgtcagagttaaccctttgacagttatgttgttgcctgaatttgaagggcatggtagcttcatgagtcataggagcattttagccgtttcctggggacaaccttatagcacctcactaaacggtcgtacccacgcacaagcttccacactagattccttttcttactattgctattgtttgttataattgcatgacttttgacagcttttgttctttgcttacattgctgccttgttatgcagataccccagaatctgagatgctgagatcgtcgaacaaccgaatagaggctgcgatggacgaggctaggaagtctcatgaaaaagggaagagggagaccaaaaccagggcttcccaaactcgtaaaccacctcccccatcgacttcctcgtcataaaatgtccaggaaattcctcctcaccctaagactgggcataccacactcaaccgttcaacatcgggtagtgggggaaggaggtcttaaaattctcagagacctagcgaagttcctactgcttcaggagaacctccctctcaagtagttccttatgcaggagaatcagtcccagatattgtaccagatatagggggtcctgacgacagtttggatggctctgtctttccttcaaagagaatcccagccaaattaaaatgcacggaataagggtatcctctcctgaccctatcacgaaaaaggccagacccactgtctagggactcaagacgactgaggcaccatcgtctgattagtcactgccacaacctcaacaacacccacaacaacaacaacaacaacaacaacaatagcaacaaaaataa

SEQ ID NO: 221059 - DNA, 1194 bp, Cannabis indica
ggttcattaaacctcgtagcttggagcactcaattattttgtaagataaaccaacaacgaaatttattattacctaccactaacaatgatttgatggtgagtcatccaagaacaaagaaaaaccaacaacgaaataaaaccatgtgacacagataagattaaaacactcaaaatcatgcacaaaaataagactaatcgtagtaacaaaaattaaattgtagttgcaaaatacaatcctgagtaagccgtacctaagttcatagaagacaggtaggcttgacagaaaaaaaaatcttcgttaactataaatttagttaaacaaaaataaaaaaaaatatttaagtgaacaaatatgaatttaatattataaaattttagttaatagagaaaataaaatataatgaaatttggttatcctaactgaataatcatttcccttatttttttatttttatacaagaaaaaaggaatttcattaatcaacccaacaaattacaacctcaatgaacttctccaaggagaagcaacaagaatacactattaataattacaagtcaatctttgaagtaagtttttctccactcttgtccctttcttatctttaatcaagtaaagtctatatttcattatattttttttaattttgttcactatacaattgacagtattatatagtgagaaaataaacaattgtttcgattcctctaaatatgatagatcgtggctgccaacactagcacccttattctgtcagtcaagctcgacctgatattgcacagtcacaacttccagccaacaaaattcttggactggccttcaaaaaacaaccaatgaaagatcgcattcagcacctggttagacatgttgcaacagaaaaaaaaatgtgttgatggctctcggtttcagagtcacaagccacacagttcatgttggtgacttgaatgttaaaccggcttaacatgtctcgtgtcagtaaccttgaatgagcagtttgccaaagcaaaatagcatgcttcagaatgtttaagctacaccagattgcaccatcagcaagatcggcaatctactatagcgaagcattgtaaagtttaatgactttaaactctcctccattgctagcagcaatccgatcagcttgattgtagacagtacgcaaccgacaaagctttctccaataccaactcgagtccatct

SEQ ID NO: 221060 - DNA, 2146 bp, Cannabis indica
ttgagagaccgcaagaccatcactcagtgtaccagtccttaaagatattcacccatgagatgtcagcaaggcttagtttatcactttcacaggaaatttttgattggatatgttttgtcatttatattttgatcttaactcatcaaacatcatttcatcatcatccttagaatttgtttcatattgagtttgagatgaagatgaagtttatttagaggatcggttttgtttttctttttttaaagtgttaatgtttctctagtagtaattttcttcaactgtatagtgttctttattttagtacttgaaaaatataagacatgggtttaaattaatattgactttgtattttatttcttttaatattgattacatgcaattgtaccaatttctctcacacagaaatagcagtttcaaaaatattgaattgaaccattaagaagtgaggttttgaacctgagatagtgaaggtctttcaattttggcctattttcataggaattgaaccattaaagagaatctgtctaaataagtgattacatattttgattagggaggaaagaaaagttgtaaatctggtgagattgataagtataattatgtctctttagtaaagaaaatttccagactaaaagggaccttattattcttgctgaagtataagaatattaacacccttaaacagagagaattgtaaaatatttgtatttcatatgattaaattgttcctttttttttggcaatttgcccatgaccaaattgacaatgttcctacaaaaataattttaagtattttttaaaaacttttgtattatgaaataattaacatgtacattaacaataaataattactaaataaatttaattataaatattaattttaaaaatattaaattattaaattattaaattttgatcaaagatgaataataaaagaaaatatttgaattagctacttaattaaaaattatattttttttacactacattaaaatttaaaatttatatacaatatatcttagttaaattacattttattagggactccccgcaaattttctgtccatatccctaattatatactcttcaacatatttttttgtattaatttagaaatatttattttggtaatcaaagttatagaaggtaatctgtatttatgttgagtatttattcttcaaagtatatgttttatttaataaaaattccagttatatctaataataatttttatgattttggttatattattatttttaatattaacatttctattacaatttttcaaaaacaaaagtgatatttatgtaaagcccatcccaaatgtgataacagaaaggatatttatacaaccccaaagcctattatgacgataccctttcttcttcgttctctctcccagtctcactcgatcgctctcactaaaccctagaaataatatcaacaacctgatcgctgatcggacatcggagatcggagcggaggcgtttcactctcaggtaccgtttttgtgttatgaaatcgaatctctctctctttctctgttttgttgttggatatgatttagccattatctatcaaattctatttattgaatattattcttagattaggaattattaagaaaatatttgtttgtgaataaattaagaattatgttaattttaaatatagcttctcaaaattctttttataattaattatctgtattagttttataattaattttgtaattataaataaaaaaatatatacctctaaacaataatgggattactttacaaaaacatcctaatacaaacatacataatcaaggaaatcaaagaattattttcaattggagaagaaagtagttctgctgtaaaaattattcaaactgtaaactaaagtaaatttaagtaatatttggaaatgatttcaagatgatcatcatatgttataccttgcattaagtatactaatgtacagctcaattaaccagaaccaaaggctcagttgcagctgacatactccatttatacatcttgaattatcttcaaacagttattttcctttcagaaaaagatattggtcaaacatctacaaacatgaattcaaaataaaaatatatatatcaaaatttgcacttcaagagatgttagtgaac

SEQ ID NO: 221061 - DNA, 1327 bp, Cannabis indica
ccctcaaagatcaaattcgaattataaccgatactgaaacttttcagaggcagaaatataccatagctgcaggatacaacatgttctcaactccaaccaaaagggtgaagtggagtagtgaagtctgggctagactaaacacccgcaaacacagtgtaataacctggttggccatgcttaatagactcaaaacacacgacaggttgctcaggtttggtattcaggtaagtggcatctgctgcctgtgtgagcagctacttgaaacctgccagcacctcttttttgtatgtaagtttgcaggtttatgcctacaggaggtgaaggattggctgaatgtccatgcccaaacttgtgacctgcaaaagctagttagatggatcgggaagagcaggtttttgaaattctgaaagcaagtgatggctactgcaattgcagccttggtttaccacttgtggaaggctagaaatgctgtgatatggcaaaaagcattggttgagtctagcagaatcattgaagcagtaaactggacaactaaaacccgagtgtctatgttcatgcctaggaaagaaagttaagagcattgatagagattggttccttactttgtaatgaaatatagttgttatatatagatttagtcgaatacatactgaatgtatatagatttttggcccttattggggtgcttataggttgtaaaaagtttgttggtgcaatataattcatctgatttattaaaaaaataataataataataataataataataataataataataataataataataataactgcttcactaaccgttttgcatgagattcaaacaattagaaaagcacaacaataatatcgtttcaaattttcatggccatgcccgaaagaccttccgagtaaaaccacaagaaacccaaacagtactgggtgtgaacaccctggaacaaattaaaaatcttccatcgaccgccaatccaaaatgataaacagctttcaaatgacgagatccatgatgatctttaaacctcatctacctctcacaattgatcaaaaatattgggataaggattaatgaaaaacaccaataatgatcatggacaacataaacgactttaatttataatctttcaatacacaaaaaaaataaagaatgactcaacgacaaaagcaaaattgatactgatcccaaccaaagaatttctcaaaatatatatggtagacacaaacttgttagtacatgacttttaattacaaatatatttataacaaactaagatatttacacatatatctatttttcaaatatatatgtgtgttgatcatttat

SEQ ID NO: 221062 - DNA, 1584 bp, Cannabis indica
ttcctttccattccattccatttcattacctccaaccaaacgccacgtgtaatcttagtggaggggcagtaatggagccacctatggaggtatttggctaatgcggagagacagatactgatataagtggtgttgatgttgtattggctattatagattgaggtaacactgatccaaggtgtaaatgtggttcactagatgtagcaggcaatgggacagggtgaatttgtggttcaaatggagttgcagagtgaatttgtggttcagatgatgttgcaaggtgaatttgtggttcaagtggagttccagagtgtgtatttttggttcattagcggttgtaggcaatggggcaatgtgtatttgtagttcaggtggaggtagagggcgtatttgtgattcatttgatgatggaaggtggggtactaaatcaatgtgtatatttgtcagtgtattaagaagggtgtctgattgtgtaataacaaatttaaggacatgaataaccataacaaattcatgagtagcacattaacaacaacaatagaaaatctagaaaaagatcttatattagtattatgtaaaaaattataatttgaaagatttacaaacttagactcaactcaaacatgcacaaaataagcaagtaatcgttaaaaataaatctgagaaggcttaaaattagtaaaacagatgtaaggataattatggtaaaagtaaattaaatatttttttaacttatttatactaaaagcaaaaataaattaaatattttgtttaacttatttacactaaacaatatggaagtaacggacacgggcatatattcattaatatttccttatcattctattatttgtacggattttatgaattatttaagcttcatttaaacaaatgtttaattataaagtcaactaatgaagaaactctcatcattaaagggagatgagaattatcctacagtgaatactttaataaatggtgatgaacattagaccatccattaaatatttcatgtgggattctctccatatcacgtattaggacacttttttattttgtcaaaaatttacatactttgtaagaaatttcaacaatctctcacttcaactttttatataattatagcatgatctcactcttatcacttcataacttattattacctattgaacatatttcttggtattttcagtctataggtcgggttaccattatgaatgatttatcaatctaagggcaatagtctcatttcttttttctctctagctaaacctttggtcaaatgatcgactgagttatcatcagtgtgtacatcatccactctaacagtttctgttgagagaaactctcaagcagtgttgtgcttacaatatatttgtcgtctcttaccattgtaataacgattttgaacttttgaaatagtcgcaatactatcacaacggatcaacacaaccggtataggtctttcccataaaaaaatcttagctagctatcttctcaaccaacatgcttctttactagcagtagctagtgaaatcatttcgaacttcattgtagattaagccaccgtagtttgtttcttag

SEQ ID NO: 221063 - DNA, 839 bp, Cannabis indica
cataaacaatatttgcttcatcattaaccttttactcagtttcgtaaacaacacttgcttcgttacccttttccttagtttcataaagagcattcattaagtgataaacactattgataatatagatggctggaaagttatctgtaggaaatttacccttttattctacacccaacaaaaaattaaacaagttatccaaggtcaaaatcgatcttacacacaaagtcaaagctcggttgactccctgaagttaagaaccaaaacgacagtcttttaatccctactacaagtcattttgcaataaccccaaaaaagatcttgaaactattcagtcacacacacacgaaacccaaatatgaaaccctagcgagcttcgagtttcttctccaaaaactcgaagtatgcacacaaccccagaaaacccagtttatcccttcaccgatcattcaaaataaagcaagagaaattagaaagagtgcaccaaaaattttatagaggttccccaaatgttgttgggtacatcctcttcgagctcgcctcaaaaaagctcgtttccactattggatcttcaagatcaaagagttacaaagcaagattccaattcacaggtacgattggtaatcttttgagtttacaatgtttattttctttctcttttctctctgaatatgcattaatctcttcttcttcttcttcttcttcatgtgtgtatgtttcctccttggtttggatctccgagccctagccctagggctccaagacttaaccactgtaagtctcttcctctccaatttcctaacctgttctcatttgttttgagttgatttgcatatatatag

SEQ ID NO: 221064 - DNA, 1737 bp, Cannabis indica
tcgagaccacgcgttctcataacaaaaacgagtagcagtgatagtactatgatgggcatcaggttgtaagaagatgggagtatgattggaactagaaaaacgaatgttggtgagagtagctgtagtaaaagtgtctaactaacgaagagagacagttgctttatcgaggcaaatttctacacaattgtttgttcctcgtccacgatcccaagtgaaaggatagtcgcgaaaggtccagatacataaggttgcaatcatcaagaatcgactggaaaccatcaataagagaagttgggtacggacgcctgcctctcttgtcagattgggttgaaatatttttaaaatcactgatgatacaccatgggagagacgactcgttgtgcaatgaacgaagaatagtccatgttcaatcccgttgtcttctgtttggttcaccgtagaagccagttaggcgccatgtcgacatgccccttatataagcttcaacattaatatgatttggtgaaaaaccgagtagattaccttcttctgaaatttttcagtcgatgcttcctaaattaaaatattagttacacgaaaattataattttattgtgaataaatatattttatttgcactataaatgataatgagtgtttgagaaattaaacatgcttttttttttaattaatcatgtttttaaaaaaacactatataaattattaggagtttataaaaatatagtatttacctttttatatggttttttcaattcaaaagttaatatttcatgagatttttatttcttaaaagtaattattttctcataatattttttttttattttctaaatttatgtctttctttattttcctaaaaaacattatccatcttttttttttctttcttctctctatcatttctttttatgtaattttatttgtctttctttcatttttatttcattacatttttcatttcaacacttttttatttattatttatctttttttttatatatatttcttcaaatattttttgtcattatttttcttcaatttttatttctttcaattatttgtctcttttccattttcaattttgtttttatttcttcatataccctcctcttcccatagcacatgaccccccttcccaaaaaaaaagaaaaaaactactatctacctcatttgtatatatgagaaaaaaaatatgaaactattttcttatagaaaatctctctatggcaatgtgtacttgggtaattcaaattggtgggcgtacaaactctagccacaaacagcagatactagagaaaatatgtattaatgaaggatagcagttgaaagtttcacttcaagtatgaccagacaaactagggctatgagaagttgaaattgaatcaaaataaggttgattggaggaaagaagtttgggagaggcttagcatactgatgcacaaattcatgttgtcgttagttatgcttggtagattgaggataaaagataatctccagtgtatgaacatggtagataatgatctatgtttggcgtgtgatagtgatgtcaagattgtggatcacttattcttcaactgagcactgttagcagttggtcgaagaaaaaagccacaacaaaaaaggaagtagtaaaggtgattagattaagcagagtttcaaagatgttatagtgagatttctctcacctagaaactcgagaccagacccctatttagaggacacatatactcagatttc

SEQ ID NO: 221065 - DNA, 5029 bp, Cannabis indica
ctctactctctcaagacaatctctaattctcctacttcagatttcagagtcaagtttagagagagagagagagagtccaatattacagcgagtgtatgtggagggatataataagagtatcactcttgaactgattccctcaatgtgagacatttatttgtaactatttgctgtgtcgagttgtaatcttggacatatccaatcgtgtactattgactattcttaatcaataaagattcatgattctttcattattaagctaagtatattcttgtctcattcaattaagttctagttttgattttgtgattggtagtagtttgaattttgtttttcttttttattttttttttaatattattactgttgtaataatcaggctttgagggtgatcattcaccacaagattcatctttaacatttcaagaatcaaacttgaactttcaagaactagattcaagcaatcaagaatctggtttgaatggctacaacaaggtttgatgtggacaagtttactggttcaaatgatttctacctctgaagaatcaaaatgaaggcttttctggttcaccaagggatctatgaggcacttgatcctgaagccatgaaatagattgaagacaggaagaagaaacttgagattgaagccaaagcacacaatgccaccctccttagtcttggtgatgaggttttgagggaagtttcaaatgaagacaatgccttgggtctctggaacaagccagcttcaatctacatgaagaaatctcttgcaaacaaattgtatccaaacaataatttatacacactttgaatggatgagtcaaaggaattgagaaagcatctagataattgtaatagattcattcttgctctgaataatcttggagtgaaaattaatgatgaagaccaggctataaacctgttgagttcacttcccaagatgtatgagcactttgttgatacaatcttgtatgtcaaagaaactctgaccatgatagaggttaagactgcattaaatctaaagaaatttagaagaagggagatgagaaagaaaagactaatggggaagcattactcattgttaaggggaaattttccaagagagaatacaagagaaaaaatcatcacaagtccaaaaggcacggagttgttgatgtagcagatagttatgagtcatttgatacacttgtagtgacaactgatgcacttgtgatgtctaaatcagattcaggtggagattggattttagatttagggtgttcatttcatatgacaccaaacaaataactatttaggactctttcagagagtgatgggggcacaattcttcttgggaacaacaaagcatgtgagatcaaatgtgtatgaacaatcttgttaaagaatcatgatggagtcatgaagaccttgcagcagatcaggtatgtcctagatctcaaaagaaatcttctctctattggtatatttgataatttggggtatgttgttaaagttgaggaatgtgtaataaaaactgcacaaggcactaaaactgtgatgagaggaaggtagagtaatggattgtatctcctggataaaaagataataacaggtagtgcaacacctattattaactcaactaagcacaatcaagtaaggctatgacacctcaggtcaaagcatgtaagtcagaggagacttgaggaaatgaacaagcaaggactattcaaattgaagctaataggatgacttgaattctgtgatgaatgtgttttggggaaggcttgcagattgaaatttagcatggcaaaatacaccaccacagaaaggttagcttatgtctatttagacttttgggggccatctaggattccaaccaaaggtggagcacactatttcatgagtgtaattgatgattacaacaagaaagtctgggtttatttgttgaaaagcaaatatgaggctctgaaaacctttaacacatggaagaggctgctagaaaaccaaactggaaacacactcaaggttctaaagaatgacaatggccttgagtactgttcaaatgagctcaagggattgtgtgccaacatgaaaatccaaaggcataaaactgtgattgaaactcctcaataaaattgtaacgccccactagattagatacgttacaatgttccgaaaatacagaaataaagaaatttcacgatctagctaccaaaatagaatggatttctaattattgtgcactcttttgctaaccaaagtgtttattaaaaatgtgaataattaatttttttaaaaaaattaacttaaattgaaataaatatatacaatacatatttcgaaatcccgtttaaaaagttacaactctttcccaaaatacaggtatacaaaaattgtcgcttagagactatcaaaatgaagcccaatcgtctcgaagatttgaacactccaggtctgactgcctcgatatgtacaatattcatctagtttgaactcactactgctcagcctttactttgcctttacctacacatataaataatatctatgagttgacagactcagtaatctgctgacaagtcaagcatctggatacataatctaccacattcttcttcatactgcaccaccaataataaagttttaaattttgatacatcttggtagtaccgggatgtaataaatagggagtggtatgggcttcatcaagaatctcttttctaagtttaacattacttggaacacaaactcagattttataaagtaacatcccattgtctgtcactgggaaatctttagcttggccaactaagacctattcttgagttttcactaattttgagtccaccgactgagtacttctaattctttctagcaaatctaattaatgtcaaattattaagtttgcgaaccacaaactcaaaacctgatttgaccatgttagtcgccagttggggagagatcaaagttgtattgaaaaattgcttgagaccttttctgcttagggcatcctccactacattggccttccggagtaataaagaatctcacaatcgtaatccttatcctgctctaaccaccgcctctgtctcatattcacattgtgattagtatagacctcacacttttctccgtagagatggtgttgtcaaaccttctgagcaaaaaccactacagccagtttcaggtcgtgagttgggtatcgttgttcatactccttcaactgacgagaagtatgtgcaataaccctatgagcttgcattagaacacaccccagaccctatttggatgcatcacaataaacctcgaacttttcttgatctgatggtaaagctaacactggagctgtagtcaatcgttgcttcaactcttgaaaacttgtctcaaatttgtctatccacataaaccgttgattcttcttagttaactttgttaagggcattcagattgtggaaaacccttttacaaaccggcgatagtcccagctaaacctagaaagcttctaatttcagtgactggcttcagtcttggccaatctttgtcagattcatttttcttggaacaatcatgatcccatctttactaacattgcgccctagaaatgacactcgagataaccaaaattcacactttttaaatttggcataaagtttatgttctcgtagtcgttgtaaaacaatccctagatgttgttcatgttctacttctgattgagcgtacacaaggatatcattaataaatactatgacacatatatcgagaaaaccttgaatactctattcatcagatccataaaaactattagagcattggttagtccaaaagacataactgaaaattcacagtggttgtacctagtacagaaatcaatctttggagtatcatcctctcatattctcaattgatgatagcccgagagaagattaatattagagaagactgtctttccctgaaactgatcgaactaatcatcgatcctagtagatatttaaatatatatatatatatatataatacttgatgcactctcaagttttattttctttagtaatcaattaattagaaaattgagctacatttggattagatttagatatcatgatgaaccaatatttttcttatcttagtggaaaagataggaaaataattcatcaacatcgattcttaattattttattaataatttctagtgcctatccacaaaatcttattatataatattgtaatactttaatagtcattttgtgttttcatatatctctaatgatttgtcggattattactattttaatccatttatatcttaacaacttctaaaaaaaaaattgttggtttttctttactttttttgatagcttgccataacaagttttctacgattgaagagattgttagtagtacagttacgtaccttgtacaataattgaatgctcaagctacgaagttgaatgaatctgttactaacgttttattactgttgtatcttttgagcggtatagatgaaaccgaatataagtgtttttaaagttaactatgatgctgcactctttttcatctgattttagttttagttttttgtcaaacgatataggaattggacagttgattatttgtactcgtttttctaattctaattatggtcgtgtctccaataaaagagatgtacccattaaaaattgcaagctattattttaattttgctatcaataaaatttattaaaaagatctacaaaaatatattttttttggttcaaaaagtctacaaaaatatttatttattttatttgataaagatactatggtataaggtatataaattcagaatctgtaaagaagaggataggggtttagactctttctcttttatatatattcttcctcaaaatagggtcacacataaatagattagttgtttcttttttctttttatatcctcaaatcctttatctacaacaattttttttttctatttctttcttttttttaaaaaaaattaataaagtggagaatatgctttagagatcaaggagaatacctaattattaggaac

SEQ ID NO: 221066 - DNA, 4825 bp, Cannabis indica
ggagatgaatcgacttagggcggccacattcctagtcaagctttggacatccttgtgtttctttggggaaggcatgttcaacaaggcttgtattttttcaggatttacctctattccgtgttgactaacaataaatcctagaaatttcccttatttgatgccaaaggtgcactttttgggattaagcttcatgctatatctctagaccacttcgaagcactccgtgaggtcatctgcatggcccatgcatgttttggatttaactagcatgtcgtctacgtatacctccatgtttcttcccaagaggcctttaaacatctggttaaccatgcgttgataggttactctggctttttgaatccgaaaggcatgaccaggtagtagtatacccccttattggtcctgaagctagtacattcctgatccgtgacatgctttttaatctggttgtacccagagtaggcatctatgaaggataacagcttaaatcctgaggtggcgtccaccatttgatcaattagaggcaaagggaagtagtcctttgggcaggcgttgttaaggtcagtgaagtctatgcagactcaccacgtctcgttcggtttgggcactaacaccgaattggctagccactccgggtaatacacatctcggatgaggccattggttagtagcttatccacctcttgctccaaggcatcagattttactaggtcaagaggacgtcttttctgctgtaccagaggcatgtctgggttgacatttaggacatgggtgatcacgtgggggcatattccagtcatatccccttggcaccaggcaaagacatctgtggctgcccttaacgtatctatgatcttgcttcttgcctccggctctaggttttttcctaggcaaataattttagtggagtcgaagttgcacacacttacttcctcgatgtcctccataagttctatagttgtttcggatcccacacggggatccaactcgtcttgttctgtcatcatgggctcttcgtccctttgtaccatcaaaactgatagatgtactgcaacattgtaacattgtcttgcatctccttggttccccttcaccgttcccactctagcttctcgagtagggaacttaaggcataagtttcgaatggaggtaatcgctccaaaatcaaccaaggctgatcgaccaaagatggcattgtaggcagtgggacagtctaccataacaaaggtgcagtacttgaaagtgctctgtggggtgtcaggacacagagcgacagaaagccttacttttcccattgggacgagtgtcgtcccattgaatcctatgagctgtgaactgctaagcgataggtccctgtccgtaagccatatggccctgaaggcttctttgaacaatagatttacagagttcccgttatctaccaatattctagccacaaccttattgacgatgggagtttctataactagagggccacggtgggggaagcgcagtggttttgcgtcttcttctgtgaaagtgataggttagttcatgagtctgggcctttgtgctgggacttgagtgacctcccacacttcatcgtgttttatggctctagcgtaacgtttcaactcgttcatggtggttcctccaatatgaggcccaccagagatcatggccactcttccattcggccggggtggtaatccatatgcctactgaggaagcgcccttgcgagaggtactttcccttcgggcataccccctgttcctccctgaggcaatgggcctgctgctggaaccgggtttaagtgtggtaacctgcttttgatccattcatacaagtgacctagtcggattaggttcttcattttgtctttcatgtttttgcaatcgttggtggtgtggccaatgtcgttgtggtacttgcatcttttattgggatctctccgggagctatccctgtacaaggagggaggcttctaataatgtgtattttgctgagtggcaaaatatacacgctcttgagtatttgtaagctccgtgtattgggtgtactggggggtataccccctttgctgccagttgtcctcagtccgtgtactaccctttgaggatcttttactcaaggagctctacgaagctcctgccatggtggtggctggtgcagattgggacggagtttggatactcaaccccgggggatttctcatgggcgccccaaagtgtgataatgtgggagctaaaacgaggctttgattgtaccctagggtagcggagaattgtatcccactcgtttagggagtggtaggagatggagctcccacaagttgagctctaggcacatatcccaataccccggtcgggtagtatcctctgtaagccactatttcggcttcttccaagttaatgtatttttaaactctcttctgaaagtcctggaggttagctgctccctcttgttgcagcttgttccagaaaggggttcccgtacggattccagcctgaagaagggctagttgttgtctgtcatccaccttcttggtctttgaagcctcctctttaaatctttttatgaagttctttagggttttcgagggcagttgttttatattagtcagggcactgacctcgaggttgatctttcttgccgcgacaaactgtctccagaaactaacttgtaatttgttccagcagtccactgatctgggctccaactttttgaaccatttttcagcagacccgcccaacgttagcggaaagcataaacattttgcgtcattgttgacactcatgacggtcatcaccctattaaatcgggacagatggtcactggggtctgagtctcccgtgtaagttgccatttcaggcatcttaaaatttttggggagctccgcttccaatatgtgtcaggcgcatggttctcagtcctcgcaatcagagtcagagtcatcccccttctgtctctaggagaacctagtgatgtctttgcggagtattgctaatacaaccgagattccttcgttcaaggcgccttcggagactagcaatgcgtgttttttttcttttcaaggtggtttcttaagtcatcatgcttctcattgattttctgtcttagattagccgggggatacctctgaattttcctacttctttccccaggttcttggtgcacggatacgctttatcagtcctctcgatcccgagggccaagactcgctcgagggagcttgcccctctgcgaacctttcccttttgggaattcagagcggaccttttgcgaatcctgtgccttcctatttctcccaaggatcaaagtaggatttttctctggattttcttcggaaggatatcgtatagggcttgggtctctggtcttgggcctctgagtgcttggcgaggattcctcttgtgtttcctcgagtcccgcgggcatggctttgggatgcacatgtattccaacagtttccatatctttttgcatggcgaccattatctattgcctcctcttattctgttctttatgggcggccaattcggcatcatgatcagtcgctttttgccttgtgaccagcaactcagtgtagctacctttgtcttaaatgtcatacccttcgaagttttctccgtattcctcgtcgtttgtctcatctcgttcctcagagcccatatttactcatgaagcagcctcttcaccttttgtgttttggggatcctagggggcgaggttggcgtgtgttgtttcgagtttccaccattgttgttctgattctttgactgttgtttcctcaacaatgcttcccacaactctcaatgaaagaaccaaaattttgattgagattttcgacaaccaactaaatgagataatgatgagagctttgggataattaatgcaggtaatttttatgtggtttgggcattaatgagccgcagtccatgagtctttgttattaatgagagttcttatatagagaatgttcttggtgagttttttttctctctccttcaatcgatcccctttcccattttgttcacgggtatttatagagattggtagggatagttccaaaagggataacttgtctttgagtcccggtaatgtatgagcacaagctcccaagagatacaaaatagggcatgcataacctatgtcgtaggtaccataaggattaggtgagattaatctttatccttccttgattgactagcccatttgattactgtgtaattgccgtaaacgaggcttacgttgtctggcatgtcctcttatgggcattccaagacgctttccccatgctacattaaatgcgaggtgattgttcaagtatatcctcctcctcccggagacgcttcgttatatgcctagctcccggagaggaagggcatgcttattgcacttctcagggggctcacttccttaactatactagttcattttaatatgtctcagctaattcttgggtgaggtgtccttttagtccacgtgtcatatgtgtttgaggccacgtattttgggaaaaacccggggcaacagtaagtaatggtcgttcctatgaggagtatgattaatttattattcactatcaaatagaaaattaaaagggtggttttgaattgtaattaaatattataaaaagaaaattaaaacaaattaaaatttagactacgatatgagataaatagttaaaggttattgttcacccttgacaatcattcttaatttctattaataaatgtaatttcagtttccaatcaaactgttaatctcgcatataaagctgaagcaatcacttatcccaatctccatattatatgtaatgaaggcgaaacactcaataattaa

SEQ ID NO: 221067 - DNA, 1769 bp, Cannabis indica
ttttttaaaatggtacaaatagatacatgaattgattttttttatcaaaataaaacttaacaataactcaatctaaaagtgttatgacaaaactaattatattttctgcatctgtctgtgttaggaattgttttcaagttggttacattaaaaaaaaaaattattaagttcaagaccctatttatattatattgagaaataaatagtctattttttcatttaataaaatagatggtctaattaataatttttgcaaaatacaaagtctaaaatagtatttatccttatatattataaagtgaaataataaataaataatataataataaagaatacactttttagtgtaatttttaatgttgtagttgaaaaaaaagtaatttattgcaaaattatactcttttagtgttggtttaacatcaatttttaattttaccattggagataagatacccttagcttcacttcacttaacattccatgattttctaatcttttggtatgtctaagatgtgacttatgaggctagatatattagataaggtcataataagagtactatcatcatactaacatatttgtatatagagaataaagaaccattttattacacattgaagaaccaaacaacaaaaggactagctaattagctcttctatgttgcttcaaccatatctctccttaatttatttataggcggactacgcttgtgtctagagtccacttagttcaagggttcaaaaaaaaaattcttttaaaagtacatatttatttacagattttaaaaattagcactatttttacaaataaagacttaaaaatatttttattcatgtgacttactaaatttcaagagtgactgtgcataagcaatatctttttctaatctctcattcttctaaatgttctctcaacacttgtatctcaactccttttttctttttccagtttaaagctgcattattcaaaaatataaaatagatcctttgtttactaagaccatgatagagctaggggattagagggtggtggccatggcttcctttaattttcttttatattctcataaaaattctttgatagtcacctacagagggagcacttattctagttttgatataaaatttatgtatgtgaccatctatgttgtatctatgttttagttataattattcttcgagatttagaaggttgtcaatattacattataatgtgtaccctcatattataaaataaatatgtaagaagttcatggcaatacactagtgataggtaagaagttccatttatgtttattttaaacaaataaatatgtatgtagtataaatttatagaatgattttacaatgaactctcttaaaaaaagtatattgatgtaccttctatctgtttcggtatttaagaaaaaaatttaatctaattttttttattgtcgtgtacgttatagttatttaagacattctgcgaaaatttgataaatttagaataatttacaatataaagtacagtgttcaaataatctacttcaacgtatataaaataaaaaaatcacgtgtgtaacagactgtttgaagtgaacctcatttttggcgtgttaattttttctaaatttctcaatattttactgaatgtcttaaataactacaaagtacacgataatgaaaaaaaaattctcaatatttttttcaaataccaaaacaaatatggatgcatgaatacaccctttcaagagagtgcattattttccaaatttatattctcttaaaatt

SEQ ID NO: 221068 - DNA, 2858 bp, Cannabis indica
attaaaattataattattttgtgggggctttttactattttgttgtataattatttaactaaatagaagatatttaattattagtgtgtgcgtcactacgtgcggttgtattttatttgatgtattttatttcatgataattaagttataaaattatatcaaattttaaattttaatatttttaatagtgagtacctatttaaaattttattttttaactcttaataacatgaaaataaattaatattttagagtcttaatttttctaattattttgaactcaataaattataattattgggaattatactaattaaaatataacactaacgtttttttcgcgagctctctgctagggctcggggtgtggggtttggccattctatttccctcggcaacgaagggattccggtgatcggactggtgtgtactcgccattgctatggaagaactgctagctaaaaccaatcaacttcatgtctcggatgaagaagaatgggaggtggatcacagtctttccaccatgattgcaaaattcaatttacgggggagattatgttcgaaggtggatcatagcaggggcttcttgaagaacctgctggggcgaatatggagattgaaggaatcagaatggaacataaagattcaagaaaaattcagcaccggtatgttccttaccttttcttttaattcagaacaaactcaatctcgaatcttagcaagaatgccgtggtatttatcgaatgggttgctgattttgggtaagatggggaactctagtgaatcttggaagaatgatgtgaatgtattcccaatttggggcagagctttgggggtaccaattgattatctgacagagaaaaacgctttaagacttgcatcaatggcaggttcggttattacagtccagaattctgatgtatctcgaatggtggcggatggtttcttcaggtttcaggtatggatgtcaataaccaaaccggtgtgccatggctatttattaccgtgtagtggctccaataagtgggtggcatttaagtatgatgaactaccatttatgtgctttcgatgtggatggattggtcatagtcaaaaagattgttctcttgacattaaggaaatcacaggggagaatggtacgatggcaatggcgtatgggacatggctgaaagttgaaaatggggttagagatgaattccatagggtaaagggtggcaatacagaagaagtaatttcacaagaacagagcccacaaggtgtgactaggctgaatctaaacctatgtattagcaactcctttgacccattatcgaatgagggggatgagaatgtgcaattgagaagcgaagcaacaaaggggaaaggccaacaccagggtacaaaggagacaaacacgctgcaaacttcaataacagagaggcctcaacaggaggaaaccgggttggaggaaaatgctatgttgcaagatgggcgtgggaacgaagattgctggagaatcgagaagtagtgggggctggtaaactttaaaggacagcaaacaatccaattgtgatgaatgaaagccaaactctaattgatgtaccgattagtttctcaatggacatacccgggttgaaggaaagtctcccctttgcctttggctcgggtcagaactctatccccaaagagcaaagaagaaaagtggttgtgaagaaagatgcaaagaaaagaaagggctggaaagatgacaaaccgattaaagtttctcaaaatagagattcgacaattgctcagaatttggaagaggcgaaccctgcgagtcggggtcgccttcagccatgaatgccttattatggaacgttcaagggatggggaacccttggacgatccgtactttgaagtccctagtgaagcgttggtgtccggatttggttttcatatcggaatctagacttaataaggtgagagctgaaaattcgcgtgttgctttgggttttgttggttgttttgttgtggaggccaaaggcaaaagtggtggacttgttctgatgtggtcagaaaaggtgacttgcaatgttctttctttctcctctttccatattgattctttcattaggaaagaagaggatcaagggtggaggtttacaagcttttatggagacccggatccaagtaaacgatgtgattcttggacacttcttaatagggtcggtaggatgtactcgggaccatggctggttgggggagattttaatgagattctgaggaaaaagagaagatggtaggacaaccaaaaccgggatatctcatgaataatttcaggaaagctttagatgagtgttatcttcgggaagtggagtttgaaggaaacttgtacacttggtgcaatgggagacaaaacaaccttatctttgagagattggatcgtgcttgtgggaattctgactggtttgatatgtttcctgatgcaaaagtcttccatcttgaacgaattaattccaatcattgtctgttactcctcacttgtgctaaacaaaaactggatggagttaagggcgttcgatggcactctcggtttcattttgaacatgcatgggcagaggaagaaacttgtttggagttggttacgcaatcctgggaggctggcactacaagtaccacgcctagggagctaaaagaccaattggctagatgcggagcagcccttaacaattggaataagtcacgcaagaaggaaatgactatgaggataaaggaatttgaagataagattgccaccttatctaaacaagctattagtaagggttggagtcaattgaaggatttggagcggacttacaatgtgtacttggacaaagaggagaaattttggaaacaaa

SEQ ID NO: 221069 - DNA, 2086 bp, Cannabis indica
gtttagtgtgccaagatcatgtgactactcacaagacccatagagattcctgctcaaaactaaatgacagctaaaggcaaagaatcatatagacgatagagattcctctagccagctgaaaagtttgtttgtttgtaattatataagaaaaaaaatgtctacaatgaaagagattccttctctagggaaggatataatttaagtttttgtcatttctgttagtagagcgcctatatattgcccctcattcttagttgcagagacacaagtttagataatctcatctttcttaatttaatgtctttctaaattttctcttggggctctttctcttctttctctattagaattgataataagaataataccactagctaaaaaataccaattagaagatatatacagtaaaatctttatagtaagcgtcaatcacaatagtataacctacaaaggctaagagaaaaagccaatgttaagaaaagtattgaggttgattttaattatgtgtttggtatatggactgatagagagatacaatgctaatccatatagtcagtatcaacctccacatttttcctaatgctggcttttcctctaaccctttgtaggttatactattgagattgacgctactataaagattttgcttagtatatcttctaattggtaattttgagctagtggtattatttttattatttatcctaatagagaaagagcccatagagaaaatttagaaagatattgagttaagaaagatgagattttattatttgaacttgtgtgtctacaactaaaaatgaggggcaatgtataggccctctactaagagaaacgataaaaacttaaatccttttctggaaagggaagctttttcattccgaactcttttttttcttatataactacaaacacacaaacttttcagctggccagaggaatcgctgtcgtttgtatgattccttgtctttagctgtcatttggttttaagcatgaatctctgttggtcttgtgagtatttacatggtcttggcacactgaacaacagactgacttcttcaggagtcacatgtccaccttattattgacataaaacaaacatgacacaagtacagataggtatctttgcagggttcaggtgctttagcattttttgctaatgggttcatgtgagggactgaagtttatgcactcatctgtgtcactatcatcttcatgccatgtagatgaatgacttattctcctgttgtcagttgttgatgtagtagatttattattgacaggttgagatattgctagttccctatatatttcttcatcaagatcattgagtgagaatggacagtaacaagtagtgtctgggtattgcgaatcttgcaaaattagatcattatcatcgaccttgttttcatcagtgtagtgttttttgtaatgattcatattttcttctaatttttggaggtattcgggtggataatattgccatggtgcgtcatctttgagttttggctagatggcatctaaatcaccatgttgatggcaaataacaatttttccagatctcttggtttagtgcttcctattacgacaaatgagttctcacttgacttatgtattttgacacttgccgtaaatgataagtctggattggcatgtaacctaagtagtaggattgtaaaatatcgcaatgagtttgccatgtcttcggtagctgggaaattgggtcccacgagtcccttgttgcaaactttttcccactcttatgtgaggagtgtgttccattcgaataatgttttgaaccactgcaacatagcgattagatgttggtaagcaagcatgagttcaaggagttataaacagctgcggacggcagtttgaaaccctataatgtgtttttcgacaacaatagtgtatgagctggcgaggtcccactataagtccgttatctttttttgacatgaatatactacttttcatgtataagagttttccaaaagggtagtctggatagaagccaaattcttcggttatagccttgtcatatctttgaacgagagtggaatgaacttcttgttggatatatttt

SEQ ID NO: 221070 - DNA, 4002 bp, Cannabis indica
gataaagtactgaagctcaactcatagattgcaatttatttgctgattcacgaacctccattctcataagacttgaaacagtttttctaaccaaacctggaagcgaaaacatgacataaggatttgccacatcagataagcaaggatcattaagcacactaacacttaaaccagaacccatactatggcaaactcctgccaacaagaactgttaagcttccataatacttcgccaaacaaaattagaattcacacccactccaacagtaaaaaagatccattagaataatagcgaggcttgaaaataccacccactagagagtttggttgagtaaacaacctccacccttacttgcctaaaagagcaagttaaaaacacgaatgcttaccttaagtgatattaagtctcttgtttgtgaactttaaattatgtgttccttaaaatataaattcttacttgttgtataaagtaattaaatggtacgcaaagattatttgctttagttaattataattttattgtctaatttttttttaaaaaaattcttatatggcttgatctttgataaagaatggtatgtatctaagtcaattaaacccacactcttggattgattttgaagtattgtctgaaacaaattgaatttcacacacaaatagagtttgattaaattgataacgaacaaaattatggtcatgttcttaccttcctatgtactaatttccaattagttatataccaaacttatataatgcaaaagcattacttcctactccaaataataaaagcaaagtcacaacaaatcttgaaagttttgtttgccacttattattattattattgattttttctaataatccagaaatgtattgaatccaactcagttggaagctgatatttgcctttaacaaaaatgcactgcaaaaatagaatatatttacagaactttaaatgataataagattttctctgttaaatattcactaattcgagtgtataaaacaaaaatacatatttacttgtacggtcatttacccataaggatgtaagagcaccttctcgctcgagtaaggcaaattttctcgtctctgtacatcaaagggtggatgaagttctggacttctgaatcttctcgtctttggaagtggtaggcaactgcaatggcgaggaagaaaatgcagcgtgatatgaagacgaagcaagttgtgcaactgcaggaactgcaccacctgtggatttttcaataaaatattagcaatcgttcggtcaatctcatcctgaaatgatggaatggaacattgaactagttggtccaaggcagtcggaaacccttagattaagataattatgcagaggattaaagagagaaagtagtgctatttaaaaacaagactacaaaagctaactctccaagttaatgttgacatgcagaataagaattagaataagaatagtataatcccctttaagcaaaaagacaacaagagaagggtttaagtaagctatcgtgaccacccaacccagtgaatagacaaccatggaaatgaattgttaatttacatatttaagacatttgcaacataccagaaagaccgggcttaaaagcctcgtttggctaaatatttttaagttgttctttatgttcttctgaaattgaaaaagaacttttgggtgaaaaatagaaagttcttttctagtttaaaagatcttagaaacctggagaaagtgttgctgtaacaaagctctcacagaagcattacttaaaatcctagagagcctagtgttggggggtaaaaaagaaaaaattctgaagttaaaatgtaacaattccaatacacagattacatattgccaatctagttgctctcggaaggaatgtatagacctatttagaattgtttgaaccaacaaacgttgtaattgctaaaggcagacctgttaaagaatacttaaagtaaaagtaaagtacgaaaatcctgacctgctaaaccagcacatgcagaagaaaatactatcacaggcggtgcctgcatatttacatgaaagagtttagggcaatgccagagttttacaacttataaataagggtttcacattacaatatgaaaaacaaagtacaaggaaattaatttacaagtacaagttgtcatttacaaagggaaaacatatcagagaatagtaaagtactaaaccaccaaaaaacttacaccaacgagaaaatgtaaccacatcggtccctttacaaatctccgaacaattggcattactgcagcaacaaatacaaaatgaaaacatgagtttattaagcaaggaaatctcttggtgaagaaggcacaaacagaaagactttatttgtaaacaaagatggatatggcatttggaaaaataaaataaaaacaatgataagaaagggtatgaaatataaaagcaaccagtaagcccttgcatttgaattcccagaatagctaattattcagctacttggcttcctatcctataattagcaattttgcaatgcgtaaaaaaacccattgaaacgtatacctaaccaaaagcattacagctagacctcaaaattactatacgctaagatccaaggaaaatgtaatgcatttcaaagtgaaaattagccaaaactgacaaattttatgaatggaaaatggagaacaatgtcagaaaatagattgaagagtttattattcattacacagtagagccatatatccacttgctgaaatgatagaaaaggaacgagaataacctagctttcactacttagctaatatacaaatatttgacaactagcaaataacatctacagatatacaaaatattttataataaaaacagatttgattatatccttttttccagagtttaatcacattcaatgcataaccatgtccacagatcaaaatgctttttcagggttcaaacttcaaacattgcataaagctgaagcatatcaaaggaatcactaggcattaaacttgtaaacaaaaaccaatgagtcattccctactagatacggattactcaaatgcttactccaatttaatttgttcttttttcctctcaatatttataacttataaaatacccacccatcatcccatataagttttgaggatcaaagtacaataatttaactgaacatgaattgaccactcaacaaataataataactttgcaaaagaaaaaagcaaacatatataagaagctcaaaaagattaagaacatacaaaagtaatgaaaaataaacaaaaataaaagaaagaaactggaaaagagaaagcacaccatggttgaatccataaaaagcactagttgtgccaccaacagcagagccaatctataaaataaggaaaagtccagaaacaaaatagaaaaaataaatcaaacccaacaattaaaatccaaataaaatagaccaaatctaaatagaaccaaaaaaaacatagaagataaatacataccatagaaaagctatccctaataaatggccgaacagtccaatcactggtttccatatccttagtcagaggtccagcacagtgatgacatcttaaactcgtttccccttgtttgggatctgccatattttctctctaaaagatacaaattaacagtgattcattagggttttaatcttttttggctcaagacaaaaacatctccttcaaagcatgacaagtatttatcaatcaaatcaataataataataaaaactaatcacaatgaacaacaaatctgaaacaaagaaaaactatgcattccataatcattaacaagtttatatatataatgtttatgtatgaaacaaaaaagatcaaaacaattgttatacaaagaattaaagctatggaaaaggtaagacaattgaaaaatcttacagtcgataagaagggggcggtggtgaggctgagaggttatgaggccgcctgaggtgtccgtacaggtcaggtgagaacggcggcggtgattggagagagagagagaga

SEQ ID NO: 221071 - DNA, 3109 bp, Cannabis indica
tattacatgtataacaatcttatcacttatcatacaactatttactatacttatctctaatataatatattaattaatacttaatctaattactatataattgtacttagcaaataccaatatattcattattttatttaatgcaacaataacatatcaaaacacacaataatataccaaaaataatatacttgtactggatattacactttagaatgccaatttttattccaaaacttcctagaagtcacagtagatgaggaagatgggatatcctgttaatagtaaaaagaccagagctttctctagaccaaatgatatcatctttatcagagaaaccagtgattggaacttcaaggatatcctgaatatccgactcataaaaatgacttctaaacttactagaatcccaatacccagaatttgaaataaaaaaagaaagcttagatgaaggaggcagattaccatctctatagcaaagatatttgttattggggagccaatgatcaccaatggttaaaatattctctccatccccaatcttccaaattagacccgaagccatcaaatctctttcccaaaggatgctcctccaagcataaaaagggttatgaccagggacaacttccaagatagaagaatttggaaagtatctggatcgtaccttatatagataaaaccagtaccctctagagatgcctcttgaaagatccatgatcataaccctagcaatagccggagtagcccccatgatgaaaaaatcttgatgatctgcctccgcctccatcttacagtttccaatggccaaagagaagatgaaaagatggtttaatgctaagatgcaaaaaccataatgagaaatgactaacagagaaggtgagagggaaaatatggcaccaggagcaataaatgttccaagtaaaacaagtaggattggaaagagaaacaacaaaagactcagagaaattaatacccacatttattgctgtaagacaccgaatagacagcaaatgagaagaaaaaccaccacatgaacagtatgggtggaccaaaatccccattgtagggaccagagttcgaccaggagaaacgagagttcgcatacttaccatttttacaattaattggttaatcaataaatcatgtttatattttagttttaattgtttttatattatttttcatcaatatttattgtattatttcttaaccactatttgattagttagttcttcattaactaactcaatgtaaaatatgacaacgattatattgagcctattggtctatataaaagaggactattcatctctttaaacgtgttttctgacaatcaagtagcttagcaagataattattcctgattaaatgagtattgctaagtgtttttatgctattatgaaattgaaagctgatttttccaaatgtaattttcattttgttaatcatagtaacattgcttgtgtggattttagttgactgtccctgaaaaacgaaaaaaattggaataaaatgtataagtattttaattaattgttttcttaaaaaaatttgagaaaaaatatatatttacaacatatatttataggaacgtgattttgtcccgtgatgtacagtagccgttagatgggggagttatttgatctgagggctggggttgatctaggggtaattagggttaaaaaatggtaacgtaccctgagacccatctaatgtaccctgagacccatctaatgtaatacgaaatatattccgtaaacgtacatcacgagacaaaatcgtgtccctatatttataataaaaaattatatttatggacatagtattaattttgatgtaatgagtagattaaattcatatatgattgaggtcttaaaatttcaataaaagtaactttttttaagtttaattttattttatctttaagaaaattacgcccttatcactttaaatcccaatatactagctaatgaagctagatgaaacgatatgatagtttcactgtaatgggaaggggtcaactattgatctagctagtaatgaatcatgtgaagtgaaccctagatttaatattatgttgaacttttcaatattatattattgacgttttcaagggcaactaactgtaatttacacttcttctctataaattatatttattaatttatatgttttattagttgatgttgtcacttattatcaactaatggaatacattagtcttcttagaccaaacaaatttaataggcaagtggaacaaaaactattagaatacattatatatattaattaaagcagtagaaatatcccttattatgattaattatttatttattttataattaaaaatatacaaatttaaattaaataaaaattaattttagagataaatatataaaaaattatttaatatgtagcttaatattatattcttacgtatttttgaattaatacataacgactttataagttgtcatttaaaagtattaccatatgcatataatattaattttttaagaattattaaaagatattattagtacttgatactttcatcaatgttatactattattgttgtaattaaatatttttttttcaaaattgttgtaattatatattaagttttatataacttaaaaaaaataattttttaaaaaatataattaactaattataaagtgtcactttaatattaagcatcactagtaatatttaatgataataatttttcattagaccatgggtaattacaacctatgagttcgtgcaaatatctcttttatttatttatttattttgtaaaaatatttctgtaattctaataattaattatttagaggtaacgttaattaaaaaaaaataataataataattagagataaggagtgagttagaagaatgagagagtgagcctcttacctgtcaaacaagaactttagtgagtttaatataccaagatatgttgactctgaaaagtacggaagctcaaatttattaataaactatttaatctgatcttctgataccaatttaatgtctcaattaacaaataaacaaaaaaaaaaacatgagataatgtttccaaaaaaagaaaaataataaacaaat

SEQ ID NO: 221072 - DNA, 1734 bp, Cannabis indica
tattattattattattactttgagaatgaaaagaacgttgtccaatgaaattgcaatcttttagggttggaaagttataccagatacattacaatttattttattgatggaaatacattataatttatttggtaaaccgattagtagtgaatacttctttgacacaatgcgttgccctgtggatgaaactaagcacaaacaaacactcccccaaaaaagaatgacagtgatttattaatttataataaaaataacattttcataaaagaaacgatgacttgttagaagaacccatcttaacatgatgccacgtacgttgccaattgccattacccaacccaacccaccgactgtgacacatttcaatttatttttatttaattgtaactttttttagactaaacacttgcataataatgtgctatagtactactaagttttcttctcattcacagatactctctctttcttctctttaatattattcctttcttcttgaacttaccttccattctttttataagcagagtaccgaagcttcatcttcaaaacatatgagagctattatacagtagcactttgattacaataaacacagaaaatcgatcacagggagagaagaaatggctgattggggtcctgttgtgatagcagttgtgttgtttgtgctgttaagcccaggactattgttccagttaccagggagaaataaagtggttgagtttgggaacatgcagacaagtgggcttgcaattctagttcatactgtcctcttctttggtctcatcaccattttcctcatcgctattggtgttcatatctacactggataatcttaaactcactactattaacttttacacttgttatgtttttttttcttacaaagttttacacttgttatgttgtttttaataaagggttgtagtttcttttgttctttaattattattattgttgttgttgttcataataaaaattcttgttttctttttcttctttagaagaggttaaaaaaatatttgcttcttgttaacttatatgggtttgttttttgttgtatagtagtaataatcaagatgtgtgttatttgttgttcaaatttgagagagtaaaaggataaattaattggggtttttttttagaaattataacccattaccctaaatcataccgctatttaaataattttattttaaaatttgtaacaaaataatatttaatattatttattatttattttttaaaaaaaatattatttattatttatattgtattatacatcaaaaatttactttttttttagaattaaaaacatattacttaaatatcataatatatttatatcgatttttttatttattatgagttgttggtgtatatatttaatggtacaaaatttatttcgttgcatgatatatacatctattttttattttattatatttttttattttttatatataatagtagtatataattttattagtataatatttcttttaatgtatacatataattttattagtatcttatatatatttaattattattattttatatattttaattattattgtttagaggtaattaatttttaaagatttatagtgtcggttttgataaataaaatttgttaccgatgttgtttcagacgatattgtagggattaaaattactaacaccggcggcatagagggacttcatggtattggttattatgaaataatcgac

SEQ ID NO: 221073 - DNA, 2937 bp, Cannabis indica
aatttaagtacttttgtttaattttattcaattttactaattcggtgattgtttatgaactaaatcatgctcccagaatcatcgccccctgaacttttatctatgttagacttttcttactaaaattagacaaaagtctttaaattcaacaatctcaatagtttagagtaaaattttaacggtcttcaaagttcaggggacatgatttagtacatgtcaaagttcgagggacaaaaatcctaattagccttattattatcaaaatatgaaaataataattcaaaatttaatttattaaaattttatcaatactaaaaaaatcttgttaaaatttaatgtcataactcattatattaaatgcagggccgaccctaatcactcatgatctcgagttgttattaaaaattattactatataaataaaatattaaataataaaaaaaaatataataaatattgtttggtgtagtaatagagaatttttttttttaagttaagaggttagggatcaattcttaatctctatttttctatttttttttaaaaaaatatttaatgtgtaactataaatgattgaacactaaaactcttaagatattacaccaaagcactagaacttttattttgataataattaaagggtaaataccattttggaccctgtgttttgcaaaagttattaattggaccctctattttgttaaatgataaaatggactatgtattttctaaaattgtacaaataggatcctgaattaatttttgtcaaaataaaacttaataataatccgatctagagatgttatgacaaaactagtttcattttctatatctgttcaggttagaaattgtcttaaagttgattatattaaaaaataaaattattgaaaattgagctcatggtcttatttttatcatttaacaaaacagcgggtctattttgtcatttaacaaaacagatggtctaattggtaatttttgcaaaatataggatccaaaatagtatttacccataattaaactatttatttaagtgtcccaaaatttaattgtatctagactccacaaatcttagaaccacccctaattaaatagtctctaaaaaatttatgtactataaaaatttaatatattatattgttcatatgaaaaatacaaaacaaaaatatattgtaaaaattgttgagtttgtatacatagtacggtgcaatttgaactgtatttattaaatgtaaaattacaaaccgcaccacaccacatagttttacaaaaatgcaaaccacaaaccacaatgcaataaattttaaactatagtttttgtgcgatatagtactctgtaagcagtttgtacgatgtgggcagtttgataaaagcgtaaatcttatctattcgattaattaaatatctattaataagtaattctcatttattcttcgtcctattactcaaccatagcaattaattatcatagatgatcagttgaataacaaattaattaatagttaatttctttttgtatttcaatttataacaaattttaatcgacaatcttggaattatttcacaaaaacataaaaataacaaaaaaattacaaaaatacggtttcacggaattttaaacatttttacgattttttttattttatttacaaaaaatacggtctttttatgttgtaatcttgttaatttgttgttatatgtatgttattttgatgttattttcatgttgtttttatgtagttttcttgttaattttatgttgttttcgtgttattttttgaaaaaccgtgaaagaaaattcgcttatttttaaggggtataaataaaaaaaaagtaaagaaaagagtgaatttgatttgatttgttaacaaaggaaaaattaccaaataggcgaaggcgaggcagtggacactgccttcacaaaccatagcaatgagagtcttgaagacgtagtagaggtagaagaaacttttggtcctgctgtatgctaatatgcctgtaaccacaattacacttgtatttaatattaattaattattataacttatagatataataagcttcaatatatggtaaactaaaagtcaattgttatgacaatatgattgattccataatattatgaaatccattttcattcttttgaattaagtaataatatcttagattataacgataaaataataccttacgctgattctaatttttttaattattattatattttataataatgtacattgtaaacacttataagtgaatattttattgtacttattattgtttttttgtatgtagtaagtagttgtttaaaatttattttaacactataaattatttaaaattttttaaaaatttataaaagattctaaaaactataagatacataattatcaaaagaaattaaactaattaacaatgttacatagaattcatttatatataaatatatactttaaaactataaattagagcattaagcaatattatttagagaaatatgtacctaatggaatgccagtaaaggtaagtggtatggtaagcaaagctttccttccatacttgtcagaaagtttccctacgaaaggagtcatcaccagagttcctagccctataatctgcaccaaaccacattatatgtgttgttaaatgggcaagatggaaattaattaaggactggtcattttagacttataaatatgtatttatataagaatcatccataagtgtggcacttaattagtacaaattaaaataacaacaaagccaacaaacaactaatgcattgggtgagaatactttttcccagacagaaaaacaaaatatgtagacttttacaagaataagatggcgttaatttagttggaagtaatgacataaaatagaataaaaaaagaaaaaaaattatttaatttttttgtttggttttattttaaa

SEQ ID NO: 221074 - DNA, 1813 bp, Cannabis indica
ctatttcaataccatatttattattcgctttgaatctaaataaatattatacattatagatgaatcatttttaaaaaatttgagctatattaaactatctccaagcatactatctaacacaattttttagctaaaataaggagttagctttcaaaaaaagacctcaaaccatgtaaaaaagttgctcatagatagggagcaatcttagtaatagctccctatttttttcaatttttaataatattacaattaaaagtactactacttttttattatattaaaataatttatatttaacaaattaaaattaaaaaatattattgaaataattaatcataacaaaagtagagagcatgataacaaaagtgaatatcatgattcgagtagctcactattttaacattttagcttagagatgctctaagcaacttctttccaatttccattactacaaaatggaaagaaaaaaatgcatgaactaacaacacagccctatatcatgctaaaattgggtttatgctgccttttttttaaaacacaattcaacaaaaaatgaaagcttgaatttattataggcacgaggatttcatcatgaaatttcacattctcaaagaaaatgtgtatcttcatagataaaagaatcctaatcaaaccacacattcctttatcgagtgagacaagaactaaaatattaataataaaaaaacaacaaactctctttcctatagaaagaaagaagagaaataaaattaaatattatttaagtgtacaaaggcaaatctgtccaggcaccagaaacatgtccattttcacagacataagcacgaacaacaggctcaccatcatcatggtacccaaaaactcgccttaaacagaaggaagagtggagatcccaagtttcattacaatggcagaacgaacacttgagatcaatcttgttacgcttactatctttaatcgttctccatacttgtgaccctttgaaatccttgaaaattcctctgaaaagcatgtaatttcgtttctcttcgaagtgaacacacccaggtaaattacaaatgtacaagcaatctccacggaaccgactatggagaagcttattcccctgttcacgactcagagtccaaaacccagaagccaaatgtgacctcatcgatcgacaaacctttctccttttaactacagttgattctcgttctattttgaaaacaccccttttaataacctcttggttgatttggggataatcttcagcttcggagacattgtaaacggtatcgttgtaaagatcgtcgaaaagagaccaagaacaatcggaaccagacgtacccacttgaggatttgcctcaatttggcttagaaaaggcccttttatgggtttcgtcaccaatttaggcgaacccaatttgcgataattctcatcgggtccgatctcccgctcgagaccaaaatcggaattttctagaaggacccctgagtggaccaggccagggcaacaaacggtgagcttgtgaagcgcggcccaacctccgagcggctcggcggggccggacatgagatcggagacgacggaaggaatagtcttcagacatttgttcttccagcaaacgttgcgaatcagagaagagaactttgtgcaaacgcaggccacgcgtgcccagtttcgtgggtcgttttcgagcttgtagaagattttaagaacgacatcgtcggaaagctttgagaacatagtatcttccattctgtaaataattttcaacgaaatttcccttcgtaaaaatataaactttgaatgacagagagagagagagag

SEQ ID NO: 221075 - DNA, 2064 bp, Cannabis indica
agagaatgacagggtttgagcaagaccaagaccaaggtcaaggtcatgtccacgtaacgtggtatgtccacgtaaacaagaccaaggtcatgtagaatacagcgtgtcagtaggtgagcaaagtcactatgtacaacacatcaattaataagggatccaagcactcgggtaagatcaagttacgagaaaatggccaatcagtagggtctatccagaccacaccctggccggccaatgaagtctatgtgccggccagccccaagcaaaagttaagccggccagcacagataaagagcaccaaaggaagcccgattgaatagtggggtccacaacaatctttctagacaggtcaaaactcaatttcatttacaagacaactccaacaatccacgaaagtagggattcaatcccaaattatctacctatcttttaggaattattaattagttactttgtaacttaagagtagttttccctatttttaacggatatttacttaaaaattgatcttttgtaagccctaaacttatacgaacggcattaggcaaagtgagaggggacctgaattctaagtccatcaagccctagagtactctcactcattatctctctcacgctattccctagtcattagatacttagtctattttctcatctcacttgttcagaatctgtcatacatcagttctaatcattgtaatattcaaagagagccatagctagaaattacaaggtcaaagcatgtaatctatgtggtgttatctctcgaattaatacaataaaaaggagagtaggtcattacccttaaaacatgggagtcaaacctctataaattgttgtgttaactttattttttgcttttataatttacacgtggtgtttgtcaattatgaataaggctccactgttagatgaccaaatatgaggtcaacaagtagtttttgtattttcacaaaatatagatccatgatattttagggacactttgtttgcctatttgagcaaaattcaagacttgttaagttggctcaaagtctatactataaggcaagtccccagagaagagaatgttgactgatgcactcgcctgttttgcaagtatcaccctaaccaacaaggcgaatttgattcccatacagttcttaaaagaatcatcactatttcaaaagaaatagacatgttggatgacagtccaacctggatgatgcccattgcagaatacctccagactggaatcttgcttgaaaataagaacaaaacaagaaaaataaggaggaaagatgctcaatatttaatcctagatggagtaatgtacatatgtagcttcacaatgccacttctaaggtgcgccactaagacagaagccaagaggctattggtggaagtgcatgaaggtttttgcggcaatcatgctagagggcaaagcttgtccaaaaagatactcaaacaagggtatttttggcctaccatgattgaggactcaatgaaatatgttagaaagtgtgacaagtgtcaaagattcttaaagatcttgagagctccaccaaacgagctcacattgatgcagtctccttggccctttgttatgtggggaatagacctcaccaatcaacttcctaagggaaaaggaggagtacaatatatcgttgtcgcagtcgactacttcactaagtggatagaagctgagccactggtgacaataactgttaggatttatgccctgaaaaagcctgtaaagataattgtgattattaataaagagctgaacattttgatatatgcttgaatgttaaattattaatatttattattgaataatttgtattaaatatcagaaatttttttattcatatatgaggttgtgccttgtagttgtatagataattaagaccacttaggtatgaataaaataatcaacaatatattaaagttatggaatatttaattaatggttactaatactgttcactgatgcttgttctacattgcaagtaatcttgattcaaattactgatgtagtgagacatctaagtgaaggtgatgtatataatagatattatatat

SEQ ID NO: 221076 - DNA, 1961 bp, Cannabis indica
tttggatatgggtgtctaattgcttggttttccttttctctttgttttccagtgatggatttgaacgaggagtttcacctcgaggtggtggatatttaagagaatccaatagttactctcgtagaggaggtgattactgagcaggttccaacaaggaatcctgtcgaggaactacaacaagacattaccttggagactactcgagagggtactccatccaaggtagccgtaaacccaaattaaaggggaaagtcaaggctctgccttttgcgcgtgtgcataatgcttcatttgggagatagaccagaaatcaataactttcgttcgtacgatatgatggagctttatgccactgaagcttgagtgtgcaacattccagggctgatgtggcacaaactgtctattgtggaagagttgacttttgtgagcacagacggggtcagtgcttggagctgggaacacattgtgagtggggcacaccttcccttgaggacttacttcactatattcatcgcatagatcaggatggcccccttcaaattgatacctctggcttacaaactcctagtctaatggtacatcatttacaagatcaataagctagaagttcctaccctggaggagatcctgtatttttacggtgtgaagcctcaacctatgtgcataaattgtaagaagattggattttacaagttgaagagctagtcaaatgcacattaacccaccagattcaccttacgctgccccgacctctgcgagtattggttcttttcaacttgtttcctagtgaacaaggtgcctacactccatttaagcttttaaatcctacgtaaatatttttattgtttttttccttcgtttaaagtcttttctagtttaactgctaattgggcatttctatttctcttttctcgcaaagcttgagcctcgtagtcctgaatcataggaaatgaagaaaaaggtagcctaatacaaactctttattgaagtagagttgagagtttaaggcttggtcagtacatagttgcttcgtcaacaaaggctaatcaccgatttccaaatcatttacaacgtgagtggtaagggccaacgtcggacttccaaagaggctaaggagataatagctctctaccttgccaaaattatcacctaggctactaaggaggataagctcctagaagaaaatttgacgcttcactaccctaatccctacatggaggaggaggagattttttaacggtttattgcagcgtacctaaaaaaatgtgccctaggagccaatactttcagaagaggtaacatgcccttccatcgtacccctagcctccatagtatgtcttagattgaccaagggaatttgatagctattttttaaatgtagatcttcttaagtaccctatgaaggattgcatagatagtgtagattaaatttttaggagtcctagaaacccaaagtcatctccagatattgttagagtggagcctttcaagactatgtttttccctgacttcagagagtatggccacttcattggctgggaggacataatcttctttgcttgtaaggaaccatataatttctcactgaatggttgcacccacccacacactattagaatatgttgccatgtgctaatttttctttgactttactgctttgaaagtttcttgctaactgtgtgattgttatgtttgtagaaactcgagaagagaagattatgaaatcaatcaatgataggatttccaaaactatttccgaggtggagggtgccaaatggaaagggaaggctaggactagggccaggagcacccgtaatttgcagttgtcagccttgtcctagtcaagctccacgaccaacatgccaacctcttctgccctttctgttgggttttgtgccctaaataaaaccaatttcaatataatcagatttacttattaataaatatcagaaataacattt

SEQ ID NO: 221077 - DNA, 3467 bp, Cannabis indica
aactgggccgatacttcaacccagttatttatgggccatatttcgccctttaatttattttttattttattttttttttaaatattacttttattaacgtaccctgtaagcttcttttagcgctttattaaaaaacctttgaaactttttcatttccctccattctctgagttcttttcactgtcccaactccaatccaatcccctctgcgttcttcagccacagaaaatggagcagcagagaaatcagaagggggctcaagaacaacaagaactcgaggaagttcagcatggcccttttccagtcgaacagcttcaggtaaaatctccactgcttttcaagaaaatgccctcgttcaaattcgatatttttactctactgtactcccatttcttcgtttatatgactgattcaggcgtttacggaaatgggtttccttttaatcaaattttgacggcctttctaacctacaatctcgttcttttgaccctacttttttctgggtgtccgaattttgttcacatattgcccaagatcgtatttttagttagatttttcaggtttatatgtatgtacatggttatatatacagtaacatgtgtttctagaatgggttatttcaatctagatgtttgtctattactaattacgcaaaaccccatgcttttgtttgattagtggtttgtattcgttgtcattttcttaattgaacacttattatttcaattgatgaacaatatttagaaaagtagttttttttagtggacaaatgagtagtgtagtgatgcttatttttaatgttttcaatcttcaactaaaggcgtccggtatagctgccattgatgtaaagaagcttaaagatgcgggtctttgcacgattgaatccgttgcttactctccaagaaaagaacttctgcaaatcaaaggaattagtgaagctaaagttgacaagatcattgaggcaggcatgtcacttgatgcctaattgaccactctttatatatcagaattgttgctacagttgagctatttttttaatacagaatttcttaatttcttcattcattgtattgacagcctccaaattagtgccattgggttttactagtgctagccaacttcatgcccagaggcttgaaatcattcaaattacatcaggatcaagggaacttgacaaagtcttggagggtgagaatcctcacatgttaccaaaatctagttcaatttttaacttgaatctgatgacttagttttccagtgaatatattctaatatgatgagtaataaagctaattgattttctgtcaggaggaattgagacaggatctattaccgagttatatggtgagtttcgttctggaaagactcaactctgtcatacgctctgtgtcacttgccaagtaagtgttttaattttgccaccaatcagatgggtaatctttgtagaaatagagtagtttagtgtcaagaaaaatcagttgaccatatgactagataagtactttaatctcccataagattacttcagaattcattagaataaataattttgataatattgggattcacctagttgccggtcaatttattttacaattgcttgcagtataggtttaatcatttaaaggtacagttctaacacttggtacttcagcttccattagatcaaggaggtggagagggaaaagcaatgtacattgatgctgagggaacatttagaccccagcgactcttacagatagcagaaaggttatatatatgactacattgatatgattgtgtgaatatgatattgtgccatgtgtatttgagggtgttcactgctgcaggtttggattgaatggggccgatgtcttggagaatgtggcttatgctagagcttataacactgaccatcagtctaggctcttgcttgaagcagcatcaatgatggttgaaacaaggtatgataaaaaacgattgctcaaagttgtcagtatcagaaaatgttcatgaaagtgatcacagaagggaatgttttttttcccatgaaatggaatgtactcattagagctgatttgggcaaaggtgataaagttgctggaaagtctaattatctaaagctaatttttggctggtagatttgctctcatggtagtagacagtgctacagctctgtacaggactgacttttctggaagaggtgaactttcagctcgccaaatgcatcttgcaaagtttcttcgcagtcttcaaaaattagcagatgaggtaaagattcttatactttgggttgggtccttatatgcctgaaagacattttttttttggctcttcctgttaagatttgctggttttagtgttttattgataaatgagaactctactcattgctggatatgcttataaatatatatttcttgtttgtttaaattacttgcataagcacatgatgttatgtactccattttttgatcttctttgttttaatcaacttaattattgtatacaatacgactgtagtttggtgttgctgttgttattacaaaccaagtagttgcacaagtagatggctctgcactgtttgcgggtcctcagtttaagcccattggtggtaacatcatggcgcatgcctccacaacaaggttcgttgtagcgagcttttttacttgtctcttgctgcaaaaagttcaggaaaatgtttcaatctgatcattattgattttgtaataggcttgctctacggaagggaagaggggaagagcgcatctgtaaagtaataagctctccatgtttggctgaagctgatgcacgctttcagatctctacagaaggcgttactgatgtcaaggattgattcgattcaagcaattttcagacattttctaatttcaaggaagcaagcactgtcccatgtttacaacccttgtaaaattttggttggtggctgttagtttcttttgaaattttcctagagctcttatgaaatttgaggagatgttataccctcttgtacttgttccttcccattgttttatgtaatatagaaaagagatctgcctggttttttattttttatttatctgaaatgaaagacaaatacatcgtaagataagaggcatattcatattctatcaataacagaaaatgcaatgcaacatactagtaaagtctctatatggggtaatcattgcatgggatataaaatcagaaaacagaatgaaaatgatcacaaacaacatttaactctattatctaatcttagtgtttaggtttcgcctgtagatatatttagtaaaaattatactaaaagaactcaattttgttaaactacatattgaattttggcataattttaaaacatataatagaaataccacacagatgctactttactaaaaatgtgtacactcttaatagatatataaatagtattaggaaaatttgtgtttttaagcttaattttttatctaattagaaaaatattt

SEQ ID NO: 221078 - DNA, 1556 bp, Cannabis indica
ttcagctagaatttcttttgagagagtttgtagaaatgttctttggaacttaggtggtgaattgagaaaatggtggggatgattgtcacaaatgggcaactgggtatctctaggtttgaaggaaatggcgcttttgcttttaattctcgggggaattcgttctctccatctgagtcccctcttcgttggggacccagtttgggagtttatttgaacgttaatgataggaggcttagctttggaacaatttgtaaagctctgccgagaggagattctaatggccaattgattggtgtatcgcttccaggaaaggaagctgaatttaggccatcatttaatgagtacttgaaggttatggagtctgtgaaaactgttagagacaagagacaatctaatagttttcaaaaacaaaaatttgttgataagtcgatggaaacaggttcatctgaagggaatgaagagggtgtgaaattggaggagttggaagagcattcaaaccaagaaaaggattataaaagatatgagtcactcaacagaagagattctttaacaaacaaaaatggcattaggaaaaacatgacagatcccaagagcaggattggcatgaaagtaggcaatgtgattggaaaggaaacaaggaagtcaggtggcagggattcaatggacagaaattggcctaaatatcagactggtagagaagaggtggagttagatgagaaccacttaggaaggaaatttactaagctagagggatataagagcactgggaaacgaatcccatctcaagctcatgacaatagtatggacatgggaaggggatataggaatgacattggttttaacaagataaatgagaaagttgggaggaattatgttgaagatgacagtaaggagattatgccaaagcatggtaaacaaactaagagaactaatgattttggtaaaaaagtagatgacaataatttgagtatggaaagagctgcgttcaggaatcttgatgaatttggtgacatcatggaaaatccccgacttccacgaaatgtaatggaggagaggattcagaagctggcaaattcgtaagaaaatttaaaccttctttgccctttaatgtaaatattggaacaattgttttttgatagcttatgtatctttgcatgtctttctagtaacagcctaaaataaaatgataaacaataaaaaaagagcatccaaaagcctactgtactagaaaattgaagtactgatacgaaatggtctctattcaaattttatggattcagtagcagttcgaaaggttatttggtcttactcttcacttgcagaaaaaatcccaagaccaacctttttggttgaatgagagctatgttgtttaattaaggaactgaaaatcatttgctaaatgcaacaatggttatgttgaaatttttatgtttattttacgcattgttgttagtccaatacatatgtacatgtaaagtatgcaggacttagaaatcccctcaacattgaagaatacatcaccataatctttagaaatttctgcattaaaaatgagt

SEQ ID NO: 221079 - DNA, 2165 bp, Cannabis indica
actctacagccttttaaaagattagatgactcaaaccttcttatgatagaagaaaatcccccggcacatatcaagaatagataggaggacaaaggatcaccttggcggatgcctctttgaggagtgatattgctgatttctttgccgctattcaggattgtgtactgcacagttaaaacacattgaagtactagttgtacaaagtgttcatgaaagcccatcttcttcatcatagctccaataaaaggccactcgacacgatcatacgctttactgaagtcaagttttaaggccatgtagcctttctttccatgtcttttcctcttcaagtagtgcatgacttcatacgatatcataatgttgtcagaaattaaacgccccggtataaaggcactttggtactctaaaataagctgcgggagaacctctttgagtcgattagctattactttggaaattattttgtacaggacattgcataaagagattggtctaagatcacccatagtcataggattctttttcttgggaattagaaccatattagtgtgatttaaaccagtaggcagcagactagtacagaaaaaattcctcaccaactttatcacatatgctctgacaatgttacagttgcgtataagagtattgctatttagcagtttcttctataagtggcgtcctaagattggttaacaatattgcctaaaagctatttttttaagttaaatgagacccgatacttaattacatcaatagcagtatgacatcaaggagggtgctaggcaccagtggtacattttagcaattttctaaaaacaatataataataaatataaaaacataacatttattgtgatataaattttacatcatattacattataattcaaatttaaattactttttattatgtgacatatttgtattacaatttaacacactgttacaataaaatttaaacaaagtaaactatattgtgcatttttatcacccatttgtatctccacgtagatgctctaaagtcatatacaatttaacgacttgttattaatgacgcgtttactaaactataactgaaatcagaataatcaatgggagaaatgaatcggtttaaaataaaaaataatcgaaaataatattttattatgttgtttactaaattgtccggaaagaaaaccagaatcatattattttgtttacataattaggaaaggtaatcagaatgctttaatttgacgaaattgtcattattagaacatgtaattattttttgtttatagatttttaaaggatatatttgtcttttttatttttaattaataatattaaaattaaaacaaactaagttaggaaagggaaatgtattctttataaaaatgggaaaaaatattttcctttgttttctacctaatttgtgtacgccctactactttctctatttctaaaatttagtaaacagttgtatgaaaatcaataccatactatttattccaattctctttagtaaacatgtgataagatttttatatgtatcaattttaccctcaagtcaaatttttgactattagtatttttaaaaacattaattaaaaatatgtattataatcaattaatatgtatataatttttttttatatattttcagtgggtctgcccatggttttggtattggcttcttcccaatgcaagccaattttcgatacgaacaacttgttaagatgaagaatttattcgtacgatatatgcgtgtgacattgtttataagataaaatataaacatatatattttgttttgtgacgagtgaagatgaaaagatatacaattatataattctacaataatttgattaagttttaataatgggataaatactatgtttggtgtaatatgattagaaaaagtaaatactattttgaatcttgtattttgtaaaagttaccgattagaccatttattttgttaaatgacaaaatagatcatgtatttttcaaaatggtaaaaataagaccatgagtttaatttttgacaattttttttaatataaccaacttgaagacaattcctaatacgaacaaatacagaaaatataaacagttttgtcataatacctttaaatcggattattattcaattttattttgtacaaaaaatacagttcagggtc

SEQ ID NO: 221080 - DNA, 1801 bp, Cannabis indica
gtacttcaaaagcattatcaaaagagagtctagttctaaaaatatcacaatgtccagctaacaacttagactccataacaaaaagaaaactaggcttatggttattaacaacaagggagagattacagaatgcccgggaactccctaacccacgggcattcaaactcataagtatcatttttctgggcggggttgctccgcaacacctgcctattcaaaagaggaatcagcagcagttgaggcatcattgataacaggtccagcacgagctctcttgagaatgtttctgagagagtctcccaccatgacagagtgaggaataaacgcagagagcttcgcaccaacaatggctttacctttagatttctcagtaatcctagccatgctctgaacattttcaggattaaggtcagcagtggtgtgcacagcagtggcaattgttggagaagcagcttgagtggcatcacagaagacaccaacaggagcatcacagctaaggccaaaactaaaggctggggtagaaatagttctctcaaaagcagagagctcaggagaagagatggagctattagcaatgaatccatgtgaaatagcctcatctctcctaagagcagcaccagaagaggatgagccagcccccacatcctgagtagtcaggaattgactaacagcaccagcaagactttggtcaacttgtccatgagagagtggcagctcctccagagggtaagaattagaaaagatcaaaatggatttcgcttgaaatttgttttagcaggggctttttagaggaatttttatagtgcagtgggaagggggtaagcgatactcatcacactttttttaaggataagagacacatttagtgagagtgtgatcaaacataccacagtgaaagcaaatattaggcagattttgatatttaaagtttagccatttttccttgtggatattcctaaaatcaactaggatgcctctaaggatgggtttggaaacatcaagcaaaactcggacccgaaggaacaaaccaaaaactttgagaagagtgattttatcaacctcaaggaaatccccaacttcatccccaatcattttggcaagcttataagacttcatgcaaaaaggaatggagtgaacttgaatccaaaaaggagagtatctaagctggttagggagaagagtgtcaaggccagcagggttagcactagtgaccagacaatggtcaaaatgctacggttggccttcaatcactctcctcatgtcaccttcacaaccaaactcaaccataaacatcccattaccatattcagagaaagtaatgggagcacgatggatccaggcatttctcatagcctcttcaaaccactcaattttaatggttcgggtagtaaagactcgaaagacaagacagaaagttttcccaatctgtatatcccctccaacatcatctagatgttcatgaactactgcttctttttcagtaagagataacacatgagccatattatcagcaatacgctccatttcccagcagaagaaagacaagcaaagttcccaataatattcagagaaagaaaacaaaagcaagcaaagaagtaaagaacgccaaagaacccacacccttaaatagctagaatgagagaaatacctgcatgttgaagtcttagaggagaagaaaacttcagtgataatcatcctatcctacagaaatcctagaccaaatccaagatccttaggtgcaatcatcgtgctcctccttgaaagagccaaaatgacggcttctattaatggagatgggata

SEQ ID NO: 221081 - DNA, 3264 bp, Cannabis indica
  modified_base (63)..(63): a, c, t, g, unknown or other
  modified_base (169)..(169): a, c, t, g, unknown or other
taaatcatgtgaaccatgcaacatagaattatttatgatcttattattagtaaatctgattanattgaaatgtatttattagggcacaaaaccaacaaggtcttgatagaggatagagtaaaaagtataagatttcctggggtgttgggacactcccacgtcaagatgnggtagataggttttaaacatgcaaggatctggtaagaattttgggcaagctaaaatgaagcaataccgaggtagttgcagaattccttgaaataatcccttaggggaagaactgctctagcccttatatgttcaacaatccatgcaccaattctagagggctcatcgatgctgcaaccttcatcttgaactagactttcaggagggaaacaactaaattctccctgggccattgatcaaatgcaacatccttttttgttcctaatgctacacaatctcagaacatccccaacataagggccaatggacctgaccctggactctattaactagggcttgaaggtaacaaaatgattctgtggtgtaacgccctatcccatagaaatgccacgtgtgtgattttctaaactaatttaataataataaattaattaagtattaaaaaccgtgataatataaaaaaaaaaaaaaaaaaaaacaaaaaaaaaaactcgactagaataaatactaaaacagagatataacgacattaaaaacgtattccgaggatccagttgtaagagttttacaaaaaggataagtacaacgataagtcaaaatataaaatcaaaatacatggtaaatacagctcgaaacaactccaagaaaatcagcacataggctggtagagtcaatatgtacattagtggagaagactgtcacctcatggttgatctaactttttttttgcctttacctcctccacatagcacccgtgagtcacaaggactaaccaagaaaagtaataacaataataatataaattattattcgagtacttagacaatcagaatcaaacaatcgtgcattacacatatgatgaaaccccaatcactataggcatctgtcacaaataaacatcaatataaagatatttagtaataaaaaactattatatcaataatagaaattatactcatctaataatataaattatatatattcatttaatattatatatttttataatttatatattttttattcatataatatactctttaataaatttattttaaaatatttaattcaaatggtgtctttaattttcaaacaaaatattttttgctaaaaaaaaaaaacaatcaaaaatataacacaacatatataattttgtgaataattcaatatttatgtcaaatactaaaaaattaatcatcaatatctatatattaatataaaagaaatcacacaaggagctttctataattttttcttcatattttttttaattttttactaagaaaacgtgattattcaactaaatttattttttgtaataatcccatattgtttagaaagtatagtgggacattacatatacactataaataaattttttctcatagcattttaatttatcccaaaatatgtatttttttttcagaaaactaattgattaaattattcttattcaataattaattataattttttttcttggaactaggaagaggatttttattcaaccatcataaaacaaatacacgctgccaagcagttacagaagatcagaggctattgataatagccattacatttttatctcttaaattaggcttcaaagagtgacaataataaattctagccttacgacagtatttcaaatctttttaatatgtctcaaaatatgtatttttctccttgactaattgattaaattagttttattcatttattaattaaattatctattccatagtcgattacaataatatatattttatattttatataaaaataaaatatatttttcattttattttttaattttgtgagaattttatattatttttcacatgatttctatatattaatataaagaaaagcacgcaagagtgtaggtgactttctataattttttcttcatatttttctaattttttaagagtaccgtattaatgtactaagaaaacatgttaattcaatttacttcttgtaataatctcacattattagaaagtatagtggaacattacatatacactataaataatttttttttcatgctattttcatttgtcccaaaatatgtatctgaacttaagatgcatcttctttttcagtgtgagtgtcgtagtactaacttatgaccaatgttaaatgataatttagaccctatattttataacatgaaatataataatatcacaaagttaatattagtgaaaacaattaaaattaagatagattaaaaatcaggtaacaattgttaatgagggttaggaagaaaaagttttaagattagagtaaaatatttgattacagttagacttagtgtatcgttatattttatttagtaaatattgagaaatatggcttcttattagtaactttattttctttgtaattaaaatttcacatagattaaaaaaaaaatacataattagtatacttctaaattataaataaagttacattcattttaatttgtatatggctaatttatcacttgattgcctaattacttataattttttttttaatattttgagttctcaaatcaactatatatatttatctaatatatttacatactcatttaataaaaaaaaaatactatatatgaatttcttaaataaaaaaaataatcatatattaaatttgattttcaatgattataatgattgtacgatgcactatataattataacgatcacgcgattgcacaaccaacttcatacggtatttatcattttaattattacatgacagtaaaataaatatacatttttatatagaagcagttagtcatatgaatcgtgacctcccttttcatcattataatttaaggcatatatttcacctccacataatttgttaaaattaattctcttataaaacatttcatatagaccaattttatcattaataaatcccttatttttttagattctaaagcttttttagagttgtcatcttatgtaatgaaatgtaaactttcataaatagtagttatattgtttctttctattaaagaaaaaaaagggtctaaatagtttttcaaaaagaactacatcaaaatgacaaatctaatttattaaatttagaaatagt

SEQ ID NO: 221082 - DNA, 1665 bp, Cannabis indica
tgagtaccactaagtgttatactacaaacacttcgtacatgcctgtactggtgttggtaacaccgtgtcgtactctataaacatcgtacgcgctataccaatgcactcagtactgctaccatactagtgttggtagtgtaccaatcagaacacgcgtgcatatatcacacatacacaaaattgcaaatataacatgttctatgctattcttatctcatttctgaattcaagagagtttgttgacctgaaggaaaaacatcgtgttggataaattctctagtcacatttatgtaaacaggtaaataacacgccaaaaccctgttttggggaacccaaaccccaactaagggttctgctattggtaattattataacataaccataagtattaaggaaataaccaagtaaggcattgaaaaataacacgaatccacaaattgaacttttcgggatacctgcccctgattcggttaaccggtttgcaccaggtaacccaaacaagttgaaaacttgtccaattcatgtccaaacctcaccaaaccttctagatcacctataaaaacatcaaagggtgtttccaaccgaaaacaacaataattattcacaaaatccaagcatgtcattaatggtttgagtattccaactcaaacttgttcattcaccactaaactcatcaaaactagcatcaagaaatcaatctcaactcaaattgaatctagaaactgaaccaaaagtaattctaaccctaatagcctctagaactcaaaatagcatgcccacatcaactaaaacttaaagaattcacaaagtaaaagtttctagggtatttttcaacttgaatcaccttgacttcctaatgaattccagaaaattgaaggctagttgtgttgattcctctggttgtatgggagttgagcaagagagagaaaagggatgaaatttctaaggtttttcttgatttttcttattttttctctaattaataaattccaaaaatataattaatttaagctgaaactaagtgtggccatctatccaaataaaaactagccacctaatccccttaataaaattaccaaaatacccttcttacttgtaacttaagcaatattaatcctaggggtaaaattggtaaaagcaataaccccgctcaaactcgatattctaaatatctcaaatttttttcctactatgaaataggttcttaacttactcatgtgactcaacgaccatccatcgcatttttcattgtcgccgagcaaaaatcataagaaattgcataattcatatacagcacaaataacactcctagagttttataaaatctttggaattgagacattataactctagtgcccatttctaataatgggacccacaataaaataaaatcataaataattataaaaatgtaaataattcatgctaatttcctttactaatccatattctatcatgcattcattacaattatccccccattaaaagtatttcgccccctaaatctaacctgaatagctctggatattgagtcctcatgccagactatatttcccaagtggcttcctccaccttgttgttcttctagagcaccttgaccaaagctatagtcttattttgaagaaaattttccttcctatcgaggatctgaactggctgttcctc

SEQ ID NO: 221083 - DNA, 1824 bp, Cannabis indica
ttagcgtgtgttggtgtaattaagtgcttataagaggtgtctcttgaaagttttgagttggaattcaaattatatattgtaatatataaatgtttaaattaaaaataaaaatattttgatgcgagagttggagatgttaataatttagtattggtggttttctaaattctaattaatagtaatccaatacttagtagggtgtagtattatatgatatcatacataatttatttaactatctattgagactaatataatgattgttgattatatttgttaaagtaagagagatattagaattttatatggactaatataattacaaatataattttatattcacaatcatgttatttttttttttcttgagagacaatatgagataatttcatcgcagcatctttcaagatacaaagatttaatgaatcatgttgttttaatttgagtagcctcatgaatattgtaattgaataaggatttacatctaaaactattttatgagttttaatattatgaggccaagacattgtatttgacaattttaaactttaatgatataagagaagacgaacatctcaaagattttattgagaatatcaagtttaataagcatgtatgttctagctatcattgttgataagtatataaagctatctatgttggagttttaagttgacattagacaacattaaactattatttaaggaataattagatatatcattcattttgttgctttcgctattattattgatggcctataattggccagattatggtaagaaacttcatatgagaagaaataaagataaagaatcaaaattgatgaacctgtgattccatatacgagataagtttaatttacatgtacctctaaatatataattgatagtcgttggtagcttaatccttatttggagaatttaaatagttatatcatgatttgtaagctatgatcaagggtgagatctaggcttaatccaaaaataattaggagattttcttgatggtggctaattttaaaaataagttgtttgattgtcaaaataaagtgaattaaagcttatagctagcctctaacaataaatttgtttgttagacactattattgaataataaagtgtaaggatgtgggaactaaattgttgttttaagatcttgtcttgttaaatgaattaaatcttgagaaggtaactcacaaggacacccgatttcaatagactaaattcattttgaggaaaaaaaagaaagttattattataattcttaatatggtcaatttgaaacattgtcgtcaatccacactatatgagagatcagtaagagcaatgatatgtttattttgtcacttgatataatacattgctcatattttatgattctagccaattttggagacgaattaatgtgttatttatctgtcaaataaagaattcttgataaatcttatctaatctaaataattaaatttttcatgatgagatcaacagtagaaagattatctcatagtgtgcattgactaactattattgtgattaatgtttcgattttatttagaatgtttaagtagtctaaagtcactactacaaaaatgaccttttagtttagtttttaagtgacatataaaacatttagtttggttggtgtcaccgacactatagctatagacgcaaatagtcttattttctgtttcacttagtaaccgacgctaaaagacttttgcttcgattcataatcaaagcaaatagtaatagactgatgcaaaatagatttttgcttcagttatgaaccgaagtaaaagagtaaaaagaaaaataaaaaaat

SEQ ID NO: 221084 - DNA, 1225 bp, Cannabis indica
aaaaaaaaaaaactcaaaatgatagattcaatctttatctaaagcactccaaaatgtcgtctgaccatcaaaagttgagtctccacactcaaaatcccaattaaaacctaattcctacatttttccaaagtgaaaagataaaaatagtcttcattagaagtttctcttgatatgtattttcaggacagttacgcggctgctccaaatacctctctgattgcacaactcctccaaaaacaatatttttctgttttttagcattctttgtcaagtcttccatctttttacaccaattccacttcaagtcctccttaatccatccgaacttgaaaacacatcaaaataaacgtaaacacgcacaaaataaacctaaacaaactgtacttctcctaaattaacaacctaaagtaagtcaaaaactcacttatcaaacttcttcaaatttaacatttactcgcttaaagataaattaaatactaaacaaaaaaaaaataataatgatacatatgaatcaagttaacaacaacaaattatgcctcaaaattatgaatatctactcatatagtttcataaactcagcgatcacaacgatccaaattttcaaccgatttatcttttgacttcactctaatccaaacaaatacattctcaatcatgatcaataaataacttgaatttaaatcaatttatagttgttgagtatttattctcaaacaattaaattactatctcatatgtttgtattacttactattctccactaagtagacaacccatgctcaaaatttaaaagaaccttttaggctcataacaatggcttaagtatatgggtagataaaaaaagtcattggagctcaattatgctattaacattacaactacacagatcacacttgatatcactttataatccaattacaatgcccaaatcactatcctttctaagatcaagaagtatccatatgaatatttttattttcaactacactctcccaaacttatttttcaacacgcacacacacacacatatatatatatatataaagagtgtagttactctttttttgtttactttcaaaattttctcaatctttttgaaaaatcgtatttttacaaatgccaataattataataaattttagtaaaaatactactctaacaatttgcagcagcaaaacgtaattctgtcactgcagaatatagttttgcagaaataaaccaaaaa

SEQ ID NO: 221085 - DNA, 5714 bp, Cannabis indica
atttttctttttcaagtgtaatctagtgcatgaacgagcaagaagaagaccttgaacttgctcctattgaccccgaaattgaatgcactttcagacaaaggaggaaggaacaaaaggctaaaaaatgctgcaatatggtcgatagatttgaagttgggggtgctcataatggtgccaaccctattactttggccgatgatagagcctgagcaataagagaatatgcagcccctatgttcaatgaactcacagtcataatccttgactagctctaaccattgtctctatctgatatttaaatattttttagtaaagaagtacttgagactttggtggtctgtatagatctcacacttctccccctgtaagtaatgtcgccatatctttagggcaaacacaacaatagcaagttctaaatcatgtgttggataacgctgctcatattccttcaaccggctggaaacataggctatgacccagtcaacttgcatcagaacacacctcagaccctgtctagatgcatctcaataaacaatgaacgtttcttggtctgatggcaaagctaacattggtgttgatcatctactgtttcaacttttgaaagctcattcacacttatcggaccatacgttaccactggttcttttaagtcaattctgtcagtggcattgaaatttttgaaaatccttctgcaaatcgtcggtaataccctgtcaatctaagaaaaacttcaaacctcaataagagtccttggcctcggccaattctcaattgactcaattttcctcgaatcgaccataattctgtcttttctaacaatatgacctaaaaagaacacgtttgataaccagaattcacactttttaaaccaaccattttgtaaacgagcattccaccagctctcccttttagctaagcaatttaaaccaacgattttgtatattatggagactaaactccatgttggtgctataaataagtttcctactaagcttagtattgctaacggtcttgaagtcccatgggtcgaccttagtggcggcctccttttgttatggacttagaatgttgatgtaaccctactttcttataatataaattactttcactattatatccgttttcccaattattgtcctttcactttcactggtttttatggggcttcgcatcacactaaccgcactaacatatgacaacttcttcatcgccttggagatactattcataattcgccttgggttttaatgggcaattttaacaaatttctctcacctgctaacaaaattgggggtgatattaacaaacagccttcaatgtttttcaagaaattcctcgatacattcactcttcaccccattcatggtcatggcaacccctacacctggactaacaaacactctcatcacacccacatacaaaaaagattggactggggcatctcaaatctcatgtgggtttcttcttttcccaaggcgcatctcctccatggagacttttttggatctgaccaccgcattctaaccttttccctttatcaggatgaggatagcttacgatctcataagcagtaattccattttgataacagatggcttgcagagaatggatttgaggactgccttcgtaaggcatgggcccccaatcatgatttatgtgaccacaatcatatctctattcttacaaacaaacttcaacattgtgctgtcactctctcacagtggcagaaatcgattgggcctcctcttccgcaacaaatcaaaaatgttcaatctcagcttcaggttgcccaaagtcattcccaaccttccaattttcagcttcttctctgtcgccaacttcaaggggatcttgataggcttctctataaggaacaagagtattgtagcagcgcttcgaatcacctggcttaaacttggtgacaaaaatacttgttatttttatcaattttcctccttgcatcgccccaaaaacaaaattagtatcactcatgtgccctgatggctcaactatcaccgatactcaaagcattttgacagttattgaacaatacttcacttaacttttcaccggccgaaatcctactagagagcaaatggattatgttctttccgcaatctctgacaagcttactaatgtggaatgtttatgcttggaagctccattcacatctgatgaggtccagcaagcaaccttccaactggctggcgataaatcccccgaaccagatggctttagtggaacattcttccaaaaaaactgcatctgcttgggattgatgtcgttcaagcaactcttagcttcttgaatgacaatgcatatttatcgcctttcaataacaccatcatcgtccttattcccaaaaagagtcaccccattccctcactgattatcgaccaattggcctttgctctacaatgtatataatcatctcccgcaccctagtcaatcgcctcaagccaattctttgccatatcatttcatcagctcaaagtgctttcttactaactgcttaatttcaaacaacatcatcatcgggcaagaagtcactcactcactctttgactcatcgcaagcatggtaaagtgggttggatggctcttaaactcgacatggccaaggcttttgatcgtgttgaatgggaattcatcaagaaggtcatggaaaaatttcacttccctttgaaattcaccaaccttattttgacctgcctctccactgcttccttcatcttttctattaatcaacaacttcttagatccatcattccatcccatggcattcgtcaaggcgactcgctcttcccgtatctcttcttattatgctctgagggcctctcatcactcatcactcaaaaagttcatcaacaccttccaaggaagcatgctcttggcttaaagattgcccagacggtgccaatcatatctcatttgttcttcgctgaagataacatctttttagcgccacctctcatgttgctgccacccacatcaaggaaatccttcatgattatagcctggcttcgggctaacttgtcaattatgatatatcctcgctctatttctctccaaataccactaatgcgatcaaaaaccagatcacctctctgctcaatgtgcccattcaagactttattgagcaatacttgggtctccctcaatcttttggtcggtcaaaaaaggaaacttttacctaccttcaggatcgtgtgtggtcccatttatatggatggaactccaccttcttctcaaaaggaggcaaggaaattcttctcaaatcggtggttcaagcgatttcgtcttatgctatggcttgtttccaacttcctcactactttcacaaaaaaaatggagtccatgatggctcaattttggtggggaggaactgagcacaataggaaagttcattggaagatttggtcccacctttacaaatctaaattccatggtggcctaggtttctgatcaatgaaagctttcaatcaagcaatgttagccaaacaggcttggcgtattcttcaggctccgtcctctcttgtttcccatcttcttaaggcctggtactaccctcattctactttccttaattccagtaaagggcaccatccttctcttgtctagaatagcatttcttggggcaaaacactcctcttgtcatgtttacgtaatatagtgggtaatggtacctccatctccatcttcaaggattcctggatcccaggttacggaaaactctcctaccttcaaacaccaaatacccttgatgggaacgtgtctagccttattacaagcaacagagaatgggatataccacaaattcaaaccatttccccaagcgacgtttaccaagctatacaatccatcccactcctttgcccacttgctcaagattgaccctactggtcttacactccacatggagcctatacagtaaattctggctaccatcatgcttatgacattctccaccaatttgaacccacaccctccattacaactaaccaagcgaagtgatggaagttgatctagaatttgaagatacctttgaaaatcaaacattttatatggcgagtataccatgatgccttccctactagcgtgaacctttaccacagccgaatagtgaggtccccaatgtgttttcgatgccatagtcacgaagaaaccttagcacatgctttgtttggttgctctaccgtctaccaggtttggaaattaacaatctttcacaaaaatattagtactaaaatgcttttcttgcaatgatgctttatatgtgtactgacataatgacaatgaaagactttcagttttttatttgtttactctggaaaatttggcattaggaatgaatcactacacaacaagctagctccaaacacctttctaaccatccaatggatggaagattatctatttcaataccaacaacacaatatagggaaaatgccacacaacactcaagacgctagttgccctccattacatagccaccgcctccaggccagcttaagctcaatgttgacgctacccaaattattcaaaagaacagaatgggctttggcttaatagttcgaaatcatacctcagatattgtcgcatccttagctacaccttggaaaggcgtccaccaaccacttatgatggaagcgcattctctccaactcgccctcgaatggtgtcaaaagcactcacttatgatccgccaaatgaatttgattgtcaaattcttgttgatgttgtaattaaaggtcactccaataatattcacctataggaatttataaccaaaattaatagcttgttgtcttcattcctcaagcttcaattagctatgttcctcgaaagtctaattatgtcgctcatcgactggccaagcaagctttagacttagaataggaggctattctcttatttgagcaaatatttcactttcttgtatcctgtctttttagaatttatcttaatggatacaactttccttaaaaaaaaaagtactaaatgaacgaggattaaatgatcgttatttatacaaaagattcaatgacacttgatcatattcaaaatgtttgtgattcttaatcttttgtgtgtgatatgcataatatatagattgtatttagaatatataactatatgtgtatgtagtatttgtgtatatacgtatataagtgtgtatatctatatacgatgcataattattattttgataaattaataagatctgtaatttatgataaaataagttgtttatttcatgagtagaaattttttgatatatttgaccatatacatctactcgccaatttatagtttttgttgtgtataactcgatctaataggattagatttccaacacttagtgcaggttttgcactttttcgtcaactcccaaccaatacttttccccgagggtgggccactcctaggaaatttcatccacggggtagcaacctaaggagggatgtagtcaatgatcaggtgtatcacttttcgtgagattattaaagcatctccaatggagatgttatgaaggatgcttgatgacatagatacatttttagtattttttatttcatacttactattagaataaaaaagaataccacaaaagaatgctataccatagcatcctttacattttctctttcttattattttatcataaagtaaaaaaaaaattatttatttaatatatgttaaataataatataa

SEQ ID NO: 221086 - DNA, 3946 bp, Cannabis indica
cacccacgaaactttgaatgatagtgttgagtttagcatatcaagagatcaaattcgtgaaatggctaatgtccgtgatgaaattgctaatcatatatggaggagagcaaatcgacgatcaagataatgagtgaagtttattaataattaaaactttttaaatattttttttttcaagattggacaattattagttcatattttattatgactttgtcagttttgtgttataaataatgagtttcgtgattttaaattactagaaatttttttaagatgttaatgagtattttttatttaattttttataattatatatttatttaaaaataaaataaatgatattcataattttttaattaaaaaaatcaaaatttatgtttcttagtttttaaaattaaaaaataaaaatagttacagaacactatttttgttttttgtttttaaaaacagaaaacaaaagtgattgcagaacacacttttattttctgtttttaaaatttgaaaacaaaagtggttgtagaacgcatttttgtttttcaaaaacaaaattttaaaaacaaaaaatctacttttatttttctgtttttaaaattaaaaagcaaaagtgttaccaaacgccaccttagctaatcaacactaaagtgatcaaataactcccaaaagcatcacaaacaatccaacatagaactccaaaaccaacccaacaacccctaaacttgaataaaacctaaatcacaaaattgcataattaaaccaaacttttcttagaaattctaaaaggaattaagagaatgaagtaactagaattaccttgaaattttctcttcaatgacacttgaaattctagctgaattcctatagaaatggtgagttagggttttgtttttgtgggtttaagatggagtcgagagagagtgtgtgtggtgaggagagagactttgtttttaattttagagataatctgaaaaattttaggtttatctattaaaaataattagcaaataatacttaaataaaactatgatattctattaaaatctagtcataaatatccttgggcaaaaagaccactttgtcctttcttcacaaataagtaatctcataacttaggagtaaaatggtaaaaatcataaccccaaataatctcgacattctaaatgtctaactattttgcccgctaattctaagatactcaaccgtatctaagtgactttaatgtcaaatcatcgcattccactattaccaggcacgaaatatgaaaatcataaaaattcatatataacatatataatacacttagaatttaataaaatctcagtaatcgagaaactatttctctaaggctaatttctaacaataggtcctattttgtactagtaagcatataaccataaattaacaattaaaggctcgtttggtaggtcgtatgttgacggatagaactcgtcaaccaagttagttgttggaaaatgtgtaactattaaaagatgagataaagagaagaagtgaaatgagtaataaatgctctgctctctattgcattaactctatgagttacaaaaaatgaacttccaaccccacttacatctaaattggggtacttataggcactagtggccaagggtacaacatggtcaaacggtatcaacacataactttcgagctgtgggttgcaggtgcctggagtggccttgcgcttcgtaatattatctggtgtcaagtggtccccgattgtaggcatgtgctcctgggttgcagatgcgtggtccccaactgcaggagggtgatcccgagcagcaggtgtgtggttctaaattgcagacgtgtggttttgagttgcaagtgcgtggtccccagttgcaggtttgggagtccccacctgcaagccttaggtgagtagtcatggtgtacctttggtcgggtcctcagaccatgcaagtccgttgtcgtcgctacttgtactcccctacatccagaggtttcaaaagacgtgggtgtatgccttcctctggatgcaagatccccagagttctcactcaacttcacccttatccatatgccctcacttccttccctacacctgcatccctccaaagtgtactcacggctcgtcactacccctcgcgcacactccccactcgcatgcacggctccccttactccctcccacggcttgcacaccccccttactccctctcacggctagcacgacccccactcccactcacggctcgcacggccccctactccctctcacagctcgcacgacccccttactccctctcacggcttgcacaacccccacttccactcacgccttgcccatccccatctagcacacacggctcgccatcacgtctcgccaatccacacttgcacgcccacacggctccccactcacccttcattcgcgggtcgaacgaatgctccaccacttgtatgaaggttccacgactcaccaaaatgcccccgactcacctaatggcccctaaactcgcacaacccccatggggtcgcacaatatctagggagtccctcatgggatccgtcagctcgtatgggagccgtcagctcgcatgccaagctgtcacaattcgccagccttagtattttggccataactttctcgatatacatcggaattggacaattaaagatgcgttggaaagataagaaagaggtctttgaatcttatgttcgtggaaagatcccattctgaacatatcactacgaaaattctccaacaattgtaacctagtaagttgatcttactaactctactcatgagttgttacggggttgacctccaagttgtacggatataccccgagccttgtaagcatggatttcctagattaatgatccttaggtcgtatgcattgactcaatcattcttcaaccaaatcttacaggttatttctctcgactattggggtcgatcgttgactaatctcaaaaatcaattcttctaattttggggttaacacttgccctccagtccaagaattattttaagtgttcttccagactaaataagttgggggatataccttgtctaggcatgagatcttctcagttatctctgagacactgctccctctatacgggggttcccttgggtgaactttacttcgcgccaatatgtcaagcaacaattttactaggccttagctgaacaactctgagggtggctcgttggcccaataatattcataagtggcattggccgagtgacactggggtcactctctggccaagccatctttctaatcggtgttggctgagtcattttagggtcattctctgtccaagccatctttgtaaccggcgttggccgagcgactctaggatcactctctggctgagccatctttgtaactggtgttggtcgagcaactcggagggtggtcactctttggccaggccattttttcccgtggtagacaggcatgtactttggggggagttttggctctttgagcagtctccctcttattgtaaatccatccttttgcttggatggaagagagctttatagcacttgaccacactaccctcttgattgaaaaatgtttgcttactcctgagagatgtccctttcatatcggcgttatgccatgagtgtccgtgaggacctcttatggcttgacaattttgtgaggtgaggcatctttcttttgctaaggaagggtagctaatctttgccagccaagaaatttttgtacctcacttcctcattcatcgttggcgtcattcatctttttttttttagatcagacatcgccttctcaacaatggtatttcctcaagtgtcccgcattccacgccctcggtaccaccgtgtcatccatgcgggccaacttgtaggtcccgagtgggatgactttagcgatccgataggggccttcgcaattggctcccaaaactcctactcctggatccc

SEQ ID NO: 221087 - DNA, 1802 bp, Cannabis indica
atcgtgtacacgtggtgatatatgtcataatacgaccccgttgttggttggccaagtctaaggtcaataattaagtgctttcattgagagtgttatcgactgattttatgtaacaccatggttaacatagggagaactttggctataactcctacgtcatcagatcttcctcaaggccctatgactattgatcctaatgtttgtgttacaaccaaaattaaaatctccacgaatttgatggatgtggccaaccctgccaactcaacaggtacaacaaacttgaccaatacaattggtcagcttgacactacaaacctgactgatcccaatgaccagcctctactgcccagggtagatccaccattggcacctcatactaaaggtatggccaatgtggagcacccctcgggaaccataactaagtttggcccccggtataatgttggggaaatagggcctggaattggtgagtcagccattggtgagcttcatgtggatttatgagaagattttgagttggccagacttagagaggttgtttgccaagtcggccaaactaaagaaccacgcgttattacatgcaatggattcagacaatagagacataaatttttaagatggatggatgactaggagtacatcctctaatgtcatcaggcaaagctaggccaccataatagagaagctagtgacttgataaggaagttaaatgaaagagctactagaagaggtcaagatcttatcagagatcctctccaagggagactagtcgatagatcaggaaggtctacaaacaaacatcccaactaggttattcaagaactaggattgaccttcccctgtcccaaactggacaagtctttccacatagatctagtggtgagaacagccactctatcaaccaacggattggggggctggccagggatttttggcacaacaacacccctatttgggaaacctttggttggtcaaccttttagtggtgcaccgctggccgaccaacagggtgaacttcctccccaaaatatgtaggagcaagttatccaaaggccaatcattaacgagctaggttcaggaatgggtggaaacacccaagtcaacaataactcaagaagtgagtacaacttcttcaggcagttagatccatcaaacttcagcaattggtgtcatctaccccctatcaacacacaggttgtactagacaatcatgggagaatgagcggccaaacactgcccaacatagggttggctgggcaagaaaagctacctagggaagggctgaccgaccatggctagtttccttacctagggctgggtagccaaagccagctggcaggcctagggcttgccatccctaaacataccctctcccagggtatggttaactaggctctggccaatccagggctacaacctagtcaagaaggggcaataaactaggctcctacagtgtcaaatccttttgtgcaagcttagttggatcaaataagagacatgatcaaggatttggctggccgaaaaccatcagaccttgaactagataggtaaaggggttaccattctcgtcatacatcaatgccttggccttgcccaagttcaagatgctagtatgaaaaatgtgtatcagacgagaagaccctttgcacacatcaactactatgagatgaaacttcatctccaaaaggttactagtgatgtgcggtgtcggatcttctcgacaaccatgtcagaaacatatcaacaatggtacttcaagctagctccaggaagagtcaattcttggaatgaattttctaaag

SEQ ID NO: 221088 - DNA, 2415 bp, Cannabis indica
aaaattcaagaaaaaattaaaaaaaatatgggtaactagagtaatcagattggtaactagttactttataccttgtcatatattttaactttttcttttaaactctcatataaaataacttttttaaggaaaaagtaatatttttacaaatttataccttgaaaactataaaataaaaattcctctataattaagtagtgaaaaattaagtgattttttccttttaaaagaaaacaataaaaattaagtaaattaatggtatgaatattgttgtaataagcaagtaatgaattttggatcaaatacaaatcatgatgatatatgattgatagatagatagaagacttgattagttgataaagattgttaacatattcaacgacttgattagttgccaattattaagcctaaaaagagagagttgtttttacttttgatgtgtttggaagtaaataggtaattattaggtaaagtaattataagtgtggtaattacacatttagtaattacattatattttaaaatgcaagttgtgtttagatatgaggtggtaattacatataaattcttaatatcttgtttggcaaaatagttagtaattacatgaaaaaataatattttttagtagctaatgtttagtgtaattacattcaattctcatgggggaccatgagaattggagagtgtaactaaaatctctcaattacttctaattacacagttacaatgaaattacatggtcagacaaacatgccaaattgtataattacttctaattatacacaaatccaattatattgtagcttttcaaacgcacaacatttattcaacaagttcataatattttcttaaatggtgtgcttcaaaaatggaactttaagaaacaaatctttttgatttgattaaaatagaattaatattttcagtaaaaagaataaataatcatgaatataaattcaaccaaatatttttaaattcaattgatctttttgtaaacgcttgccctcgatacaattagaagatcaaattattgattatacaaacacaagtttagttcccaattttctactcatgtttagagaaagtgattggagatgcacttatgtgcttttctttttagaggtagaatgcatattcttatttgaggttgttgtatttcaaatactttatctgttttttaagctaaagcgatcgcattgttgaaaggattaagatgagcacaggatattgaattgcaagtcaaaaaaattttctctaattatttctctctggtgttagctttgaataataacaacatgtattttctaataataataatatctccatgtattttaataagttaggtattttactttcaggcattaaagtcttgctgtcaaattttcatggagcatctctttcatgttagtagtaactctagtattgcagctaatggaatggctaaatatactttatgggtaggggatgactttttttttggatgaaagagatccttcctcctatttgtattgagactcttaaccagtcctgaccttgaactaaggcaggttaggcctgtacttagagtctattttaactcaaggtctaaaatttttatgtagtacattttttacattgaaaaatagtatttttataaattttgtaaaaagaaatttaataatactcacgcgtataataaaaaaaaaaaataaggtctattattactgagggtcggccttgctcttaacttttttttttttcttatccaagatgttgaaaaaaaagtaccatcttgttattcaaaactttcaattaactaccctttttcacgattgaagaaatgatgaaattattttctttgatgtttatgtggattgaatgatattctttatcatttgtgtggataatgcccaaatccataaactaaaataaattatattcatacatgtatttgtcttatttatttatttattcttttgagagacatgtatatttgtcttgttgtaaattttacttaaatatgttttttcacatacaaaatatattttacatttttttttcttgtaaggttggttgtttagcaatttagttcttaagaatattttacaaaattctaagttttttcttaatttgttttcttctaattattatatacgagctcgtttagtacgcaagagtggattgaattaaacaagttaatttgtctagtctagtatttaggaatgttgggagtctaaataactactccaactaatctcatatgtctaaaattatttatctcatccagcagggtgggataaataatctcatatgcatacaatttttttatcgtttttaattttgattttattaatatattttaaatttagtaaaaatttaaatgaaaggattatcacacattcatttataattttttttatcaaaaatttattcatt

SEQ ID NO: 221089 - DNA, 4201 bp, Cannabis indica
ttgtttctgttttctgagatggttttaaggatacttatgttaaattaagttgaattagaggcttgttgtgaggtttggtcaaggtttgagcttaagagctcaaacttggctcttccgtggtcattttcattttagaggtaatttcttgagtttattgcctagaatatgtttattatggtgtgtttaggtattcagaaaagtttggtagcatatggaattaattggaccaagttatgggggttggaagattggaattgtttcgtatttttctgcccagacaaccagaattccggttggtttagggctgtaccaactggaattcctgctggactgtatcgggttaggccaattttagtatttttgccatgacttttcatttgggtgtccgttttagacgttctatataccgttttaaagcttatgatgagctctatgatatggtatataaattagagcaaaattttgtactttattttagggtgtctccaccacatagtttggtagaaaaaccctaggttctttttagacataagaaaagtgttctagagtaaacacttatcaattgtgcgtatgttgtgacataggggcttataaatcgtcgtgcagcaacttccactcagggttaccagcatacttgcatttggaaccaaggtaagattagtataatgatatgcatatgtgtttacatgttagttatgctgctaggttacattacaatagcggtatgagtatatttgatattatattagatatcgataaatgtatattggcatttgtactactcgacagtatcacatcggtacgactagagtacgactagcgtaccgagtataggctaattttatagtcgataatactgtactacttgaccgtatcacatcagtacggctagagtacgattagcgtatcgagtataggctgatattgtggtcactagtgctgtcgtttgaacgttcttgactcaatatcgtgttagatgcggggaagggttacggttagtggtatgggtgcctaatcttaatcctatttacatttatgttatgattatgcttttcttactgagtctgtcgactcacagttactatgtgtatgtgtaggtttgagctagaatcgaaccattgaagagtctaaagctaaggatgaagattgtacatatcatgacggttagacatggagtgttcaaagtctttgggacagtgccaactcacttttgttggtccctagacgtctacttttgatttataaatagtttataaacttatgcaacttttaaaatgggatgccagattatgtaaaatattatgtttaaatattaaagtaaagttatacgataaagttttttaatcattcacatttttattaaacgctttgattagtaaaggcatgcacagtatctagaaagcaccctaacacgcctaatctagtagggtgtcacagggatgctctaaaccatgggtagttgttggtgatctctatgtgatagatgacattaaaaatatggtaagcgacaaagttagatgactttaattagatgatctgtagagtttcgtaggggtatggatgaatttataggagttgctcgaatgcaaataaattctactcgacttactcgatccccgtgcatgagatttctaaatgtgaacttcaagagtccagataatattcgagtacatttgtttatgcatggcatccaacaatcgtacacaaccttgtattttcatgggatgaacttcacgcaaccggctatagaaatagtatacaacgatgaagaagaaatgacagatgtgatggctgatattttaagagaagatcctgcctgacgatacaagttctaccactgattcattcaacgagtcccctaaatggtagtggtaagtacgataatttttacaaggatatggaaagcaaattgtctccaggttgtaaaaaatcagcactcaatgctttggtgaagctgatgcactataaagttctcaataagtggagtaacaattcatttgatatgttactctccatattgagtgagttattttcagagggtgcaaaattaaccaagtcccattaagagtcaaagatgaagttgcgtaaccttagtttaggttatgactccattgatgtatgcaagtatgactatgtcttattttggaaggagaatgagaaaaaatatttctgtcctatttgtggcgggagtcgttgaaaaaaggaaaaaggaaatgagaaaaaagttgctcttgaagttatgcgatattttccctaactccgagactaaagaggttatacagttcaagacactcggtcgaggacatgcagtggcatcattccaagagatcaaaagaggatgacgtgcttagacaccctacagatgtaagagtggaagcagtttgataggcaccacccatcctttgcacttgaatccagaaatgtgaggttggatttggccactgatgggttcgatcagtttggtaacatgagtaactcttatagcgtgtggcctgttattttagtcctgtataacttacccccttggaagtacatgaaagtggagtcattgatgttgtctctattgattccagggcacattgcgggtggaaaagacatggatgtttttatgagactattgattgatgaattgaaagagttatgagagtcaggtgtccaagcttgagatgcttacaataggactgtgtttacaatgtgtgctactattttgtggaccactaatgactacccgatgtatgcaataatgtctggttggagcaccaaagtgtacaaggcgtgccccacttgtaatgaacataccccttccattggattgcgcagcaagattggttatgttgggcacaaaaagtttcttgaaatggatgatccaaggcggagaagtaaaaaatacgatagaaaaaactgagaaaagaccacctcctctaaaattgtcgagggaccatgttttagcttagctgtagagatacaatatcctttgcctggaaaacacaagaaatttggtggagtcaaaatataaacgttctatatagctgagtaaaattggtcaaagaagagtatattttttgaactagagtattagaaggacctgtctctcagacataatctcgacgtaatgcatatcgagaaaaaatgtgtgcgacagtgtacttggaactcttttatgtattgagggcaagtctaaggatacagacaaagcaagattagatttggaggaccttaaaatacgtcgtaagttgtggttgtttaaagaccgcaatgggaattggaggaaactgtctgctagttagagaagacagatttgcttcaaatttagagaagaatgtgaatgagaccgaagataagattctagcctgaattctcacggttgacatgtgttgttacaatgcttgatgtcggggcattagaaagtttttgaagaaagaagtctgtgatacaataattgaactgtgtgtatttttccaaaaattgtgctctaaaacattgaatgttgaagacctatagatcatgcaaaaagatattttggacaatctttgcaaattgtaaaccattttcccaccagcattttttgacataatggttcacttggtgatgcatttacctaatgaagtgatacttgggggaccagggcacttcaggtggatgtatccaattgaacgagtcatgtccgtgtacaaataatatgtaaaaaattgatctcaacaggaaggatctatttgtgaagcttatgcagttaacgagaccttaagcttttgttcaatgtacttctaggaagttgaatttcgatttaactaacaagatcaaaattgtgatgtcctcccaaataagcctgaaagggaattctctgtattcaagcatgttgggcgaccaattggtaagaggaccattgtttctttaccaatgtaagaaaagcttaaggcagagtggtacattctgaacaattgtaatgaagtggagaagtatatcacgtaagatactttttgcattcttaatttagttctcttcactgaaaacaatctcttacatgatactatttgtgtgtagtgagcataggaacgagctataacttaagggtgatcaaaatcttgacacaatttaagagaatgagcttcccaattggttcaagtctcgagtaagtattgctttctactaattttgtcattcaaatacggtttattgtcctagtattgattacatttttcac

SEQ ID NO: 221090 - DNA, 2172 bp, Cannabis indica
ggctagaaataaatgacttgtaatagcgtttgtaaatatttttgggatcccaactattttaaaagtttaaatatattacaaatttattttcattctgtctaatataaaagttttaattctgcgctattttgattagtaatcccgtttaggggattagggtttcatgagtattttgggtagcgtgcctatttattcagggcattacaatatgatttagtatttttagaatagcatagcgatctagttagacattggaaatgttgagattagtcgggattatgattttggaccattttacccctaagtcattttatcatttagttaggtgagtgggggattttagttatttttgactttgatgcttaggtggccctttctctttgtgacagctggccactattcttttagtgttataattaattaagaattatctaagtcattggaagaattagaagaaaaggaaaattaagaaaaaaaaattggggtttttggcttcttccctctctcttgttcggttcagctaagaaaccaggggaaatcaatttcttttcttcaaatccagaggttttaacaagttatcaagaggcataattctaaggtaagccctaaccctagttctcctttgtttttggtaagttttgattagtttaaacatgcaatttgttgatgtacttaccgtttaggttagatcagctttattgtagttttttgagtttattttaaggttgtttacgcttgcttgatgtgaatttgagatttgtttgtggagttgggcaagtttgagttcgtgaactcaaacttagttcaacaatggtgattttggaatttttgtgttttttgaggttctagtgcttgaaaatggtttattatggcatgtataggtgttctagagctttatggaaatttaaggggaagttttaggtcaatttggggagtttttttttttttctgcattgaaaaatggcctaccatttttcttggtgcagaaccaagaaatggcctgttgtttttcaagcaagttccctattttgttttttttcttgtgttttcttgatgcttaggactttgtcttgctatatattgacagaaaaacttttagtttcaagttaaattcttcggaaagtgatttagcgtatcactaatcaaatttgcgtatattatgacttaggggctataaatcgtcgagaagtagttctactcaggttgatcggcacacttgaattcaaaatcaaggtaagattagtataatgatatacatatgtgattacatgttcaacatgcatgtttatgattgcctattagaagagaaaggcactgtgagcatccggtggcttgagtcagaacaagaggttccaagggaaccaaggtcgtggcaaccatcaaggtggctcttaaactcgatacactcatctagagtgtcccaactataagaaacaccatctgggtgagtgtaaatggtggggatgtttcagtgtggcatgcatggacattataaaagagattgcctgcaactaaagaaggaagaacaaaagatggaagaaaagcccgctctagcaagggtgtttgctcttactcaggctgatgcattcatatgtggcagccaaaataattgataagatgggtagactgtttaatagttatgaaaaaggtttggaaccctaccacttggcggagaattagttatctccaataggtgggttaggtttatgccaatcagaattgagggtagaaagttgagtgttgatttagtggaattgggcttattagattttgatattatacttggaatggatttcttatccaagtattctgctagcattaacaagtattggccggccagtggctgcacaatggggggtactgttgagctagagatccctggttggccccccatgtcgttagttgctgacatctggttgttctcactgtttgacctttgagtaaaggtctatcctccctctagcaagggaagacatgccctagttcctaaggaacttggtgacagtcttccttgaagtggatccctaaggagatcttggcctcttctatcggttctctgattgaattgtcttattgaattgctagactcctgattgcagcgatctaattctgcttggtgagatccaaggatgtactcctagtcatccatccatctcaggaatttgcatctct

SEQ ID NO: 221091 - DNA, 3367 bp, Cannabis indica
atatataaactataattattcaaacataaaaaacataaaaaatgtaaggtgtattggtatactcatttttaaaaagagcaccattaaaatattatacaatagtcctacactattgtaatgaccgcatagtttaattgtgagaattaatagatcattaagagatttaattattattatgtgataataagcttcttagtagaaattagggcttaaagttagaaataggccttaggtaactaatttctcaattacagagatatatttgaattctagatgtaatatatataatatatatgaaattttatgcttcgtaattgtaaaatacgacgatttggctaatggagtcacttggatgcggttgagtatcttaaattagtggggcaagttaattagatatttagaatgtcgatcttgtttggattatagtttttgaccattttacctataaacatttaaatttcttaagtattaagaaaggggcattttagtaaattgctacctaagttatcattgataagattagtggattttgtagtaaaatcttaagtgtttttttttagagttattcagctgaataaaacaaaagggtttcgaggataaacattaaacaaaaagcaaccacttcttttcttactctatagcttcggaccaaggaaaatccaaaggaaaatcaaagttttccatcctttttacagcaaaataagaggatttcagcaaggatttcaagtgtatattaatagaaacccaaggtaaaccctaaccacttcttctctttcaatttttcttgatgaaaagctaggtttgaatatgtaattttggttttgtggtttctatctgagcttggtatgtttaggatttgtttcctgtagtagttttgagtttgtttgagctaatactgagtgattattgtggctatagttggatttgatctaggtgtgagttttaaagctaaaaattagctcaataatggtagaattcatctaagagttgtatagttgtaattgtttgatgaattatttgatgcctaagtgatattttaacatcagatagctaatttattagttccggtgaagtttttcaccaattctcagagatgttgtttcgtggaatcaagagactcgaaactacctgatttgctactcatgtcactttgttgagaaaaagtgaaaatatgaagttgcaaatttgacttgtttgagctcatagctcttgcttactatgaataactagacgaacacttgagacaaaataaaaatcgaataagcagaacctagagcactaggtcatacgtcaacctatgcgttgggtgcttaaagcttccaggatgtcattttgatgcttccaaggtcttcaaaattgaggatgaggtctcctacccaatttttgaccatgtctgagacaattcctagagtagaattttcatttgaatgacaaaaaccagcgtaccaggttgattgtcaactggtcgttagaccaacaccaagtcaatcgaggcgctgggctcagttttttgcgttgagattctcattttctcctcaagtttacttttatcttcattattttttatgatagaaaaaaatacacagaacacttcttgggaaaatgattagaaatagcccaggttaacaaaatatcaacctgggcgctacccagcaccatgtatcaatgtgggtctagtttctggccacaaaatggcttcgtttgactcctagggtcacttgtatcttaatacttgacaaagctgagaatacgcccgaaagaattatcaaaaaaactccttagatatggcccaggttgacaaagtgttaacctgggggctaggcccagcacctaagtcaacttgggcgctagatcctcgttctagcctccaagtcaatttttttctccctaaaaagaccttgtttccatatatttgatggagatgaacaaaattcttgggatagttcttcagtgtgatgattggaagtgccctaggttcacaatatgtcaacctgggcattaggtgcctagggcacctagtgctacgggttctcaattttaaagttactctgtatttaatcctaatacctcaaatatgtttatgacgtgtctaattcatgttccagtaacaagtttgatcgatttgcattaagacggtcccagaaaccaaaccatagttgggatgtcaacttgggcgattggtttccaagcacccatgttgactttcggggtgttgtttcttgtattttttgttttcgggccttgaacttggatttttcatgtcttcatggaaaactgaaagatagtgagttgggaaaaacttggcaggatccaaacacccattccggagttcttaaagtcaactaagcatagggctagtgacccctcccaagtagacttctatgactcgtgactacgaaactctgtgatgttttctttcttaccatgtgtcaaacattcatgtccacgtcaccaggatcaatttctggataaacatttctcccgccccaagtcaactttacacttgtgtgaggttgacttgatgatatgaactaagcccgtttctctcaaaactagtaggtgggcatcaattttagcaatcttaagcaattggttctgttgttcaagcattcctaataggattaggattttgaattccactcttttaaaggataaataatttgaaattctatttgtataaagaaaagagaaaagtgagccatctttcccttgtcatttatctttttcttttaaacatagaatttgcttgaatcctaaatgcattaggaatttgggtgtccttttaaatttcgaatttatattcctcttataatgaggaattcaaaattttaagtagaaaaggagaagagaaaagatgtccatcatcttttacttatctttgatcttttccttttaaattaaaaatttaaaacacttctaattgctttacgaataggggatttgtatcactataaataagagagctcttcattcattttctctccacttcctttcttgtttcacacgtcccaagcttctctgagagctctgagtgtttcaacttcatcaaacttcgagtgttcttcaaatcaaatctttaggtagaaaaatattcttttcaatctttttttattcccatcctgtagagcttggtttaaggattctaaggttgattggaaattcttaaactccattgataagacctccgaaaatcaaatatatgatttttatgttagtcgtttgagctaaaattctcctttccgacaaggtgcaataatcttgatatcgtcttaataaggttgaaaggagctgatttgagctgtgatttacttgttctaagttgaattaagttgaggtttgaagtcgtcctgcctcatatgaagagaac

SEQ ID NO: 221092 - DNA, 4906 bp, Cannabis indica
caaaaaaaaaaaaaaaaaaaaaaaaaaaaaaaaaaaactaaaacttgatcgaagtgtaaaaataaaaaaaaaataaaaacctaaaaattaatactacatataattttacataaaaaattatataaaatataatttaatataataatacaaaatatttaatatgccgtacaaaactaattatatttttttttttaaggaactaactatatatatataattagacaccaaagttgtttgatgtagcgcaagtcacgaaacacatccattattgttgttgatcttgattttgtggtcttctcttcaacttggatgtaattgagatctcaattatttggtcaaatatataatatattccattttggtttgctttgaaatatcataacaaaaattaaaacttttaataatcggtaaaggatcattaattagttagaaaaactgtttcaatataattttaaacatttaaaataatatttattgtacctctcgataccgaaaaaaatataagatgtagtgaaacaatcctttaggagagtatattattattaatacagattttatattaaccaaattaataaaatttttttttaataaatatactatagaaataaatatataattaataacatcaaatattttacgtagttttgtagttaaaatttatatactttatccttattattatagatatttttttgagataaagaatacaatattagtcgttgaataaagatttttctctcaaatttgtcgtcccttctccattctgcccttatttatatttataggaatataagttggcagttattctttttggattaattcatttacaattgttaatgaaacgtgaacattctccacatttcatttatttacacatgagataatatctaataattacccaaccgctcctcatttttatcctctagacggttattgctgacttaaaaagttacatctcgtccaacatgatgagttctccttcgtgtccatttaaataggaaaaacgttaagtgttgaaaaataactcatctcgttatatcccttcattaatattagcaatgtgaggtgatcatcatcatactatatgtagtaacgcgaggcggttcaatatgctacttctattctgctcaggagggaaaatatcctctttatttaactaaatttatcttgaggcagatatatgtctcgttaatatcagtttaatagttattatttgtgtctcgcataagactaaacaatcaacaagtttgaatattttctatcaaacttatatataattgtgacaagttatttaattgtatttaatgatataaaattattattatattctttgagttgatttacattcctttcgtaggacacgtgtcattctctggtacatagctaaatttcgggtttaacaattataaatatgcccttaaaaaatcaagtattaatttgtttttaaaatatgtcgaaacatatataaaatttaccaaattaagcttttaagaaagtatactatatacataccttacaattaagtgttactttatatttaagatatgtatatatattcgatatatgtatgtataatattacttgtattattctctgtctttgctgtaacacagagttgaactattgaaagttaaatataataatttatgagcaataatatatatatttcctaaattttatctacctaacaaggaatgtccatatgggaaagattgaggccaggtggaatacaacatgtcagtagagtgaacaaagtcactttgcacaacacgtcgattaacaaggtttgcaaatactcgggcgaaaccaagttacaaaaaaatgaccaaccaagagggtttggtcggaccataccctagccggccaagggaacccatgtgtcggccaacaggccctaagaaaagggtaggccgacaagcacaaacaaagagcatcaaggggacttcgattgaatgatggggtccataaccatctctctggacaggtcacaacttggtttcagttgtgggacaattctaacaacccatgaaattagaaattcaatctcaaaatatctacgcatcttttagagatatcaattagctatttttataacttaaatacatcataaaaagttattttccctattttgaagggatatttacttatttgaatgcaaatcttttgtaagtcctaaaattatataaagaggatttggcaaagtgaaaagggacatgaattctgatctcttaagccctagagctctctcactccctctcactcacgccacttcctctttattgacacttagtctattttctcatctcacttgtttagaatttttcatccatcagttctcaccattgtaacattcaaagagagtcatagctagaaattacaaggtaaaagcatgtaatctacatagtattatccctaggattaatacaactaacaagagagtaggtcattacccgccaaataagggggtagaacctctatagatcgttgtgtcaattttatcatttgcttttacactttacatgtggtgattatcaataataattatataaggctctactgtcagttgaccaaatccaaggttaatattttggtactttaactgagagcattgtttgtccttcggatcaatcatcatggttgtaactaggagaaccactacatccacttcctcgggtcttcctcaagatcctatgatggctaatctcaatgttcgtgttcctcccaccacgaaaggtcctactaatctgactaacaccttcaatcctgccaatttcgcaaacccaacaaattcaaccaataccactaatcctattgatccaactaacctagtgaatcttaatgaaaagcctttgccgcccagaacagatccaccaaaaacaccttgaacaaaagatcttgtcaacacgaaatagcctccacggagcacaactgtgactgttccccaatattatgcaggagaaatatgaccaagaattggcgaaccagctattggcgaacctcatgtggacctaggagaggatattgagctggccaggtttagagaagttgtaggccaggtcacccagatagaagaaccgcgcgctattggttttgatgctttcgcccaacagaaatgtgaattcttaagatggatggatgactaagagaccatcctccgggcccattaggcagagctgaaccgccgtaacatggaagccagtgtcctgattataaggtggttcaatgagagaactgtcggaaggagccatgattttataagagaacacttacaaggaaggctcatcgacaggtcaggtagggtctagaggcaggtagacattggacaaactgtccaactaggtccctaaagcaggtggacagacctttccctgcctgaagacggtcatatcttgccaaatagatcatacagcaggaatagccaatccttagcaccagtatgtgttgggggacaaccaaacattcctagagtagaggcatcaccaatagaccagtctttggcccaaccagcatagtgatgctccccccagaatattcgagaacatgtcgttctaaggcctatttttgacataatagatcctgggataagtgaaaacgcataggaccacaataattcaaggagcgagatcccaagtgactttgttccaccactgaacaataatttcaagtaggtggatccaccgaacctccggccaggagaatctggccagtttggccggccaatggagagtaaccagcctaggactggccgcccatatccaactgcccagcttagagctggtcgtccaaaaccaactacctaactaagggctgaccaactaaggacaattgtttagcgaagggctggccggccaagggcatcagcttggccaagaaaggccattcgaacaagtgtccaccgcatcatatctatttgtacaagtacagttggattaaattagggacatgttaaaaggcctctctggcccaaaactgtcagatttagaactagaatatgatgtttattagtttgataaatgtgtgtatatatattaatatatttgccacccttaggatcctatgcaatcttttctaaacaaaaaaaaaaattcttaaaagtaacgaaagcaaagccaatgtatataatgaaaataaaataagttttctttggaaacctaaatcactgtaaatatattttaatgcagttaacacgttataaagcagttttcaacaaatgtcttgtatgttctttgcaagaaaaacaaaaaacaaaacaaatgtcttgtatgttttttccttatgcaacgttgcaataaacacattggtaggaatacttagcttagacgagaattcagagcagagtattgaaaactgaaaaagcaaagagtatagatgtcaaattgtgaattgttattctcaaaggtttcaaagaacactgtgatgtgttctatgaatgatttggagggatgagcaactcatctcagcctggcctaaatctcaacataaatcaatgaaaacctaacttaaatcaatggtgcaatccgttcatagctgaagacaaacaaactagcaatttgaataaaggggaatgaaaaagttggctaaatagcttaagacaaacccatggatgatcagacaagttaggttctttctacaaactatagcatatatctttataagcacttagaagtaggtttcaactaatttttcagcaattcaacaaatatgattatgattcttacgaaagcttcagttggtgcaaaattgagaacaagaaatcagagcagagtattataaactggaacaactggcaaaactcatagtgcattcaaataaattataaaaatgccaaagcaaacctaagatggcataaagcaaaaaaaaaaaatattttaactcaacagtactttccaacaaaagcaaaacaata

SEQ ID NO: 221093 - DNA, 2046 bp, Cannabis indica
tgttgatataggtagtatcaattaatctatttaagctctcttcaattgtgtagtcccatacctatacagtctcaagatcatcacacttaacctttctcaggcaatgtgggattgcaaaactcctagtctatcccctttcggatgacattgttgaaatttgttttaggggatccccgaaacaaatgtttagcgatgtcatcatgttcattgctatagttttatcttggtaatatttttactattatcacagatttgattaaatagttaatatactgttaaaaaattacgtttcaaaagcacacacgtagcgttcctaggatttaggtcgttacaacttggcgtttttggccttttttgagacaatcaaaattcttattttggccataacttttcactcgggtgtctgttttacacattctatatatctttttgaagcttgcaacgagctctacgatatggtagatatgttagagccaaagtataatttttattttaaggtgtttataccatgagatttggtaataaaaaccctagattattttatgcgagtattaggtagtattttggaatagaaacttatcaatttaccgttgttgcgacataaggctgagatcatcgagcatgtttctccactcgggtcggccgacatgcatgaatatggattaaagataagaaaagtacgtctgtaccacatagcatgccagatacgatcaagattgtttgtgagttagttgattataaaaggagcgagatatttattaccattatgaaaataaggtgacgattattactgttataaaagcaaggtgacagtcattactgttatgaaaataaggtgatggtcattaccgttataaaagcaaggtgacagtcattaccattatgaaagcaaggtgatggtcattaccgttatgagaacaaggtgacagccattatcgttatgaaagtaaggtaacagtcattaccattatgaaagtgagaaagcagtatggcagctatgaaagaaaagtcatgactataaactggaaccgttgttaggttccttacttgtcagttatctccatagatagtgacagtgacatgaataccaggagtggtatttgggttaatccacatggaacaatcgggaaaagtaatgactataaactggagccattgttaagttccctacttgcgggttatctccataggtaatgatagtgatatgaatattgggagtggtattcaggttgatccaaatgggacaaccgagaaaagtcatggctagactgaaactattgttaggtttctcacttgtcggtaatcctgattaggtagcggcagtgacaagactaccggttagtggtattcaggttgtctgattttacaacgacggtaacatttggatactagggattgagtattcatgttgtctggctcaacaataatgtgatatttgaatatcaattttgagaattagggatattttgttaaacaatgatagagatattagtatgccaagttaggcatcagagttgttttattaagaaaatagtgtgaatagttactttatgaagtaacagttatagttattattgttatacttataattgtgtatgattgtatatccttatattagtattcattgtgtttgagtatccgtggggacctagatttaaatacatgagtaacgtatgattctttgattctggtgatgtgagtttacttgttaatattcgtgtgatgaattgtatgactgttgttattgcttttcttgctgagtctttgtgactcacgggtgctttgtggtgcagataaaggcaaggaaaaactagaacaaccatgagatgatagtcttctccggcaaatgtacatatcgacttatctggcttgtacggtcgagttgttagcagttattttaggttgtacctgatgggtgttttgatttattgttgtatatagtctttttgtaaaactttaacaggggatccccgaaataaatttttagcaatgtcatcatttttattgatatggttttatttgagtgaagtttttactattataata

SEQ ID NO: 221094 - DNA, 2858 bp, Cannabis indica
attgtgaggttaccaaacaagacagagttcaaggaaaacttctactggactactggtctttctcctataaacacgactgcattttgcattatatgtaagtaatttctatcacaaaacttggttttgagtcttttttatatttatgactcaggttgcttacttataacacttgttgtgttaacaacatttaccaacaaaccaattcccaccccgagatggccaagtgccataaaatcctactggatcttccacttggattgcgatcagcagatttccttttcaacgaggccaatctgagcactgtcaaccttctttgctcagacgagtacacttgtaactacaaggtttcgaaatactcctcgtgggagaaggtcccagtcccagctgatgaagaaagccaagattatgttgctcgcgtccattatctccagaaagtaacccttcagaaagctgaagaagaagcatcccaaggtaatcaattaatgttgatggttacccaccgtacttaggactgcacgtacctcgctagtatcctttagggatagaaaatataacttttttacatgggaaaacttttgtatagatcgcataacccataggtttgatagttggaacccttgattccatgtccatcttagttgcactagctcatattacgggattgccgagcaatatggtacaaacctggataaggcgagccatccagattcaaattgggatttatctccgataaacccttatgatatgtacatgatcatagggtctagggagtttggtaattattatagtttttcctcgtcaacttctgataattatggtaactttctttaagtgggagtttactccccatttttgtattatctgtttttgagtaagtgtttgatgtatctcttttacctcgcagatatgaatctcgacttagaaaatatgctgaacagccctcctcacgtcgataaatgatctagaaaacgtgctgccaaggcaaatgaagcctcgagctctaccaaagaacccaaaagaacaaaaacaacatcaaatcagaagaaatcttcaaaccaactcactatcgagctttcaaaatctcttaaaaaggctgctcctactatggcgagtgccaatgaacagccccttgggtctgttcaccaggtgaagttttctagttctcgcctagagatggtccttctagagccctcatggaccttgcccattgaatttggcacatatacatggctcaaaactctgctcactacacgctaccaataattggcggcaatactaaacctttgagtccaacgactgggaattactcaacaagggtaattttgaaagtttggtgcaaagaagttatgatctcatgcatcaggttagtcttttcattgctcttttcctttttccatatcgtctttcttttattattgcttgttttcattcctcgcaggcatctcttttgtcctttgctaatcaaaacagggagctttagcgagtggagatgctcgagacaaaacttcgtcagaccagagaacattgtgatgtcatggcaaaaaagtggaatgattcggagtctgaactctctcgggtaaaggagtaagctgagaagaaatagagggctgaccaaaagaaaataaaggagctcgaggttgctaataagactatccaggcggaggccgatagaaagcttgaggaggccaaagttgacaccaaaaacagggtcatcagaattgttaggcggtctatcaatcaggcttggttagctaatctcgagagggattttagctttctgggcaaaggagctgaagatatgctcccattctgggagaagaccaacaaggaggaggtttgagatgcacatgaggttgaagaagaccaagaagggccaaccaaatcccctactatgtagactttgtctttttatgttttattttctttgatttttttatttagtaaaatggccctttgcacgagacaatggttgcccctagtggcattatttttgtaaagataatttacatgtttggatggccaaactttgctttttatgcatttatctttacttttaatgccttgtatcttatatttgaattgaatatatctgtttatatcattcttttcacaatttaaatatatatatctgatccaatcttattgatactctaagaagtatttccattttttctagttttttcctttgatgcatttaagtagttattagtctactatgtatatgcgtgagcagttaatctgcatgtagtttcaattcgttagaaattttcatctgctttattttatacgagtagttttagtctgtcttgttatacgcgagtagtttataatctaccaaatattgtatgagcagttttaatctgccatgtataacatcgttatgtattatatattattttatggcaaacttaaaacttctttgaataattatcttcaggaactattttgtatattttttttgattgctcatatgaatagttaggtcttctatccatattttttcttaagtattatttttcaaggcattcttgtgcctcatttataatacatgccagaataatgcgagtcgttaagtattcagcctcacatgtagctttatgttgttttataagttgatctcacttacaactactattttttttttttgactttttcctttctataggaaagatttttcaattccatgattttacattgtccatagaaaattttaatcaattatcatttcctttgtggtaaaaatttaaaatgagtttgcaatatagtatgtgtttcctagatgaattccaattattatacacatgtatatgtccctcaagtaattttaaagaagataaactttataattacttgaacaa

SEQ ID NO: 221095 - DNA, 3021 bp, Cannabis indica
aaagaaccaaggagccacaagagaggcaagcacattgagaggaagtaccatatactaagaaatatagtagagagaggtgatgtggcggtcttgaagatcgcatcaaaacataacctgacagatccattcacaaagatgttaccagcaaaatcttttatgggtcatataactaatatgggattaagggagatgcctaattttcttttagggcaagtggtagattgttagggtttatgacctaaaaagcctataaagacatttctaattattaaataaagagttgaatattttaatatatgcctgaatgttaaattattgatatttattattgaataatttatatataaatatcagaaaattcgttattcatatatgaggttgtggcttgaagctctacagagaactaagaccacttagctatgaataaaatattcaataatatattaaagtttgggaatcattaaacaacggttgctagtatagttcactgatgcctattcttcagtgcaagtaatctcggttcagattatgaatgtagtatgacatcaaagtgaaggtgttgtatataatagagattgttaacctcaaaaataacatggctagcatctgctttggtgaatgttattgttggttcccctacacatggtactttaggttttctttcctccaaggctaggattgcatcattttgtttgtactgcaaggctcgagcatacttttctctagctttgcccgagtctccagcaaggtgttggcccctaatgattacctaaagatgcccgtccactagtggaggcatatttggttttggttattatctgcctcggtggccctttgttcttggtcggtcttgacatatttttgtaagtgcgggttattttttttattaggaactcaatctctcacttcaaattattacattcatttgtgtcatggccgtagtccgcatgcaataagagaactcagttgtatctcttttgctcatgtcctttttcatgggaaaaggtttcttgtacgacataatagactgggtggttgcataaattatttctatatcatctgttaagactgagaaagtagtaaacttagaagtattctctttaggatgctgctcggagttgccagtgaacttgattttctttccatttccatgtctactgtcgttgttaaacctctttccatttggatttgaactgttgagatgaggtgaattctgggcagatgcaccggctgtagtggtgtattactgatttttcttttatcctactatatccacacgccgtactgtctcttcgagcttaatgaatccatctatttgatccagaaactcagccatggatcccacagttaatctcttaatatccttccatagttctcccagaggctcaatgccccccaatatggctgctaatcttccttctttagtcagccttttaacttttgttgcttcagtcatgaacctactaatgtaggcccttaaaggttctcctgacatttgcttcacttctaccaggtcttctaggtgtaagggaagctgacggtaggaaaaaaactgtgtatagaattcagatgagaaagaaatccacaaattaaacttttttggaggcaatttgaaataccattattgggtggtctctgctagtgtggccaaaaaaatctgcactgaacattgcctcttacccctataggtccatctgtatttcaaagtactttaaatgggataaaggatcttcttttcatgtgtacatttttcatattggcattttgaactttgggggtaggtcatgagtattgatttcaagtgagaaaggtgatcctcgtgcccagttgagtttgagatctatgagttttgggccagtcaggccttgtaccatgttttcaagttgatctatttgtgcatgcacaagtagatgaacttggccagcctactgaccgacctatgtcacattgagatctctttgaacttgattttggacataattatttggctgaatagttggtgtaatgttttgcccgtccagtccccttccgtgatttaggtcgcttctgaggtcatgcatgatacccagccgattgaacacagatgcgccaagtggtcttggtgtttgaccttcttggttaagaggttggtctgatacctctatctaagtatagttgttcaaatttgtacctcctcctaaggggcggtctggcatgatctgactatctaccttttggcccactgtttggacttgtggccttggattggacgactgactgttacgagtctatgcggtatgatcagctatatacccttttgatcggcttaggggggctattaaaatcagtcactgattgttgactggtaacttggtagtcccttctaatcagcacgatggccttccgggaacggccgtcgatggcagcttgctgagttttcatggcttccatctctcgacccctccattctatgaattgatgtcttcgcttgtcaaaggcaaggttaatagctgcctggagatctttctaatcatggtgcaaagcgttgttatggccttgcataagcccaagagcatttgcagaattttgaagttcattgtcatctccaacaggcctttgagtgttattagtagaagggatctcggtgccaagttggtttggtcaacttccgtactggtcttcccagtaccctatacgcttggtgtgaacccagccagaggggaagtcactccatggcctaccgttggtggttgtgtattaatttgtctagggattgtccttggtggtcctttcatgtttccaggagtttggatgttaagatttgtcaccattgggtcaccttgattagtcagacctccccttcgagtttgaacaacagtgagtcaagataaagcgataagatgaaataaataatagaaaacaaaaataataaggtaaaaagaacactagaatttctagaggttcaagtcgtgagaatggtaatagcctactcccctttatattgtattgacttgggaacaagaatgaaatgttcttcctctc

SEQ ID NO: 221096 - DNA, 2791 bp, Cannabis indica
tttttttattttacctgatctctagttctaacaaagttctttgtttcagagcaaaaaagttaaaccatggcttctgctagccagagagctcagacaaagttttctccaactgctccccattttattaaaattattcttaatgaaaatattgggagaaccaagttagtaagtatgctatgtactctctctacttcaacacataattttcttctgtgatttatgtaatgtatcaacctcaaatacgagcggtttctatgacatatttgtatacatatatattgttgtgatttgtgccaccaagttagtttgtctaatatgtgtacttccttggaactattggtagtgagtcttttgatggtatgtagatttataactaattaagttcataggtgctctcatcaaattcagattaaatgcctttgatctgtatagtgtggtcttaggcttcaacaatcatgtagttatgtttctgtatcgctcttcactttagtggtagcttattttcccttttattttttggttttcccttgtgcagcaaattcctaagacattttggatgaaatactgtggttccttgtcgagtcaaataattcttaatcttccatgtggatcaagatgggaggtagggttgacaaaaagtagtgatggaaaagtatggttagaaaaaggttggaataaatttgcacaacatttttctttaagcaggggaaatctagtggttttccgatatgaaatgagagagttcaatgtgattatatttggaataactatggtagaaattgattacccatctaatccaatccttgttaagaagcatgtacatattgatggagatgatgttcttttgaagtcttggaaaaattttcactgcatcctaaatccagggtaaaatctccattaccgttctcagccccacaagaaaatgaaacaaagtcctcttggtaaaggtatttaatctaaatctaaaatgaattttaccccagaatccatctactactagaaattaatttgtgaattttttaagttgtttgtttataataaacatagtttagtaatatttctgcactgtcttgtcttacatgttcacccctttaaagttatggaaaaaggaagctcatcaatcaaagtagaatctggtgacactatagataacacaaccactggcttgcctacctcgaaaagataccagaaaaccttgtctgtccatagaaacatctcagctgttgaaagggccaactactttcaatctgaatatcctttctttactgttattatgaaagcatcatatacaactgatcggagaaatttcgtaagtaatcttagccttatattttcctcggtgtaaattttttgtttagttgttttttgcttacttcattttaactaatcaaatctcttttcttgttcttttttaaaattctggtagcatataccacgctggtttgcacaaacatacattaagaaggaagaatgcaaagctagcctttggatttcagatgataaatcttggcctgtccagtacaaagttcgattgacaagtggatcaacagcagccgaattcatcaatggatggaaagcatttgtggtggaaaacaatttggaagtgggatctatttgcaaatttgaactgactaatattgtcaatgatgtttcatttagagtttctattgttaagcctgatgatgatgcacataactacttaggtaataataagaagtagattttcttaatttcgaatatcattcaatgtgtgtcagtgtatatggttacagtattaacaattgttattttcagctacaaaattagcaagtacatcaaagcaaaatgtgagatatgatgcttcttctactaaaaagaatgacaaagccaacatattacagaacataatttcagagaaagaagagaaaattgttgttaaactttcaggtatgaatatgaatcaagaatgccatttttttaaaagtaaatatctgtttaagtattagcttactagcatattttgtgcattagtgcagataagtccaggaagctcatatctgagggaaatatgggcaatttaggcactagcaagatgcttcatcttcagaaaatcccagcttccaagtgactttgcaatcaaatctttctcataatctgcttattccattgacttttgcaaggcattattttgggcaaaacacacaaattatgactctttgggttggtgagaaatattggcatgtgaagttgttggcttataaatcaaagtataagttttctgctggatttgctgtatttgcaagacagaattctcttcagcccggagatatctgcatctttgagcttgattaagagaaatcaagctgagatgaaagtttccataactagaccaagtgtgagattattacttcataattaatatgtaatgatgatgcatataatcgtaatcaccttggtgaaatgtattgctgatcaatacataatcacttgaaggtcaaaacttctaagctttgaaagcactagttagattttattattgctttatgtagctttacaagtctgttagaattgtaattttcattgagtgtcgtttgtatgttctaaagaaactgttaagattttattttattataaaaaaaaatgcctcctcttttgaagggattttttttttgttagagcctgcttagccaatcctccagaaagctagatcataagatttttatgttagtaaagataattcctagctcattctgatagggaattttgattttatatacttacaaattaaaaattttattattatactaaaatt

SEQ ID NO: 221097 - DNA, 5782 bp, Cannabis indica
aaagaggttttagggtttatttgttaattaagagactttgtaaagtctaattaataaataagatagataacaattttatttgataattaattataattataacataaatagttttgacatttataggattaaaattggaaaatatggtatttgtgaaataaaagataaatggttgaaaaaatggtaaaattataactagtgtggcccatctatatgaatattgcttatttttgctattattttatcatttttattccatataatttaattcctaaccccagttgaaattgcataaaaggaatacgatggtttcattatccaataactcatataacctagtttacattctgtcatacaactagagttttttagagcctccattccttcttcttcacctatttcgtaatctcctttattgttcttcataaatttttgagcctatagtgaatgagtgcatgcccaccaatagcaagtctaatactcaatcataatgtgtaagactatgaagaatccaatacttgaaggagaatcaggctcagatcttgataatactctgcaacaaaaaggaacatggattagagatctgagtgggaggaggcatattattccactgcaatcaatgtaaggtttcttaactttatatgtgcttaaattctattattttagaaattcgtatttaggatgttaatcaacatacttgttagtaaatctagatcatggttaaatatattccaacaacttcatcaaatagaaagatagaaagagaacattaatattgctctcataggtgaaaactttttatttgtgttaactaaggaagctcttgagtaaccaggtgagaatacaaccaagacagtaatagataaatattaacgttggcagaatgctaacattaatatttacagtttctttatgttgtcaagcatggttgataccttgaaaataaggtttgttaacactctcacagttgctgagatcatgaatcagttaactgaactttttgggaagacgttggatcgagctcattttgatgcgacaaagaacttcataaatgcacgaatgaaaccaaatttgaatgtctgtgaacacctactctagatggctagttatttctaggaagctgagatccatggagctattatagatcaagaaactcaagtgagtttgatcctgaatagtttaactccaacttttataccccttacttcaaactaagttatgaataagttgactttttactctcatgagttagtcaactacctttagacgtttaagtgtttgattagaggcccacaaaaaagaggtaacaaacctcctaattgtactaatgctacaaatagtacggctaaagttgagacaaacattgcctctacttcaaaacccaacaagaaaaagaagtggaacaacaacaaaaagcctcttaatgttgttaacacaactaataagggtaaaaaggctgctaattcaaaggcaaaaagaaatggatatgtttctattgcaatgaaaagggccactagaaaccccagtatcctaagtttttgacaaataatcaaggtatttctatttcaattgttaaggattcatgtgttttagagatccctttgggttattaattctagacttactaaccatgtatatgtttttattttagctccagctacttaaacttagattacaatcctagcgagttgagatggatagttagacagaagggtggagagtgtccaagctagaagacaaagctcataattttttttaataagttattttatttttcaaacaatttagtttgaaaattctatttcctattgcaaacatcattatgatattttttcagagtattaattaaaaaatttctctttaaaaggatttcattatgagtagcttttataaaattgggctttaaattctgcgtatatgcaaataccaaaattatatttgtctatttatcaagcttttatgtgttttacttttattattgatacaaaatttatggtataaatcttattaatattctctttaacaagataatctctgcaaagaaataataccacatagaaacttgaacataaattcaatatatatgaataattgtcatttctattatgattttgtttaataagcgaacttctgatctgataggggtggagaagtaattaatatatgcagttcaaagatcttttataatgaactctagattatattcagaacttactaccgcaaaatctctataacacatatattttaatcagacattggtatatattttactcatttttatgaatagattaagggtggaccatttcatgactagtaaactagtaaagtaaatttatcgttgatcctgtatatgttctattatttcttacaatagtaaagatacccctaaagttcctagacatagaatcacaatactttatcatagtgggaggatttttataaatccagcctgttattatttggataacattagtgatgacttacaatgatatgttcaagaaatgaattttaaaataaaactaagaaaaattaatctaactattcacatggatagttataacttatgagaattatgaggaaaatataggaaatgctgctgtgtctattcaaaagacacaagcataattcatggtctttatgaattgttgttaacaacaaaatagttttatagtatctctcgtaattacttatttttaataagcattatacattaatgtaatactagaatccaatgttgatgacttagtgtagaaagaatttattgtttttgaaaaaagataaatgtcacaacaggatgtgcctaagtaccgattgtaagaggttaaatacaaacttgtgtatgtattaaaccagactcatactattgagtgggagccatcaaaagtgtaatccaataagggaacatcttaaataaataataggtttgttaaaaaaaaatattttgaataaacaaattaattaaaacaaacaatatccatgtaacaaatgtgaaaaaatatatttattaattatataattaaattatcatttaactaaccaataaattttgaaaatttgggattgttaaaacaacctaaaatatctttacaaaatttaaaataaaatataaaactaatttaaaatatttaggtttatttgaattatttaatctaattaaattaaatatctaataagataaatgatttgaaaataaccaaatagatattttcaataatatcattttttaatcttataatttaataaaattacaataacaatgtgaggacgattttctctgatttttagctcttgcagtcggacgactggtgccatggctaaaacaaggtccaaaaatcatggaaaatcgaaatctgctactaaaaaatcaaagcgaggtacttcgaaaggtgtttctgatgctgagcggactgagttcctggagcaaatcgatgaaatcgaacctcttgaggtctcggatgaggagatatatcagggagaagggcgattctgtgatgtcgtcgatcaatctctgatatcccccaaatccatgattgaggcgcgattgggacaggatgaggatggaaatgatgttcggactgattttgctcacttcctcaaggctaatgagcaatgtaacagtaacctaagacaaggtatgagttctatcccctctattctgcgatctaagactgtgataagaaatttggagaactcttttaaagaaatagatcagggtagtgggaaagttaagattactcttgatgacattgaagaggaggttttgttttggaagccctcaatggtatgttatgtgcttggagttaatcctccattgcacgttcttgagggttttgcaaaaagagtgtggcaggataaggttgatagtgtgaaagttttgtcctatggtatcttcatcattcgttttcattctatagagtatagagatcaagtcatcaatgggggttatgtcttttttaaccgaaggccagttatcatgaaacctggggatcctaatgtcaactttaagaaagaggatgtgaaatgtgttccaatttgggtgcaactagaggatttagaactgaagtattggggccaaaagtcactctttaagattgttgggcaattaggcaaacccctcatggaagattctattactagggaaagggaaagattgaattatcctagggtgttagtggaggttatcatggaccaacaactcccggatatactagaattcgaaaatgaatatgggatgaatacatcggtgggggtcaaatatgaatggaagcctataagttgctctcattgttcgggaattggtcacttagctgctgaatgtaaaagagctgcaccggccaaacaacaatggattgttaaaaaggataataggaagaccacagacattgatgaagatggttttactagagtatcaaaagggaagaaggttgataaggctgaacagactcaggagttcccagaagtatcaacaaacaacccttttcaagctctgagtttggaaaaacagatgggaaataggggggaaattggaatgaatctgctacaagccgatagggagattatgaatgacacaagaggggggggggaaatccctctctttcaaatggataaaaggctttgttggaatgttcgaggagctaacaatcaatctaaacaacaattaataaagcaatttattaattctcaaaaggttgattttgttggtctcctcgagacaagggtaaaggccccaaaacttggagccttgtactcgaatgtgttcgatggatggtgtttctcttccaacattgcatggcatccaggaggtaagattactattgcttggaaccctcatagattttctgttgatattgtcaagtgtactagtcaactaatgcacttgagaatgtcaacaattgagggatttaatagctttcttactgttgtgtatgcatctaataataggaatgagaggcatatcttatggaaggatttgtgtgggctgtatactaatgaatattggtgtgtaatgggtgattttaatgatattttggcgaaggaagagagggtgggacaaagggtgagatcttatcctgactctgaatttcttagttgtgtgaacttttgtaagcttgaagatgttaaggcaagtgggaattttttcacttggtcaaacaagcaaccggggtctgatagaatttattcaaagattgatagggtatggccaatcaagcttggatcaacaagtatgagtgtgctgaagctgtttttctcaatgagggactctttgatcattcaccggcaattttgtctttacatcctcatgttgtggggggaaaaagacctttcaaatactttaggatgtggaaatctcatcctaagtgtgagacaaaattaaaagcagtgtggagtctgaatatctcgggtggcaaaatgttttaagtggtctacaagttgaaacagttcaaggagagactcaaggtgattaatagtgagggattttgtgacttattgaagcaattaactgatgcaaaagctgaattggaagctctccaaacaagtctacagcagcagccattaacagcccatctacaccaacaggagaaagaagctcgggagaaagtgattcaaaaacagcagaattatacttcattcttaaaacaaaaggctaagatggattggttgcaagatggagacacgaattctgccttatttcatgcttgtattaagcatagattgaggcaaaatcgtattctttctatagaaaaccagcagggctgcagaattacagactcttctctcatct

SEQ ID NO: 221098 - DNA, 1440 bp, Cannabis indica
ttttagactaagaggaacaaaaccaactaataataaacccatcaaagcagaattttgcagggagacataaaatttttatgtattttatataaacagagataataatgtatacataatattagtagctgcatgctgtcatttattatcatatgtggaaagctaggcatatttggaaaatgaagttcctacaattgtagctactcttgctgctatttaaaaaggatgttttcagagagtttatgtaaaatctaaaacatatatataagattagtagtatagataatgatttgttcttatatacttgtaaagtggactgagttgatgtactttgaattgtaatttttctcatgtaatacaattatcataacttactaaattaaaaaaaaggtatacaaaattgtacaagcggatcaaaatattattactagtacatataagtatacattaaaatgtatgatatggccaggcatctgaattctgaagtagttgattatttttattagggcctacatataataacaaaataaaggctccaaattaaagaaatatactccacaggacatctctaaataagtttggcccgttaggagaagtgtatggatcagattatatataatggcttgtcatattcttgtcgccacactttcaatttttttttttttggggagggggcttatatagatatagctagaaagatatacatgtaatattgtatgatatgatcatacatgaagaagtagataatgtttagttgctttcttttattttacaccatgcactctaaaagtcacctttcatggccatcgttttcccattagtcccatctatatatttgttgtttggtttatgtattcatgttttcagtgatcttttcttttatagctatatacttcatatggctcactctaaaacactcaaacttacggttgcataaattattgttatataatattataatgcgatactgaatcactgggacttagattccacccgattctatgataattgaataaatcttgttttcttttccttataactaaaacatatatttatatataaagaagccaataagtgataattttttctatattattaaaatactatttttttttcttaatcaatcaggcctccttttgtttttcttctcaatcaatcaggcctccttttgttattctttttcaagaattaagtttatttcataaggctacaaacttgatatattttctaaagtttgtctctacttattaaatgtaggtgtgtttgtggtgcgggccatgggattttttcctattctttttgttaaaaaaaataaagcgaacatataattttcgtaattcttaaatcgcaacaaaacctataaaaatacagtgtgatgtggaagcgaatcatctagcctatctaagttttgctatttacaaaaatattagaaacaaatgaaag

SEQ ID NO: 221099 - DNA, 3253 bp, Cannabis indica
taatagaaaaaatctcataataaatagactattcttttcataaccaattaattttttaagatagaatctcgtacaaattaaccacaccacttccaaattttaagtttgtcactatatataatatgatatctctcatataataattacttaataaattaggtgttatatatatagagagcttaaatataggtagttaattaattagctagggtttgctcttatttttattcttataatctctccccaccacaaaaacaattaaatattaatattaatatccttttatctcatcgatcataattaattgctactaccaacttccccaccaatatacctactgtacactatcttaattaattaatgtaattagctaatcaaatgattaatatattattttaaccctaattaataacaaattaattaattatactagttcaatcttaacctcatctttattaatcaactttttatttcactaaaaaaatattttaactttaagagactataaatcaaactaaaagcatccagttaggaaatcataaattattaatagtaattagtaccctatatataactacatttttaatattgaataattagttaagaatccaccacaacttataaataaataattttgttggaaacttttgtagtagaatctgtaaacttatatttgtttccgcatcagaataactttttaaaatattgtagctatttaaaattattgataaaaaaaaaaagattattgatcgatttttagaaaattatacaatgtcaagaataaagtttaaataattacttatatcatgtataagaaaaataatctcacgaataataaaatatgtaaatcttatttttcgatattgtaaattacttagagttttttaaaaatttacacatgagactctaaaaaattataacttaccagatcattaaaataagtagattatttttttttcgaatgccaaaatagatagaaatgtaaaaatacctaattatagtagtgcaatatagtgaaagttcttatatattttttttaaaagttactttttcttttaagtgggttcgacatattatagctaattaataatctaattaaattgattggacattatcattaagtctactctaacaaaaatgatctcttctttagcatgtgtttatttatttattttatttattatatgtcatgcatgtttttttttaaaggaaataatgccaagcatgtttaattaattagagaattgttaaaagatattattgatgtataatattttagtttcatatacaactattaatatgattaagtattgaatcctatataatttaaaaaaataatttttaaaaaatatcgctaccaattataaaatgttacatataaaaatacttgtttaattaatatatatttatataaattaaatattgagttggtattataagtgtggtcgaggcacattagttgttctcaaaagtcttcctatttcggctggtaaaaggccacattaattatatatatcgatattagtaattacagtgttcatatactgaaccctaaccctaaccctaatcctaatcatataggcttaattacatcttatatatatgtaacttgaatgatgtgtttgggttctaattattaatatttttcaagaaaaaataattaaaagtagattaatgaattcattaactttttttttttttttttgttataatttaatagatgaatatgaatttttttctggtagtaaaaaaatcatatatatatatgtatattttcacattagggtaagagagatttgaatatgggtaataatgcacaccaatttcattaagtatatatggacttatattatataagaaagtaatttattttagaaaaaaatataatttatgttatatagagatagacaataaattttttttatcaaagaaaaaaatattcattgatcaacctcttttagttttgcactatatattcttattgagaaggataaatattattttggaccttgtgttttacaaaaattactaattggaccctctgttttgttaaataacaaaatgaactatgtattttctaaaattgtacaaatatgacactgaactgattttttgtcaaaataaaacttaataataatatagagatgttatgacaaaactgattacattttctagatttgttcgtgttagaatttgtcttaaagttggttatattaaaaaatatattattttttttttgaaaattgagcttatggttctatttttactattttaaaaaatatagggtctattttgtcatttaataaaacagaaaattcaattgataacctttacaaaatacagagtccaaatgtatttaccctgagaattatcaagttctatcttaaatttaattgataataagtgaagatgtctactctatatgttcttatagagggtactagctatctgtatatttgcagatcgagaggatcacctgtctacaagagatatgaatttgatattatgttcagaatcatgagttccatctcaaaactaattgttaataagtggagtaactcatattcttatacgtggctcaatattttactatttattccatgtagggcagtgtctcacattaataattctacactaaagaatttgtttgattgtcttcactacatacacaccaccatataagaataatcttcaagaatacacttatttcggttgagccaaacgccattcatagaagctgcaatggccgcgttcacaatcaaagcatcccttgcttgcttatagtcaacaagtgggagtttattgcctgtcaaagcataaatctatgtttaggaaggcttaaacgactccacctgattgcttaaaaaacacttatagctgttgcaaaaggttattgtaaagcttcccatgttgttatattttgcttactaaaaatctttctcaagtgataagattttaattaccagcaccaactacagtcttgattaagataaataatactttgaggtaagataaatatgctcttctagtagttcttaaaccctaataatactgagttaataagcgatataaaataattttattatcacaattttagtaattaaaaaatccatgcctatatagcactttttattgaagtgtctaaaccctaaactaatttaaaatcgagtcaaatttaaagtgagacgatggtccccctaccttaagctctatgtggcttcacccactatatatatatatatatatgatacaa

SEQ ID NO: 221100 - DNA, 5590 bp, Cannabis indica
ttttttttcattccatttcattacctataaccaaacgccaccttagtgggtaatataaaaacttttatacattagttctacattctcaacatgtaattttcttacctacattgtcattgtcatgcaaattaaaacttataacaaatacattctaagagaatattattaattagttttattattgtacctaatatcaatgttgtttcattattattgagtattgtaaaaaagtttattgccatatttaataaaataaacaaaaataatgtttgtaatattttcgaagttggctttatatgtttattattatttaattttttttttgatgggtgctttatatgtttattatttaatttcaaaaatatagtttccatttttttgtgtgaaaagattttcaaaatctgattttatactcttttgacttattgtgaattaaatatgagtttttttttttatagaatatttgattttatcctctgttttttaaggaaatttttattcatattttattcattttaatttgatttcttgaccaaaaaaccgtgttaatgtagtcaaaattactttatttatttatagaaactttgctaaaaaactgtccaagttcactgtaattgtttgaacgggctgattgtctgtttaaatagattttgacttttctatttgggaagattttcatttaaatgacctcatcgtttcttggttgtttgtccacgacctaaaaatattctaaagtgtataaattcatccttaggtcactggttttggttagctctcttggtgtatcaattctaaattacttttcaaagttagagagtgttttctttgttgtgtgaagaacttgagtccaacaagttcttagtattttattattgtgttattctgtactgcttcttgttgaaattgtacaggttgaacactttggatattgttactgcttcttgttgaaattgtacaggttgaacactttggatattgttaattaagcttcgggagaagtcttgttcgtgagtcactctttgggaggaagattgcaagttagacattctttgggagaaagattgcatgtgagacactcttcaagatgaagtgtgcaagtgctacgaattgaaagaagttcaaggtctcgacacttcagaaatttgattagaagaatagattttattctctgagtgtggtatcgtagactagaaacaattcgaaagagttctgatacctcgtataaaatattgtgtgttattttattttctgcatttttactttttgcagtatatttctgttcaatcaaattttgtgtctaataaaacataattctatattatttaaattatttgataatttcacttggtaattataaaaacgaaatttcaaacagtaataacatttagcacattttaaatgtatcattttacaattaattaaaaatactcagtacaaattattagtggtggtaggcaccacttataagttttagcatttatcttattattattattattattattattattattattatattataataagtattatatttattatcagctgagtgtggcaattggtgtggatagatagagaaccacccaccgaggcttcacactcgtttcacttctcctgtgcctcacaagtcacaatatcatttttatttttattttatataaaaaaatgaaaaaaaaaaggaaagaaagaaatgaagaaagttaagtaatagtgaagaaagatatgatttttatttcttttttcattacaccacagccattattgctttataccactaaagtaccacttctactactactactactactactaattcaaggaaggaggagaggactcatcgtgaccaggaagtaccccacattcctattctttcttacggaaaagggttttccttcaaatcccaacttcttcaatcttcaataataataacccaaaaacaacacaaacctcatcactctctctctcttacgcggaaaaggtgcattttttcccatgttttctctgttcatgttggttgtgaggaactgggttgtgtaattttattgggttttcttgttttctgagatcggaaatcggaaaagggatttctttttttttggtggggaattggggttgaagctaatttaggtgtggtgggcggagatggagtcatcactgggtaattcagaaatgtatggaagaattaataacagtacgaggagatttggaattcaaattcctgagtcgaatttcataagggcgccattgactgcatttttggagcatacgggtatatttggaggtggagggagctctgtttctcaggcaacacgtggtttggttgggagccggcactctctgattcgtaactctcttcaggaggaggacgaagaagacgacgaatacgatgttgttccgggggatggtgaagatgaggaagatgaggtttctattaggatcattggagcaaccgagaatcagcatgaacttcctaccgttgatggtgctaatgtcgttttacgcagtggaaacgacaatgcaggacccagttcagggagcgaagatagcgagggcaacgccgagtctggagctggagctggagccacgagtaatagcagagactcttctccttatcagagatatgatattcaacactttgctaggtggtttgagcagattctcccttttactttgctacttcttcttgtcttcattagacaacattatcaaggtaactgtttttctattttgatttaacaaaaagacaagattttctttgaaatgcaatatcagaatgtccctttttttattggttttatttgaattgagtttcaggtttttcaattactatttggattgccgcagttatgttcaaatcgaatgatattgtgcgaaaacaaacggctttaaaggtgctttaacttgcattttgatcttatctaatcatggtggttatcagattagtttaagggtcttgaatttttttttgcagggggagagaaagattcctattcttgtgtgcataagttcagtgttcatgcttcatgtgatctgtttttactggtggtaccgaaaggatgaccttctgtaccctttggcattaattcctcccaaagtggtaccccctttctggcatgccgtattcatcatcatgataaatggtaattactgaaaatacagttacaatttaatgctattatctattgaagttgatacattgccaatgttattactgaccattcacattttgtggggattgttgtattatggtcaatggagtgaaatcttccgaaggctattgtatgaactattgacattcaattagataatatcattctgtgaatcataaatctattcaattattcaaatcattgctgtagtttatatgaaatgaatgaatgaattgtatgaactattggcatacaattagataatctcattctgtgaatcataaatctattcaattattcagtgtatctttggcatcagagtttttatttggatatgaatgaaagaagtgtctctgaagttcttatgtctactgtcttttttgctattttcttggaaattaattagattaatttgccctttggattattgattttgttatgaaatttgtcagtattccaccagtgtttttttttaatctgcatcataagaaatataaatataattgtttgagtaatatgatagtggtattaaaactcttttctagatcagttaccaatcttatatatcttagaacttggcaaaggctggtggagtaacttgtcacttttttcttggagcttttaaacttcaacaatagaggataaaataacagaattatataaaaggaaagacaggaagagcaaaacaaagtgcttctcgcttgacaatgataatgtcatgatattctttgaaattgattattttgtagatattatggtccggcaggctgcaatggccctgaaatgtatgcttttggtgtttttcagagatagtagaggtcgtgactaccgcaagcaggttgctttctctataaagttttctaagttgcattatttaatatctcaaatttgccactttttgttgatggtgctaatttcttccagggtcaaatgctaactcttgttgagtacctgttactgctgtaccgagcattgttgcctactcctgtttggtaccgatttttcttaaacaaagaatatggaagctttttttcttcgctaactactggattgtatttaaccttcaagctcacatcggttgtggagaaggtatagattcgtcaatgcaaaacaaattcttttctttatgctgggtcaattcgagattcaagattcaagattttgaagaaatgttagcttgaaattattgtattaataatctaaattttattttgaaactttaggttcagtgcttttttgtcgcattgagagccctatcccgtaaggaagtgcactacggatcatatgctacatccgaacaggtcagtgtagttatatgttaacatcttacgtacaaatacctatcttccatattatatgagccaggttagaagtggaatttggggagaccttttttggtgatttgcttgatcaatgtctttctatatcatatcatattcatgacctttaaatctaagatgttacttccaaatggggttggttcataaaggctagcgatatttgatctttttcggttttaaagataaaaaaaaaaaggaaaaaattcaatttcaggtgagtgctgcaggagatctctgtgcaatttgccaggagaagatgcatgctcctatacttcttcgttgtaaacacatattctgtgaggattgtgtatcagaatggtcagttcctttaaccttaaacccttttcttgtaaaagatttttatttcttctgtcataagataacaaggtttcactgattattattctaatttacagctataacatcatcaaacatgttgaactcccatgaagtcacattttatctattccaattttgcttctcacaaataaattatggtgtattgtatttatcaacatcaggtttgagcgcgaaagaacttgtccattatgcagagccttggtgaaaccagcgggaatcaaatcgtacggggatggagcaactagtttgtacttccaactattttaagacacaccaaccatcattgatggaaacttgagcttctttgagaatcacaaaagggtctcatgtgttgcaagtaaatggattcatactacctatgaaaattcgaaattcgctgtccaatgaattcggaatagaatgtttggacttagatgaacttaaaatcaccccttaccagcatggtttttcaatccactgtagatagcctctacatgtaaaaatggaagaggttttatatttacttgtgaaatgcacacatataataatatatacatgaaatatacatatatgtagataacaaataaaggaatatttcgacataaaaactgagatatgtcaccgtaactgagttgacatcattattgatcatttgatttattgtttttaatgtccttgatttggtaactggtgcattgtcctcttttatttgcctagaacattcaaaaactagttattgtaattctttttttttttttt

SEQ ID NO: 221101 - DNA, 1804 bp, Cannabis indica
attatataataatataatttcctcaattatacataattatctagttagggttttgctaatccatttcttaattccgggtattacagaggtggttctcctgccttgggcaccatgaagatggctcacccacctacctctccaaggaggtggctcgccatacttagcttccaagaacgtggttcacccatcttgggtaccatgaaaatgtccggtccacctagccctctaagaaagtggctcaccatagccactgagaaggtagtttcccaccttgtacaccataatgatgacttgcttgccctatccctccaaggaggtggctctccatacttagcttttgagaaggtggttttcccacattggacaccatgaagatggttcccccacctatcccttcaaggaggttgctcaccttagcctccgagagggtggtttgcacacccctgacctcatgaaggtggcttgtccacctagacctccaaggaggtggctaccggtggcctcaaaacttggtaaatatttcaagcacaaggaagaaagggtacatgatgcacagaggggacaaggtgtgctctttgaatgttagtacaacctgaccaccactatctctgctccactataccagatgcagaacctacatctccacctgacactatcaaagtaatacatgcatggtccccatagggaccatataggtatcaacttgtaaataatggccatgagagctcccatgtttttatttctcttccattgaagaaggggttagaaaatcaccatttgtaagagagcttagatcgatattcaatataatatgattttactccattgatgctcttaatttctcttaagattttcattttagccttttgcaatttgcatttaatttttaaataaagtttatttgacgagttcttactgtcaacaataagagatgaaagaaacaaattttgtacctttgacaactataaataagagaaataattaaaattattgaagaaattgaagatgattttttctttcaaaaaaataaataaaattaaagatgatttttttttttctagggattgttaaagatgttccactagatttattcttgttattgctttgactcatactccctaaaaagtggatcccgaactcgataaaaaaatgggattacttcttatggactttttgagaatgattttgatctagttcatgacctacttcaccgttgagaaacgaaagaagacttacatatctaagtttaactcagacgtagctcgcttctctcgatgtgacgaaaaataggtgttattatttagacatattatcaacttaacattcctttgagaattctgatacttctaaggcaatctctttatattttgcttgtgctaaatatttttcgattatacttgaaattattatcaattttaatatattgattatgattatatatatctatgtatattatcaattttaatatattgattatgattatatatatctatgtattttgaaatagaagtaaagtatgagataaatctacggctatcaattttaatattgatgatgattatatctatgtagtttgaaatatttatttaacataatatagtattggctcccttgctattcaatgctagcttcccccatgcattgcatgttgtgccaagtaaaactcattataaacgtacacaaaagaacgagacagttgttattatagtcattatatacgtgcatttcattattcagtttctatttggctgtaacagaaggattataatttgaatacgtagactaatatctattctatataaag

SEQ ID NO: 221102 - DNA, 4384 bp, Cannabis indica
tacttgtgagtagatctaagatcttggtaaaataatttctaacaaatataccttaattaccaacagtgctataaaattaaatcagctaataaagaacaaacataggtataaattttttaaaataattaacaaatttatgatctgatccattgagccctagatcactgctatccaattgaatggccatttctatccaattgacaatttttattgttgttggatgagtttctgtttgcaacaagaaaatgatcatacaattacaagcataaattattaacctgatgtaaagtacgtaaaccaagaatgccagtaacaaaaatctaaagtccaactgcagctttcactgattcaaaattcaacctaattcatgtacaacgaagcatataagcagctagattaagctaaaaagactaataatttcaaataaataaataaaaacctaattcatctcaatcgtatttttagaatttattttattatacgtcacccaataatttctcaagaattctgttatatagccacattttatatagaatagatatatgtgtttgaaattcttctaaaattttaggttaaacgattttttttactgtatggggttttatttatttttgttgttgtgctcaataagtatttttccattgaactatgaatatgtcaatataattttatttatagtatttgaggattgtggtgttaagtgatgtatattaatctaatcttttgtaagatattattgtattattaatagattgtactttttagtgaaagcatggaaagtctaatttctagatacaagtttgcttacaactaaaactttagaaagaacatcatcaatgatcttgaaggtttataagtgttatgagagtataattttaaatttatgtttgtggattgattgcaaaattaaactttatatcattgatttatgttcttgatagttggctatatgttttggaaggttgtaagtgatgattggaaagtatataggttaggtgaaagcatcctttcacttaaaaatagagaggaatttctgtataatttagaagaacattggttcaaaatggttcttttggctagtataatttagttagtgtcttggtaagatatatatactatacaatgatatagtaattttttttttgtaaaggattgaactatatactttttgtctgccatatatatttttgtgtggctgagggtgtggaagggaagagaaagttaacatatgggatattttactttcataccaatgatgattagtcataaacttgtaattaatgaggttgtgttgtcatgcccctaattttaagctttattatgtagccaactgatgaggaccctcaaatttgtcttattcatggtccacccaatataaggttttgcaagattagattattaaatgaatcagctttaaaaaattgaagtaaattctgtataaccatggcatgtcatctatttttttttttttgaaaataattttattaaggaatagcctcagccattacaatgttttttaaaaataaaggagcactccgctcattaaacaaacaacctgacaaagaacaagacgcccgagcaagagaatgggccgccttattagcagatcgatacacaaaggaaataaaaacattctttaaagaggacaaaatcaagcgacaatcctccaccaataaaccaaagtaagaaggcatatgaactgagctatttattgcttgaacaatcattaacgaatcagtctctatgaacacatcctcccaccctttcctcttaatccagcttaaagcttccttcaagccaacaacttcagcaatttcgggcaacaccacaccaaatttcgaatccgagaatgcttctaaaagttgccccgtatgatcacgcgccacacaaccaaaaccaaacattcgttgagtttcaaagatagcaccgtcaacatttaccttgatcttaccactcaaaggtctgcgccaaatgttgctgttagagagaacaccagtagcaaatgtagctgctgtgttcttagttgcaacgcgccattgatcaagagcctttcgtgccgactggactacacccaacgctgtacaatttttgttctgccagaagacttcattacgagtcttccatatgctccatgatatcatagcagcatcgactatcacctctgaatgcttgctgtccaaaaggttgaaaaaccagctgctgaattcgtccacaccagtagcagcagtaacagccgagagattccaacacgactgggcaaaccgacagccaacaagcacatggaatatcgtctcataataaacattacaaagcggacagataagatcgacattcacatgcttggtgcttaattgaaccttcgttggaagagaacccgaacaagccttccataaaaaatgaagaaccttcgaaggaacctcaatcttccatagtcttttccagtaactgtcatcttcaaagtgaagccaactaccacttgaagattgaagatacttgtaagcacttttgacggaataaaatcccgaatgttccatcatccagtgccacgagtccgcggttgttgaatcactcaactggatactcaaaatcaactgagcatcacgttcttcaaacatgtcttcaatgatctcaacatcccaccctctctcttccatcaacatcagattggaaaccaaagtaccttctagcccttggttaaccgtaagaacataaggccaactatcatgaggcaaccatgggtcatgtaaaacactcacagaagaaccatttccaatagaccttcgagcaccctgccgaacaagagattgggcttcccaaatactacgccaaataaagctaggattttgtcctagttcagcatttaagtaagaacccctcgggtagtatctagccttgtaaatccttccaacaagtgagtcttctttagtgagtaatctccacccttgttttcccaagaaagaaagattataatttctaaggtctcgaaaccccaaacccccaacatgtttgtgttgacataacttcttccaactaacccaactaatccctttatgagaagaattagcttgagtattccaccaaaatttagccattaaaccttctagactagagcaaatttctttggttaagagaaacacgctcatagcatagcttggaagagcctgagccacagacttaatcaacacctcttttcccgctttggataggaatttgttttcccaactgaaaatcctctttttcatcttttccttcaaaaaaccaaggatagcgttcttgttccttcccatgatacaagggaggccaagataaaaactatcttcactagcctcattcagtctcatcatactacaaagatcactcttgatatccactggcgtgttcttactgaaaaatactgacgacttctcaaaattgattttttgaccagaagcaagctcataagcattgagaagacgaatcacatgttgagcttgtcgtcgattagccttgcaataaacataactgtcatcagcgaacagcatatgagaaaccgcaggagccccacgagccactctacacccagtaataagttgaagtctctcatagtttttcaggagagctgtcaaaccttcagcacaaattagaaataaataaggtgacaaaggatctccctgacgcaaacccctaccagggatgataggtccaatagaatgtccaccatgaaccacattatacgacacagtagagacacaactcatgacaagagacacaaaacgactacaaaaacccatatgaagcatcaaattttcaataaacttccactccactcgatcataagctttactcatatcaagtttcagagccatgtatccttctttccctcttcttttacgcttgagataatgcattatctcaaatgaaaccatgatattgtctgatatcaaccgaccagggagaaacgcactctgcgtgtcagaaatcaccaaaggtagaattccttttaatctattcgccaaaaccttagaaattattttatacaaaacattacataaggagattggccgaacatcagtcatcacctcgggttgcttcttcttcgggataagcacaatattagtgtgatttacttcgctaggcaaagacccttggataaagaaatctttgacaaacttaataacatcactaccaacagtactccaacatttttgatagaacccaggagtcatcccatcaggccccggagatttatccggatgcatttgaaagagagcgcgacgaacctcatcatccaaaaccggctcaactaacatttcattctgtgcaaaggtgaccgtggctggagtacagtgcaaaatctcaacaaaatctacagcagtaggcgtaaaaagatgtgaaaaataatcac

SEQ ID NO: 221103 - DNA, 2404 bp, Cannabis indica
gtatttcttacagagaatgtttttggtgtagtttttctgatcccctcctaatttttggtgaggggtatttatagcgattggttagaagaagaaaaggggtaacttgtttttaagtgccaactatgtgcatgcacaagtttccagaaggtacaaaatagggtatgcatagcctacgtaggtattagatgagattagccttcatccagtcttgattgatgtgattcttcataatggagtcgtcactagctctgttgattatcgtgtaatcgccctaaatcaggtttatgttgtctaacatgtcatcttatgggtgttccaagacattttctccatgatgcattaaatgcgaagtgactgttcaactatagccttcctcgcctggagacgcctatgcgtgcgttgactcccaaaggggaagataggcctcttggtcatgtctgggagctagcatcacaaaatatagttgtgatttcttaaggaggttcagattagcttttaactcatcttcgggtgaggtgcccatgtcacccattacagctatcacgtatataaactagggcaatatttactccctaagtcttatttggtgataggtaaataagacttgtgagtcgatctctggtatcaataaaggagatgacacgtgagtcaggtgcgtgggcaatatttatgatcgtcatcattggcttttgtttcttttgcacgcaacgattcgcttcctaccgattgacacacccttccatcaatgccggatggatcgtggaatttaaaccgttgtgaaccctcaccgtacgatggtatttgatcgagagtacctcataccccaagtggtctataaaagccaacagtttccccaactatgtcatctctactaccctttagtatcaagattttcataccaacatgacaaaattctagacgcccctaattttcttctgctcttcctccgccgttgtcaagcaaagtattaccaccaccaggcgacatcgacctcttccatgctatcttcgtgtaagttctctttttatatatttctttcatctgttagggcaaataatgatgataaaatgtgttttcgtctgatttgcttagtttccttgaagtggcggccatggtcgtcgttggtgtgatgccccctttgacaggcgtccgatgacctgtgtcttttctcattatacatttcattttatctactactttcgttgtgcatgcattgtttctattttttctgaggtaaaaaatgggggttatcatacgccctatttctggttgttcgaagtgattttcgtactcccatatttcctttcctttgttgcttggatattttgcacccgatgtctgtctttgtgaatcgttgggttccctttggaagacatctcgacggtgcctctttctagcggttaggcgacccccatgcccctttttgtcttttgggtttgatgtgggggctaactgcaagatttttgttgtttcagatgagtgaagtccttcgtgaccttcacacacacagtttcttttggctcgaccaagaaatccacaatctcaatcaaataaactccatgtctaccctcgcgactaccgaagcaaaatccccaaaaaaggggtcaaagaagctggccacctaagaggaggtcatgaagggccctgtcatctacaagaagtttgcatgccattccaacggttgggaggctgacgaactgtattcatcgttgacctgcacccatcagctggagcatcactgttgcggggatcaaatcctccggttctagagattgccattgccttcctagggatgaggagataccaaaccacaactataatggcttcgtggcatgtagtcaaactcatatgatattcagagctttgctccccgtccaggactattttattgacgtcgtcatttttgtcggacattcaccctaccaactgattttgcaagcctaccacctgttgtgaagcttgttaattttttatgtagccaggaattgggctccacctagttctacagagattttgtatttttataagcttcaatcccatctggccaatgggacctcgataccctttaacttccaaaaaaatgtaaaggagtatcgccataggttttccatctcctccgggttcagggcttttgagcgaatagatttgctgacgagctgggtcaggattccccccatgcatagtactgctcccatctaactcttcctaaaccatgcgtaagtgtttgcgggctacaagaaggaagacttgaatgtggatgacctggttacaatgaccaactgcaggagggccaagttgatcttggagaatcaatctgtttatgacttcaacttgtccaaagtccactgccccaacatccgaaatccttggagtgagaaggtgctcagggtagacatcattttat

SEQ ID NO: 221104 - DNA, 2789 bp, Cannabis indica
acagacgctttatctttgaacttaggaaggggtgggagacgatattttcttgtctagcagaacatatatcgtctgggaagatatagttgacactataaccgtgggtcgaccaagtttttttgtctgttggtatacctataacaaccattgccgtgaccattgctaggcacactacttaaatatcgtccagggatagaatgatggcccgcactaaacagacagtgcggagaactactttaactgatccccacgtcgcttagcttgccacaatgccaagcgctgaacaagcccggcctgctgctgaggaggaagataatgaaggggacatcaaagtccaagacgtggaggatcagtgcgaggtccgtctttaaagtccatatgaagccgatgaggagggagttgcttggagattgcccttcgggggttacaatgaagaaggggcgtccgtgtccaaagtgggtgaattcttggtagaaggtgaaggcaagtttctcctgaatttatagtaacccaagccaagacgaagaatttggagaaggacgactacttgggaaatgtcgaatgcttcttcgcttcgccaaatcaccatgcacctagtccaagaaagggattttgtgtcttgttaggtgttgataccaagcagggtgcagtgctacctttgcttccgcacttcaagaggattgcagactactataatctctgcgcaacccagttcactccgaagggcgtcaaatacttatatgccctgttcatcctttatacctcgcaaggattgggtaagccatctcgcacgacaccaactggcatttcgacgtgaagttaacttccaagtagagcaggtttgggtacttctacttctctcaattggatgagaaatggttgaagggtactgtggacactgatgtcaacaaaatagggcattttgtggacaagtactacttcgtgtagggaatgggtaccgtccacacttagttccagcaaattccctcgtattgctgccctcctttcacattaggactcagggagagggcaaaaaaaatcatcgactgccaacagctgctcagaacatcactttgctgaccactgaggctagctatgtgaagtacaagctcttcccaaaggactttgtgcaaaagcccttgaaggaaaagaagaaaaaggcaaagctaggccgagctggtgaggccaagcatgagggagagctcattcaactcaagtgtgagcctaagttgaagggagacaacggagccaagcagtacgctcaagaatatttaaagtaggagaggccgagcaagaagaataaaaaggctcccccaaccgaccaagcacatgtggaacacgctatcaggattatggaacttgatatgccttctcggtcatccactcctatggagggaaaagggaaggccgtcctggtagagcacgaggaagactcttcagacgatgatttcccatctgtgcttgtttgggaaaatgccccagcttgcgtgcatggtatttatagcttgtacttacttcttttgtagtatgcttttatatacattatatttgcttctatctgcattgttttgtttgtgtagaaatgtctcaaaaggtactccaggaattgaagaagagagttagagaaaactcgggccagtctcccccgcccaaaagatctaaaggtggtgagactccgtccaaagagaaggcatcagtcaaagaggtcattgacctttctaaggagcggcttgttgtggaccttctaattcaaaaggtctcgaagtcaaagagttccagaggggggagctcagacgggtctgattaggctaggaccccttaaacgaccgtggcactaagcacggaggccaagatgggtaaggatatgatccaatattatttgatccgatcacttcttgaagtgcgtgaccaactatctagggcagacaatgagctatctttggagctggtcctcggaggagtcttgaaggaagctactcagagaggtgaacaaaaaggttcttgccactaacacgagggttgaggagctgaccaaggagatgcaagagatgcctacgaccgagaaactacaggaagataatgaagctttgtctaaggaggtaaatgagcttaaagacgagagggggagtctctgcactctgctcataaagttagagggggagatccgaaccaagcaaactagggaggaagaactcgtgaggaggtggaaagcctggaaacagctgcccttgaggtcttttatgaattttgggaagctaaccctaaaggaaatttttattaccttggtgaatctaaggagatatatcttaattactgtgtgggtcaggtagccaaaggaaactcctaggcaaccacttctatagttctagccgaacagagcaacaaaacccaagttgctcagaatgttgaacctcttgcccttcacaacaaagcgatccttacaaagagcctacgagtatcgttgtctaaataattttctctttttattttatatatgtttgttcagcccataagccttttttttagacaaagatgaccggccaagcggtttttaaacttgggttatgtttttcatattaagacaactggttgacccggtagctttgaatcccagatttaccgtgctttgttatctttttcaatgaataccatcccttgttttgataattgtttgtgcaactatgtttgtgttttttttgagcttgttacttttgccaatgctttgtacgggtataggtgccccctaagtgaccgagtagacttttaactcttggtcacttgtattttac

SEQ ID NO: 221105 - DNA, 1419 bp, Cannabis indica
tacgttattttcttcgccgagtactttattatgattaaattaagctaataaagatgttcaatgtatgaccattcaaatctaatctaatcctatgatgggcaatgtaatgtatcattatatataatttaatgtcgacgctgtgtagccggtttgaccgcatagaaagtgtcactttatcataataaaataattattcaattaccaccacccattaattatactcactatgctccattattattagatcaaaatggaaaatatctaattattattattattattattttaatttgctaaaatatttgactaaagaaaacacattattgatcatttttttatgcatagattaatgttatcttaataattcttcaaaaaaaaaatcttcacaatgaaattttctgcttaaacaatttagatttcactacataataatgaaattaataaattaaaaaaaaacaagcaacaaaagacacaataaaagaaaaaaaaagtttcaatgtgtacaatttctcaaaaatagttgtgtctgttagaagaagaagtatggtgaaacattcagcgttagatctacttgctaatattcgtcaaagataatcaaagatcaatttacagaaagaccaaaccctaggtctcatggtcttctttctaaactggaacaaaaggccggaccaacggagtagagtcgtagcagaaaggagccgccggatgctgccactttttgaagacgatcggcttctccgactcgctactctggcggagacgctgatggtgatgaagatgatgatggtcgtctctagatttattctccacgtccgatcgactagcgtcttgggagaagatggagaaacgagaggcgagagtaaaggaatcgctacgttccaatcggatacggggctgatctgtaaggaagccggagctcggcgctgaagacggctaggttggcggcgggttccggggacagagctaggtctagatacttctgccatggaaatgattgagtgagtgagttcgtagatcgtaaagaagaagaaaagaagatgttgaatggttttgatttgggggctaagggttagagagagtcatatttatatgataggggtttgagcttggggcgtgtggagtgcacggattcaagtgggccctcaattaaagagggtttgaaaaacgagaatcggacccaatatggatcttagttgtcacacgcgcctcggctgtcggctcccctttcttagagctcctagctggccataggattcttttctttactctcaacagggctgtaaaaaaatttgtaaaccaataatcccttcaaaaccgaaccgtaaaaatcgataaaaattacaaactaaaataactcgaaaaaattacaatctgaacattacaaactgaacatgggcaggttgaaaataagtccaaccc

SEQ ID NO: 221106 - DNA, 3783 bp, Cannabis indica
cgaggtaatgacttctcacaaagctttaattcgaattttggaggtagaggcaatactaataactccagaggtggtagatctggtgtgattatgaataatagaattcaatgccagctttgtctaagatttggacatactgctttggactgtttctttcgatttgataaagctttctcaggacctaatcaaggtacaagcagtagttcacaaacatctcagcaaactcaatcacctcaggtcaatcttaccactacagaagctggaaatgacagtaattggtacccagattctggtgctaccaatcactgtacaccacaggctcaaaacttagcaaattgctatgattatggtggacaagatcagatgcttgttggcaatggttcaggtttgtctataaagcatattggtcaatcctttatctttccaaatcattcatctcacccacttgtgctcaataatctccttcatgttcctgaaattactaagaaccttattagtgtgtcaaaatttgctaaggataataatgtttattttgaatttcatgctgatatgtgttttgttaaggaggagatgacccattctactttgttgatggggatacacaagaatggcctatatacttttgatgtttctcacattggacctgttttcccaagtcctacacatgatcaaagtgtccaagaatcgactttaccttccccaaacaccaacaacactcactgccagcttgaaagaaaaagcacctatactgttaccctgcaaaattccacaatcagtgtttcaaattgtataaaatgtaactctagtgttcaaaatgactttactttgtggcataatagattagggcatccttctgaaagaattgtacaaagtgtccttcaatcttgtaatatgccaataagcaataaaatttctcctttctctatatgttctgcttgttttcttggaaagattcacaagtttccttttcctaaggcatcctctactgtcatttctgaacctctagagcttgttgtgtctgatttatgaggtccttctcatgtaaactcatttaatggctataaatactacattcactttgtggatgtctactctcggtttacatggatttacctcttaaaacagaaatcagatgctttcaaaacctttcttcatttcaaatctgaagctgaacttcagcttggtaggtctctcaaagtcctacagacagattggggaggggaatttaggtcattcactacctacctaactgagaatggtattcatcatagacatccttgccctacaacacatcaacaaaatggcttagctgagaggaagcataggcatattgtggaaaatggcctcactctcttagctcaagcctctcttcctctcaaattttgggatgaggcttttaggactgctgtgtacatacacaacagactccctactccattactgaaaaatagatctcccttggaagtgttatttaacaccaaacccgactacacaacattcaaaacttttggttgtaaatgcttccctaatgtcagaccttacaacaaacataagcttgaatttagatctgctccttgtactttcctaggatacagtctaaatcacaagggttataagtgtcttgatactaatgggagactctatatttctagggatgtgatatttgatgaattttcttttccctatgagcacaagactgatctgaatcccaccttgacttctcagcctcctattccattgatttcagctattattcccacttgtcctcattctaaacctggctacacttcagctgatcttctcagatctatttccacacctgtcatcactagtccagcacctcatgttgaccaacatgctttatcagatacacatttacctgatcatagtcaacattctatttctgttgctaactggcttcccagccagccatctgatcttgttgcaggttcttcctctcatgatgcagcagcttctgttcctgatgttattaccactcagttgcagggaacaccagaaccagctgctgctccttctcagtcaccaaacactgagcttgctgcttctcctagagttgatgcagacactgttatcagctaccctgctattgtttcttccccagctgctcttcctctaattgctagttgttctcatgctcctgggaagaacaacttacacagaatgcatactcgatctcgatcaggtatatacaaacccaagacctttcttgttactaaagaacctgccactttacaagaggctcttgctcaacaacattggaatagtgctatgagtgatgagatattggctcttgccagaaatagaacatggattcttgttaaacttcctcctggacgacaagctattggttgtaagtgggtttataaggttaaagagaacatggatggttcactcaacaagttcaaggctcggctcgtggctaaagggtttcatcaacaagctgggtttgatttcactgaaacctttagcccagttgtcaaacctgttactattcgagtggttctcactttagccttagctcatggttgggaaataaggcagttggatgtgaacaatgcatttctcaatggagatttgcaagaagaagtgtatatgactcaaccacctggttttgaggtgcctggtcaagaacacttagtgtgcaaactcaacaaagctctctatggcctcaaacaagctccaagggcctggtttgacaagttaaggcatagtttgctagctcttggttttgtctcctccaaatccgatcactctctctttatcaatcacactcctaactcaacaacacttgtcttagtgtatgtagatgatatactgattactgggagtgatccaaaagctgttacaactcttattgctgccctacacaatcagttctctttaaaagatcttggctctttgaaatatttcttgggaattgaagtaaggtacacttcggatggcattcatctctgtcaagccaaatatgccaaggatttacttcttagagctcaaatgtcaggtgccaagccttttccaacacctatgactagtggccttcgactatctgctcatgagggggaccctatgccagatgttcagctgtatagatcaactgttggggctctacagtatcttaccattactagacccgagttatcctttagtgtcaacaaggtctgtcaattcatgcaaagacccttgttgacacattggcaagctgtcaaaaggatacttaggtacattggtggtactacagactttggccttcatctcaccaagcctcgatcttttgagttaacagcctactgtgatgccgattgggcatcagatcccgatgataggaaatcaacctctggttttgctatcttccttgggtcaaatttagttgcttggaagagcaagaagcagcagactatttctcggtctagcacagaagctgagtaccgtagtgttgcaaatgtaacagctgaacttacctggatgcattacttgttttctgagctgcatattcgaatgccacagcctccaactgtgtggtgtgacaatttgagtactgtgatgctcacacagaacccggttctacacgctagaactaaacatattgagcttgatctatattttgtcagagagaaagtgatggacaaaactattgagatcaagcatgtttctgcacacgaccaacttgctgatggtcttactaaagccatatcaagtcagagatttctggatttcaggaacaaactcaaaattgaagactattcaattatgagtttgaagggg

SEQ ID NO: 221107 - DNA, 3756 bp, Cannabis indica
ctttcaaaatttacactttggcttgactgaatttggatactactattatttatttttaaaaaatgactaataatataaattattatacgtatatatttattttcatttatataaaataaaattctatcattaatataaaattaaaaaatctctaaagcaaatgcttttttttgttcttaaatatttttatatgcagttgtttgattatgctactcaattactaatagcattttatatattgtggttgtttgatgtgtattagatcgatatatactcgataatgtttaatttgttttcgttgttccaatacttacagattcttccaaaatagttggttccagtgagtatttttactggatgtgtgacttactagagcattgggtattttaataccatcaagaaaaatttaaagaacacaaattaatggaaatggtgaagaaatttcctttaaaacagtttttttattgctgagctaatagaattatctagagtaacagtgcaccaattatttttgcataatattcaaactgacaaagaggacaaagtatacttctatcaaacattattgtaacaaaattaacattaacaataaatttttaacataaaatcgcatacttatttcttttccaccaaaaaaacaacctaaaaccttgaaaactttgacattttcctcctattttgtgataaggctcttccttgatagaaatatatttatctttcacatataatagcttcagaaattagcgtaatgactctattttttttttttttggtgttagagaagagagaaaatgtttggagtgaagagagaaagagaaaaagaaaagaaataaaattgatggggtagaagggagtatttttaggtttacacaaaagtgtgtatatattggagatggtgcaaaaaaatttatctatttttttatattagtgcaaaattatgcattaaaagtaaaattttccaaataaagcatgtgacgtgtttatgtgtcagttcaatttgacacttaattgatactattttaatggtatcttaattttgcaaacagaatctaataaggatatttccgaattggtttggtccagattttcaacttttttaaaccaaaccagaattatggttttttaaaaatataaaatcaaattagattaattaaatgatcaaaccaaattagattaattcactcaaaaatagattggtttgatttaaaactatagtttatatttgtagttgttctaaattttttaccgtaattattcatttttatggtattttttcttttaataaatttataatacataaataacaataaaaaattattatcataacaatattaaatcattattaatattttacttaaatttttttctaaatatcaattcatccaaatatatatatattgatatagtcatcactcatgaatttacgatgtagatattcgcggactgtacaggaactttttcaaattaagatatctcatcgtttaaccgaaagatatacttatcaaaccataaattattaaagtaatcgagcaatatgagataaacttttttttttttttggttatttttacaaaaatgtccactgaaaatggtgttagaggaagagagatatattacaaatgagaagtattttgaaaacacaaactcgaatttgcttcctaccttctaatggttgccgtgttttgtattttccttcatattcattataaatttccttttaaagaaaaaaaaaggacaattctgacaatttacaattatcatcatagttgtctccgccacggaacacgaactcccaaatactttcctcacggaattattcactaccacactctctctcttttcctaggttgtttgttgttgttgacccttattccattaaactccgacacgtcagcagttcttgatctcaatgacgtggcatcaccatagctagatgatcttcatctttctcattcaaatttgatatcatcaccacgtggcaactcttaatcactaaacaaaaacccaaatctcttcattcttctccttcttataatatatgctctttcaatcttcatttcttaccactaaaaaaaacatttaatataaataaataagaaaaacgacaatgggaaacataaacgacaatggccaaagtgccacaaggcccatcaccaccacaaccggtgaagactacaaactcgtgggtttctctaagttcgtccgtacaaatcccaagtccgaccgtttcactgtaaaacgattccaccatgtcgagttctggtgcggcgacgctaccaacaccgctcgccgattctcgtggggcctcggtatgcctattgtagccaagtctgacctctccaccggaaacttctctcatgcctcttatctcctccgttccggtgaccttcaattcctcttcaccgctccttattctccctccataactacagattcaaactcttccgcttccatacccacctttcaccgctccactttcctttccttctccgccgcccatggtctcgccgttcgtgccgtagctgtcgaggtagacgacgtcgatttcgccttctccactagcgttgctaatggagctattccctcctctcctccgttaaccctcggtgacggcgccgtcattgctgaggtaaggctttacggcgacgtcgttttgcgttacgtcagtttcaaaacccagcatccaaatttctgttttcttcctggttttgagtccgcgattggcgaatcggtgcccttagatttcggaatccgaaggctggaccacgctgtgggaaacgtgcacgaattggtggcagcggtttcgtacgtgaagggattcacgggttttcatgagttcgctgagttcactgcggaggacgttgggacgagtgagagcggacttaattcggttgttctggcgaataacgacgagacggtacttattccgatgaacgagccggtgtacggaacgaaaaggaagagtcagattcagacatttctggagcacaacgaagggcctggggttcagcacttggctctggctagcgatgacatatttaatacgcttagggagatgaggaagcgaagtgggttgggtgggttcgagttcatgccttcaccaccaccaacttactataagaatctcaagaatcgagctggcgatgtgttgacagagactcagattaaagagtgtgaggaattggggattttggtagatagggatgatcagggaactctgctccaaattttcaccaaaccactaggagataggtaattttttaatcatcttaaacttagtcttattagtttaaattatgcaacattatatatgtgtaatgtgttgtgtagcattagctagtaatgtgccttagtttggtaacaatcatttgactgactatttcttagtttgttgattctatgttagttatactatagaccccactttcctattttcataactatgcattggtctttatttaatttacatataatgtaaatgcataccattgaatcagagctattgtttgaaatgtgcagaccgaccatattcattgagataatacagagagtagggtgtatgatgaacgatgataaggggaagctgtaccagaaggtggttgtggaggtttcggaaagggtaattctcagtgctcttcaaatccattgaggagtatgagaagacactcgaagccaaaaatcgcggcctaaatcattcaattcattctcataataggcatactgtaaaagtttgtttctgtaagccagtccgatgca

SEQ ID NO: 221108 - DNA, 1714 bp, Cannabis indica
ctggatctagcttctgttctgatgccaacggaggtgatgggtatatgaggagtcactatcgttatttttctcatgttttttttcccattatcgacaaatctaatgggcgttttgccggtaattgatatattttggatcatgtgaaaaaaatgtttgttataagaaaccactattaatgtggattacaagctttctcttcaagttctcaatgaaagcgctaaaatatggaccaaaattttcgataactaattaaataaataaagatttagagcaggaaaagaatatggagaccatgatttttacgtggttgggacgttaatgagccttagtccacgagttacttgtattgagatagggaagatggagttctctctctagaatttagcagcgttttagcttaatacccatgaaagagaaaaaacagaccccttttacatgtgatcccatgttcctatttatatggtcctatttataggcagccatggggtttgtttcttttattcgtctaaatgcttcacttgatagaagaaaatacattgatagacataaataaatcaataattgtaggcacatgagtttgtcttgccttgtctctttatctttattgggaaagcttcctaacatatcacattaactttattggcagttgtgtcagctagtgggtggaccattatttgtctttgtttgacaaaaaatgggacaacaagaacaattactttaaaaatgaaattagtatcagctataaagtctaaatcgtagtttcaaactaaaccaattcgttattaagtggactagtttggtttggtttgagcattttattggtctagtttgtttttaaattttttaagaactccatattggtttggtttaaaaaaacaaataatttggaccaaactaatctatgaacacccctactaaccccgaagaggggcttcgtgcgtggtttggaccccacactaaataaggcaggatcttgcctctgcatccgtactttaagaaggttgcgaattactataaaatttgcctgatctagttcactccgaagggcatcaagtatttgatcgtgctattcgtgttgtatgccaaacaagggtggggccaaccttctgcccatgatacaaactagttcttcgatttaaagtcaagcccaaaacaaaatcggtcaagttacttttacttctcacaaaatgagtatcaatatttgagggacacaacacacaaggatgtctcaaagatcgggggttcatccaagattactatatcaaaaaggacgtgtaaagaccgcttagtttaatttaaaaattagcagttaattatgataaattatggaaaagtatttatagatatttaaataattatttatgctgttatttgaattcagaatgcattttatgtcatatagtgaaatttcataattttgctcgttcggtgcccagcaacatggaactggcgtttggctcagtagaatcacaacttagcatgttagtattgtgaggcggttttttagacattgggaatgtcgagattggtcgggaatttaaaatttcccagaataccctttagtgcccttttttgtcattttagtgtggaggggcaaaatggtcattttgtcccaatgatatgttgtcctttagtggactttatgttgtgaaaatatgtgattatgttggatttgtattagctgaataaaaagttgagttatgcattttatctt

SEQ ID NO: 221109 - DNA, 2242 bp, Cannabis indica
agacattatttagtataaattagatgaaagtctacaaattgataatgagtatatttttaagtatatatcatgaaatttctttttataaaatatagagagtaaaccgaatgcgtttttgctacaattttttatagaaattttaaattatatatgaatattaattggacaataataattttaaatatatttttaatgtataatttttttaatcaatgataaatttataaagaattctagaaaaaaattattatataatttttatatatataaatataaaaagtaagtaaagaaatatttgaaaaataattataatcactgtatctcacttatagtcgcaactacttttaaatttaatatcatcatatgttgcttgtagtcattatgagtccaattataaattaactaagtgaataattagttatttattatatatagttatataaattattttgaaaaatttcattaaccatgcttatttgtataaaataacgatattattttcccaaactactattttcatttaatttctcatctctctctgtgcttctcttttcccctggtttttctctccaccaaacccaaactccaacccccaatagctacaaacccagataatccaaacccaaaccaccccacctctcttcctcctcgacttctctcgcccaaccaccgacgccacacaaaatccaatcaaactcgaaacccaaagccccctcctcggctccattcacttaataaaagttcaaaaccaccaccaccaccaccattttcagtgttgaacggtgccaccatcactaagaaacaggccaagacagagcttagaccaccacaaacaacgacaatcgaaacatagtggaattgtaaatttttctttaaaaaattagttgaatttttgtggattgtttgtggtggtctgttatttttacagtgatatccatcgacaaggggcagttgatagtttagcttatctggttttccaatcttctaaatttttgttgataggttatcgataggatatctattgtttgtcgatggtttggttaggattgtggcttttcacttttttcaatattttaaatgtttgtcagtaggatatcgatatttagtcgacaatttgtcgataatttttattaggttttgtaagaactttgaatttgtcaatagtatatcaacactttatctatggcttatcgacaattttggttatgttttgatcttttttaagaattttaattttgtcgataggttatcgacaatttatctatgggttattgataattttgcttgtgttttaattttaaaggatttgaagtttgtcaatacaatatctaaagtttatcgatggtttttagtttgcctaaattaatttggaaatatggttgtttatcgatagtttaacgatactatatcgatattttatcgtcagtaatgtgtttgtttaaattattttgtagattaagtagttattgattttttatcgataggtttgctaaatttttttcttttgcagatgcctccgaagtttatagttcaaatccctaagcattttacaggccgtgtgacctatataggcagtgatatatatagtaagattattaaacagatatttgataggcacaatttgactgatagggcaaaggaaagctctttcggtcaattttggcgggttggtcctccatcatttccttcagtattatttcaccaactgatgcttcataaaatgaatgttgatgttgagaaagcagaataaatccatttttacattggacaggatgagatgagatttggcatggtcgagtttgcactaattacaagcctcaacttcacacaggggctaacacatgaggagaaaaatgtccactcgaggtcagaccggttgataaacctctatttcaacctagcatgcgagatttcaaaagatgtgtacaagctaggggtgtgtttgtttgtgaagacaaatttattgggttgtgagggaaacacatttattaccacagagggatatgttgaagatcttgatttatttttcaagattgatacactatttttactgtaagcgtaccgtgttgttatagcaaagttttaatactaaaaaggttatcgaacccacatggattgattattaaattttactaattattatacttttaattttatactttaattagataacacaaagtaaattataattcaaaagcaaataataagataaatagaaaaaataaatggacaaacaatgatt

SEQ ID NO: 221110 - DNA, 4278 bp, Cannabis indica
gttttggctggcatgctttgccattgcacgattttcagataaagctatttttttgtttcattgagccattctataacactatgatgaatttcatcatccacttttttcatcaaccatagctatgacttctcctctgtgtttctccaagatgtctagttgttcaatgagtattttcacattccttttgtaagttgcatagtgacacaatcgattcacatgtcgtaggcaaccaagaaatgtgtttttgcataggtcatacacagctgatgtaccaagtgatgtaataaactcacacattgtagtactcttgtttgcttcttcctttagcttcttgtttttcaaatatatcagaaaaataaaaaaaaaaaagtagtatgttaagctgaatgtatatgttaagtaaaaatagataagtgaaatataattgttatgcacaacaaatgattaagaccagcaaacaccataactgaaaaagatatatataaacaaagaattatactagttgaaggcatagcatgtgaatctatgagcaaaatccactataaatggtgaagaatacaacaaaatacaactttggcttggtgttcaaacctcgttaaaagaaaggtgtttagttaaattcttgcattttccatttaattttgctctcaattttatgtgatttcttgtattgatcgttgatggcttgagttacattttcactatttggtgttctttgtcgtgtgttcttagatgaggtgaatcggtttttaccacatcaataatcttctagatattccttcttcaaaagaaaataatagaatctttacacaaaaatactttcttagatattgataacgacagtggtaataattaaaatccttaaaaacttaattagtcacaccaaaaaaaaaggcaaatgcttgcataatccctttttaaacacctcacataaccattaaggtccttttgtttatgataggtatttctaaccacatttttgtagtttgggatgttccactcttataagtaattttgtataataatttacaaaaatcaacaatgacatcacctatttcatttccatactctaaaatagttcaatcaataattttgttcaactttggaaatgaaattttttatccttctaacattcattgtggaaaaacctcgattgaattgcgataaccatttttggcttgtcaaggatgatattagcgagactgcacagctaactaactttgtcttttaagagtggttgttagaggttagatatgttgaacacgacaacaagtgaaaatgtaattattctattattgaaaaagtaattacaccaggatttgaacactttatcttgacaacacaccaagcactcacacttttatttactactaaacacctacaatacacttatatgactcacactttataacactttgtttacactctaactcttttggacacactttgaaaaacttcttgttggatgcacaacttgagaatctaagatccctatttatactactaaaagactaactataatattctagaaacttctacctaattatgttactaaaataaacttgaagttttcacaagaccatttttaattacttttactataatgggtttggcctctctaaaaaattttagagagttggtgatgattcttcaatactccccctcagcaccaacttgtttctttttttcttaaaaaatgataatgtacctccacatgctttgttcgtgcatgaaacactgggttttcagctagacaaattgtagattgattatcacaatgaagtagcactgcgtagtttgtaaactggtgtagatccttcatcagttgcattaactatgtactctcttgagttgtcattgctgctactctatattctacttttgtggttgataaagacattgttgattgccttttgctacaccaagacactactccatatccaagcttgaatacatacccaatagttgatcgtcgagtatcatgaactccagcataatctgcatcgcagtatccaatagtcttgcacttatcactttcttataaaggagaccacagtcaattgtatcttgaacataccttagtatttatcgtactacttccagatacggcttctttagttgctgcatatatcggctcactactccaattgcataacaaatattcgatcaagtcaatgtaaggtagactagactacctacaagtttctgatacattgctctgtcctgcaagtccttcccagcatgagcacatagcttggcttagcttctataggtattgagatgggcttgcactcaagcattccaaatctttgcaacaaatctttagcatacttttgttgatagagaaatatgccttccttagttcaatccaccaagctccttcatttgaaaacgtattaataggctctcctttgtttaataaattttggtgtcatcatctctagtgataatgagatcatcagcatatactagaacaatcgtgatctttgcttcccttactttgaccgaataagcttgaatctgcatgcaccatgaaatatccactttctactactgaactcaacaatcttgccataccatgctcatgagcttgcttaaatctatagagtgtctttttcagtttgcaaacatagtcgggtgtgctctatccttaaattctctggttgctccatgtatatctctcgatctagttctccatgtaaaaaaccgttcttcacatccatctgccatagtctccagtctttactagccacaagtgttagtaggactcgtacagttgtaatcttagagactgggctaaatgtctcgtcataatctagcccatgttgttgagagaatcctcgagctactaaacgagccttttatctctcaattgaaccgctgagatgagttttaccttgtagacccatttgcatgagatggttttacttcctctggcttttgcactagttcccaagtctgattcttctccaaagcaactatctcttctttcatagcttcaaggcacttagagttttgatatgcctcctcatatgactccagttcattgaacttctcttcttcagctagtagcattggcgtattttggatttggcttttgtgctcttgttgatcttcaaagttctggttgtctatcatcatgtcatgctctttgatacacccttgtttgctagggactatatgttgtgtcttcgttatcttcattttgttcctcttcatttaattctggagttaaaggtaactcaacaatttactcccccattttttgatgcaaactatctttcatttttttagaatctagtaatgcttccttttgcgatgaccaccatgatgatacctcatcgaagaccatattccttgatgtataacacattctagttttagggtcacaacatctttaccctttccgttggctgtcatatcccacaaagatacattgtatcacctttttgtcaaattcgctacataggtgccttggcatgaatacgtagcacacacagttaaattctcagaattggcttactctaggtttatagccctacaatttctcaaagggtgaaatgaaaccctaactttgcttgaggaagtctattgatgacatgagttgttgtcttcattccttctgcccaaaatctcctggaacattcttcgcatgcttcgacatgttctgcaagaaggaagttcttcctctcagctactccattctattgtggtgtattggcacatgtgaattgatggcgtatgcgaaattctcgaagatacttaaaaaattcatctgaggtatattcgccacagttatctgtttggaggcgttggattttcttgtcaacttctcctttagctatttctttgaattcttaaattttgaaaaagttttaaatttttctttcataaagaaatacgtaccttaagaagtcgtcaatgaatgtaaccatgtaccacatgccgctgattgatggttgtttactcgcccaaacacgtcaaaatggaccagttccaatggtgttttagctttaaattttgaatctttatatggtaattgatgcaccttgtcgtattgacattcggcacatatggtctctattctaacctcaagttgaggaagacccttcagcatagatttctccatcatcaccttgagtttataataactgacatgtcctagccttgcatgccacaaatctgttgttttattcttctgagtcttgtctacataagcgaactctactgacattacatagacagaatctaagcatcatcctctcatcatcagtgttc

SEQ ID NO: 221111 - DNA, 2055 bp, Cannabis indica
gatgaaagctgtgtcaggagcttttcttactcatccttacttttggggtagttctgaagaagatggtgataatggtgagattagtttggctcatgtgatttggaactttgtgtacccttctgcggccggtggtgtagataatccgatgatgaatccggtggcagcgggatctccgagcttggccggaattgggtgttcgaggttgcttgttagtgtggctgagaaagattttctgagaaagagagggataggatattatgaggctgttaaagagagtggatggaatggtgagatagagttggttgatgtaaagggtgaagatcatgcctttcagattttgcattggaatactcaaaactccaagaatctcatcaaacgtttggctcactttctacaaaattaattaataattatgtttttccatgtattgttggtagttggattgaaactaggggaccaagtagggacattacaaacagacaaggatgaatactctatcaaatccagctctccaaatctgccgaaggtcttagctcataaagtcattcccattcataaacatctttaaaactctataaatgtaaactctatatttaaatttgtttttgtgactactttgttatttctttcaaagaaactactttgttattatttttttattatttttattacatttcttttgtactttaattaatgatattgtagttaaaatataatatttaaatgattaaatgtaaataattgatgtaaaataaaaaaaaatagaattttaataaaatattttaaaagacagagaaaataaggtgagtcataagcatacaaattagaagttgtgggtaagggtgtgcagaaagacatctaatttaattataactgacccatccaatcttaacagatctaatagaatcggatattcaatcataattggatcggatcagttgttggatgagacattcgatctagtagataattaatcaaaccgactcaattatcatccaatgattattcaattatatttatatatttttaaaatatatttataattttatatatttaatatattttacttcaaaaatatattaattgatttaatatataaatgagattaaaaaaaaccttagatctaaaatattaatttccattttcctaaacgctaatgaaattatcaatgcgtattgaatacgttttattttttgacagttttattatgagatcatgagatttagattgaactaaactaatgtttattatgtatgttgaattattagattttaaatattctttatatatatatatatttttaatgaaatcaacttaaatggcaactaacctggactagatggatccaatctaatctaacagaaaattagttcatgcatccaatggttggaactaatctaatccaatatatctattggatcaggtcagattggatgactcaattcaattgaattggatcggatgacaaaattccatatctaataaataaatggattaaatcggttgggttgggtctaaatccattggatgtgattcaataaacacccctagttgtgggaataaaattaaaattgcaacataagatagagttcccaagtagggttgcacatgggttgagttaggcgtgttgatgctattttagtgggctaacccaattagatcggcctataaaatttcaactaattaatattattatttttgtacaatccaacccaacccaactcgtacggtatgggttgggttgtaactattatttcacattaaaaaaaaataaatattaacatcataaaattcacacctaaaataaagaaaatataaaattcaaagttcaaacataagtaaaataagttcacacattacagtcatccaaattcgaaagtccaaaatataatttttgaaagtcatttaaaattatacacagtgattacaaacataaaataaaattgaagattttcataaaccgtcattcaacaatgttgaagtccatcttcttctcttttagtggggatcccttgaccttagatttatctgttagacttttatttgggcttacat

SEQ ID NO: 221112 - DNA, 5012 bp, Cannabis indica
gtttatattagctatttttatagtaattcatgaaaagaaattattataagagagtcatattgctgctaagttatatataggcacatatagagaataataagcatgaacgaactatgatattagtaaaagtaattgatttatatgctattatagatcgatccttaacaaaaaaagaaaaaaaaatactattatagaaaatattgccctaagaatcacagttattattagacttgttgtgttgttgatcataaaatataatagcataggaattaatttagccattttctccttggcctacacagtcaattacatacacacattaatatatttggcaaaaaatacacacaatatatatatatatatatttcatttgacgatatgacaattttcacatgcaaaattcattaaatttccattatagtgttgactaacatgaccaaaatctcatgaagatcatactataaatagattcaggcatggtattaattaattgatttaattatatatatatggtatgtatagatagtcaaagtacatgacctgttttaccatttgaatcgatctgcatttatttaggtatattctctttcattatatgtaattttaatctcttttcgatatcgtttaaagcgaaatatactataataataactttcaaaattacatatccttttataaatatacaaaaatttacaattacataatgttgcatctagctcaagtacaatcattttcaaccagagtatatggatatattttaggcgatgacatatttaatagtggaaattaagacaaatatgatattattttataaatgtggttaaaaaagttttgtatggatatatcgtatcacctaattaacctcaccttcactatcgtccgtccatttttagtacttccattttcttcttctcccaaaaacaaaaaaacaaaacgacaaataactaatcataaataagatattattgtcaaataaaaaaaaatatatatattgttttttatttttaatgtttttactgaaaaaaacaaaacaaaaaaaaatatccacataccacgaaacatcttaaaacaaaaatcaaaaaacaagaggctagtcaccacaaatcgaaaccagcttcctacgcacgtgtcaaattcaccttaattcaatcttggcggcaatcgcattcccctctccacgtcatcacacattaccgtgtgctgtctgtcacccaccgtaaccctctctctccatatatatatatataaaaggaatcacattcccattaactcagtcttcagtattcacattcctgtacggacaacaactatgtgtagatccacagattaccacggtttcaccaactcaataccccgaacccgattaaagacccgaacctttgcggttcgattctcgggtttggatacccgaaaatccttgcccaattctttaacccttattttcttgcctagaatcaacgataacgagctcgaggtagacgggtcgaagatccgacccgattcacctgccttcgtttcgctccatcgcggcgttgtcgaatccgaggacggcgaggttttgtacgggagcagagatagggtttcggttggcgatggggttaggtttgaggtttatttgagagaagagaaggttttgaaagggagtttctggagagattatggcgatgagtggagattggagtgtaagtgtgttttggagagtgagatttccgctgccggagttgattctgtggaggcggaggttagggttgttgcagagggacacgtggcgatgtgtgagagagtggctatggtggcgaagaggaaacatgggttttgtaatgggttagaggaaattccagaagagattgaggttgacgatgatgatgatgatgaagaagaatgtatgtgcggctgtgattgttcgtctggggaaatggagagtggatctgacggtggagattggaggagtgaaatggaatatgatgagatggatgttgagggtgttaaatgggccgtggatgtgggcttttgggttatgtgtttaggtgtgggctttttggtttctaaagcctcttctaagacattgagacgcagaagaattgtataattgttttggttttttttcttgtaaatatcataataatgtaacaattttgtaaagcccatgggcctgcttgctactaaccttaggcccaatacccaaaaagctgtcaaaatcaaaggtgttgggagaatagagaagtaactttttttttttttttggaagaataagcaataatgacataataaaagttgttacttgttatttatcttgtgtttgagtatagttacacaaacgctacttcacgttcataattacttttttcttacaacttttgtaccaaaagtacccattttgtgacttactattaagttgttttttttccttctttttgaaccctttttgctttccctaataaataactttattttttctcctttggatatacacttgcaactaacccttttcttactccttttttctacttattatcactatgtgttcaaaaataagaaaaggaaaaaaaaaatataaaatgggcaaataagtcctttaagtatagccaagggacacatttagggacacacattgtgtgtagtgttcatccatgattaaagtccttttaaagacttggtaaaatgtcaaatattgatggaatatgttaatggtgtaattttaatttaattctcttccaaattgttatttttataatggtttttacttgtttttagttgaattataatggtattatattctttagttgtaaccaattgttattatgctaaaaactaaaagagaatatccaatttcatctaaactataatttatttttttataatatattattctaaccctacatacacaaagtgagtatcaaaaaatagtaatcaaaaagtaaagactgcaaatcccttttgagaaatgggaaatattaatgatattgttttttgctttgaattacaaaaagtagtatcactttgtttaatgtgttatccaatttgaaaaaaggacccttatacatttaattaatgaggtcaaataaaaaccacatatttttgaaaagggagagatttatagttagattttgtgtcatatagaaaagctcaaaatctattaagaaattaatcctaccaaaaaaaaaacaaacaaacaaaaaatatcacccatgaaagtgcctttatttatttattatttaaaagcaatttgaatttgataatgttggaaaacaaaacaagacaagagaaagcactattaaccttcataaatagaaataaatgatttgatgtaaattgtaatagacatatccaaatccaatgtatggcaacttgaataggcatcacccttatcttgtttaccccccaaacaagtcacaagcactaataatgacatgggccataatctttttatatatatatatatatatggaatattttaaagtgttaagaaatcaatattactattagtataatttaatatcaaatcttatatatttaatttaataaataatatttgagaaatgttaaaaagtattattggtgcttaatacctttctcgacgtcgtactgctactgatataattaagtatcaagttctatataattaaaaaagtaatttttaaaaaataatgctaatcaatcataaggcgccacctattgaaggtgttagacactattggtgtccaataacaatactcatattatataaagaaccgctaatcgctaaccactcacaacgtgctacatcagtatggtgttagacaccttaaaatacttaatagcaatgctcatataattaaccttaaaatgatttaacttaatagttaggaagttgagagttgacaattcaattgcacttgaaattcaactatagtaatgttattaatttttctacttattattattattattaagattatcaattgtttgtttggttggttgataaagtaccaaaaagaaagagtaaaaggatggattagggactattgttgttgttagtttaggttacaacttgcaacaattggtacatagacaaacataatcaaagttggaatgtatcaaatatgtcacaacaaatagtttgtgaagatttatttgtaaaaatatattagtttagtaaaaattatatgttaagaaaatagtgttgtgtctatgaataatgatgataaacatatgaacaccaccatagttgaggattgcccacccttatttattttataatctcttaaaaaaatttcttttaagttccccttacagttttattttttatttaccctacttttcataatttataaaattacctactctaaattaaaattgtaaatactatataattttttttatagagataaaataaatttgtgtgtaaatatataagtatgattgatggtttaacactacttaatttcaattacacataaaatattaattatcaaaatattttaacaattaattttaaaaatcaaatattgagaaattaaatatttggtggatcaaaatctaatcatatttagaatattcataattataaatatcaatctaatagtgtgaaaccgatcttttaatttcattgacgcgtgaaataaaatgaaattgatttcatatttaataataaaatattctaaaactctgtgtatctctaaccatattctctaaatatattctttagttaaaatatagaatgagacttgaacaaatgagctcaaaccataaaaaatagctatttataataaagtatggagctctttacttttttgctaattttttaataatattttaatcaaacgtactattacattttattattttataaaattaatttatatttaacaaatttaaattataaaatataattaaaataatcaaatgctaactatactagagagctattttaattgagtataaagttttgatgtaaaaaataagataaatatcattttggaccttatgctttgcaaaagttactgattggactctctattttgttaaatgac

SEQ ID NO: 221113 - DNA, 5481 bp, Cannabis indica
aaaattcaataatctaccatgatatgaactcagtcccaccccaaatctggacctgaccccaaaccctacccgcaccttgaatctggaccctgaatcgagaccgagacccggtgcctagatccggtcctggcccccaaatatgtaagagaaaatatataaaaaataaaaaatgttagacaaaaaaataaaaattatttttaaaaatagaaaacaatatataattttttttagtttttactcagttttcataaaattattttcattagtttttaaaaaaatgtttttcttacagtttttcttttttaattagtatatttttcttacaaactcccacaaaaagaacatgaaaacaatatactataaatataaaagcaatatgaaaataatataaaagtaacatagtataaatatttggtgaaaacgatataaaacagctgtctgtattcttgtaaaaaaaaatagcattttaatattttataatttttaataaactataaatttgtattttttataatatcttaatctttttttggttaattatgaaaagaaaataaaaatcaatgtttgtcattggacaactgagcccaacgcaatgatgttttctgcatttgaaaacagaactgacaaagcccgttgggcttgtcaagggttgtgcactacagtggacagtagagcccaaataagtgcccaaaaaggagctgggctttgttgtttgtaataaagctaaggtatttgagtccaacaaaatacccgatagaaacatggctttgtttgtcacttttaactattttttatgacaatttacatttattattgtttttgtgggtttcttttgtttaattttagaaggttttgttgtaatactatattttagcattaaagaaaattagttctcgtatacactaaatcttgtgcgaaatttagttcatgttaaaagtaatataaaattttgcacaaaatataatgttatgccaaatttaacacacaataaatacacattttttaattacaattttacgattgattattaatgataagttttaatacatattttttattacaatattaccaataattacttttttaatatttaatttattgataactattattgctattttacgttttgttataatttgcttatgttattgtgtattcgagcacaataataaatattataacaaatatagcatttgttagtttttattgtgtcaaatttagcactagaggatggtcttaaagttaatgagtaaaagtaaaagtatagctttttcaaaattaattttagaatcggtagaaatatggttaaactatattttaatatggttttattccactttcaaccattccaacaaacttgttatgtaataaccaggagttttaaatttaccaatctaatataagtacaaaaaaaaaaaatacatatttaatatggtaactactataaagttatattcataaaaagctctctctttttttgtatatttgaaaacaaaattgacaaaacccatcagcctcgttaagtaattgagcccataaaaatgtccgttttgtgtaatgtttttgttttgttttttctcaggataattttctaactggaactgaaactgatgaaaaaaaatccatggctttaattagctgaaaaatcctgaattgactttctacagacaatggtcatggctttggcaattcgagctccaacatgtctgtgttcttcttcttcgtccacttacataaaacccaccatctttaatttctcttcttcagtaagcttgcacccaaaaacctcaagattgcagctcttttcgctgtttcctcctctgggtctcggttccttttcaacatggagtggtttgaagcatctgggtgtttcagttaagtggagatctttgaatttaggtaagaaaataataatctttttgtggtctagattgctgtttgattactcgtttgagtttatttgctgggttgtaagattttgtaatatgattgtggtgttgcagagaagaagaagtgtaaacatagggctgcttatgcttctctttttggggttggagctcctgaggctctggtgattggagtggttgctttgttagtttttggtccaaaaggtctggctgaggttagttgccacttccattggtgaaatgttcagattgacttttttcccctttttatttttaagaaaaattgtttatctttctttttattagctattaaattagatgaattctggattttgagtataattcttgctttttgtaatgtttatcttaattatatatacgatggaaattctagtgtaaaataaaagtattaatactttgatttttggaattggagaatggagattaagctaatcatttacttatccaacttcacttagtgttgctaaagtttgagttttcatgtgaaattactgaaacaaactttaaagaaaaatgaaatatgttagtagaggatggtaataatcttgatattgctcatatagcatgtggagtctaacctatggtattggtaaactgttaattgcaatatattcttgtatgaacatcttggagactatatctgtatgcaattagaacagcataaagacacgactatctttcaaatcctacagttttcgagatcagtttatcgtcgaaattatgtctagtttctaaagtatttgtttggcatcacatcacacaggttgctcgcagtctagggaagacattacgtgcttttcagcccaccattaaagaacttcaggtacatttgtagcatgagttttgactctgtttataaattattacctttgttttgaagaaggttgattccaggattattaatttgccttttacatgtaggaagtttctagggaattcaagagcacacttgaaaaggagattggtttggatgaaatttcaaattcaagtccaagaatagatccataccaaaccaacactactttcaactcttcagtttccagcacccaggaacccaagattgctgccgaccccagtaagtgatttgagcttctgaaattaatggctagttgcaatttacattgtatattcatacagtacattttcattgttagaccctatttagtagggaacatatataattggtacaaggcacactatgagtggtttcactactgtggcttcatataatgatctatcaactcccgttgtgtatttttcatatacaattattccattgataatatcaattcatgattcctaagactgtagttttgggacataggcaacctcttcagtatttatttgtgtttcagacattaaggagctacaattcatgtgtcttgttgatttaataaatcttgtgtcacataaactgctcatggctcacgaattttagaaattaaatagaggaaagatatgaaactcttgtagtcactaatacaaattatcattaatgctattcatgatattcattgtttactctgtcgacaagctagggggtgaaaccatcaaagttgttacatgtaagtaaatagcaagtctgtattcatttttgctcagttaggcagggctttcgcccatatgtaatctataattacataagatatgaccattttgtttcaactttaaaattctcatcagtggcaatggttgcggctggaagtaaattctaaatcatgcttgatgaactttcacggttatatctttctcttaaagcgatctgaaactgaaactgaaatcttacaggtagcaggagttctcccccagctaatgcttataccactgaggagttattgaaaattacagaagagcaacttaaagcatctgctgctcaacagcaagaacagacatctcctcaatcagaaagccctgttgaaactccaacgaaccctcaaaacgttggagaacagccaccaaatgaagctccagttaaggaaactgctggtggaacaccctcaaatcaataatctggaatcaaaatgtgaagcctgcttgaaaattaacaagtccttctgcagtaccctcagtagcaaacacgtgagatgtcatataaacatgagttaggattgtttcttctcatattcaagtttggggcttgagttagagagtcttgtatttcatcataatagatagccatgcaaaatttttctttcctaaattcattgtagagtactcttttggttcccataaccacgcaagatatcctaaattgtttagaatgaattactattgttattgttattttttgttggggtcataataaataagtgcaatttaaggataatgactcttatcccttaatttctcattatagattttttttctaaatatgaaatagcaacttcattgaaatattagcattcagagttaaaagagtttttaaataagcctaaatattatgctcaaaaatgctacgactagagagaaatctagagtgtcttgccacaacatgaacaactcgatttgttaatcgtctgataaaacaaagtttaacattatgtagagaggatagtaaaagctggcaattcttataaacatacaaacataaaaacaattgtatatataatttaagaaatctgtaaataactattgaaattgatcaacgtacaaacaacatatttaaaaaagtaacaaaattaaacatgtttaaaaagtaataaagttaaacaacatgtttacagctttaaaacaactgtaaattaaataacaaataatattataactaaatataagtaatttttcttcatatttacaatctctttttattattgtcccacttgattcaaaattaacataatgcgtgttctcttactatttttcatgtgtgtatgtaagagataagataagtttttattttaacatgtaaaactatattcttttaattattgaacaatcggtgtaatgtataaataattcataacaaattttacaacaacacaaaaataacttgattttatttttaatttgaaataagatgttgcaaaaacaacacaaaggaaacttcacaataacatgaaaacaacttaattattcttttgtagatattatataattttgtttttgttattttcaacaaaaataatatcaattgataaacaaataattatagattcttcaatattcagcttttttgggggtttgcttttggttgttttctagttgttttacggttgattctattttgaaagtgccagcatcaaccaaaataatatcttttgaaactgatcccctccttggagcagataaaagttgtttagttgttgttgtgttgttgtcaagttgctgcacaattcagtgtcctaagggatgttcacttccagccactgtaataatgttgcacaccattgcttgggtagctacctaaaatgattgttattctatttttctgtgtagttgaatgtgttcacacacaatagatatcgtgtgaaatcggttttctttgttaataactttatgtaaaataataaacttttgtcatccttgatttagagtggttggcaactttccttca

SEQ ID NO: 221114 - DNA, 1270 bp, Cannabis indica
aaaaaaaaaaaaaaaaaggtgtacttgagggcagctatgcggctgatgagctcagaaggaactatttcatgctgaaagaaaatcatgacaaggtgcatcattaacacaaataaagagtgaaagcaaagacaaagcaattgacaaaagtaaaatcacaattacatgaagtacatacattcctcattcccatctcaacagcagtgagaaccctgaaatcttctttcgacaaatatctgagcatgttcacatcgagcttcattgttgacttcttattaaagcttaccttttagcactgtacaaaaaaaaaattacaacacagaatagaatactattacttcaaatataatacatatccatgtttccctaacccaatcccattcaaactcactacagctataaacatagaagaaaaagaaaaaaaaacacattctttatcaaattcattgtcgtgaagctaaggcataaattaaactacagcttcagtttcttactcagaaacccaatttcaaactaggtttaaatagcaaggatccaactttacttcctcatgcctggagtaaggtgtttatataagactatctaacgttatttgttgtgcttttaacaaattattactcaaacaataatgaacagttgcataaatttcatgtaaatttcaaaataagaaattcttgtcaattggttcgactgtgaataaaagatgattacatgattacagcataaaagaatcaaatcggtatatttcaaaaacaactaactattatcacctaatgctgttcttctcaattatataggttgatttaataataacaataacaggattaacactgatcacagaatataaaataaaatcataaaaagagagaaaagaaatttctgaaaactacaagtaaagaaagaccttttgaaacctaactactgcttcttaaaaccctcaaacacattcccgtcagaaaaaccaaacaattatatacaaagtcgaaagatcttaccaatgcgaacaagaacaggacagctgagagagagagaggaaaggcgaggaggtagctccggtaaaccagtgaccaagagagagagagaggaaaagcgaggaggtgagccaaccacgcttcaatgggtttcggtttcagtttcagttttcagtttccagtttcagggttcagagagagagagagggagagtattaattaggttttgtggggataatgagtggactacgggcctgggcttggtgtctaaagcccattaatagtacagcccaattctgaac

SEQ ID NO: 221115 - DNA, 2547 bp, Cannabis indica
agatttttccaaaaaaaaaaaagagagaaaaattgtttgtacttgttttttgatgatactaatctaggtgcattaaatttataccaaaactcagaaagaaacttgactagacatattattataatttcacattcatatttgatttattactatatctatcattatgaattgtagccaacaatattagtttggtgatttatttggcaaataataatttctctttttgtttttaatattcaagttgatgttaattccttttttctcctttggtttgatcagattttcttgggcacaaaatcatcaaaatgagtcatttctctctggtacaggatctaaatctcattgatttttttattattatttttcttgtctgtaaactcaccatattatatgattttctttttatgaagtgagtgttgcacataattataatcatagagcatgatgaggaaacaaccactaaaatgagaacaatgaaactcttaccatataggaatcctcttaaaactacattggggctaataaaataggaatcattcaaaatttcaaatcaaattaacatagaaagaaagtccctagatatgtatatttgcttcatgacaagccaaaaaccaaagcttcatcattccttgttactatttttttaaacttcataaagaaacacctcaccattgttttaagtttttatttcctaaggattttggggttcaacaagatggtctgtttggccttaaagatgatttagccttaaaaatgctctaaaatgattatgtgataataagtctaatagttcatataagtttctatagtatttcgactctatttcttatcaagtttatgttcaatggtgtttattttgcaggtgatcagatggttttcttcattcttaacgcaatcgagtttatagcactcataatgaccttcaaaccttttctagccttctctgatgtaaattaagcaattttagttgcaccaaaacttaacacttcatttaagcacagataaaaagacaaaatctaatgagtagagaatacagcatctcaaataacttattagctcaaacttttaccaacaaaattggcctatattaattacagcttctaaactaaatgtctcaactgaaatatcttaaccacagttttgaatgagcaattaagtttttaacagctacaaaattgttctattacctcaacttctgctctaagaagcacaatggtggctatataatttgctaagaaacaccagcacagagttcatcttcacttgaatttgttttcagctggtcctcacactcgatcttaagcgttgtactcttaagtactgggtaatgaattgattgcagaaagttgtaataaacatgtttgatatcaaactgcacatcataccctgccaatgccataaagatttatacctcagcattgtataattggtagttaaacagtcaaaagataaaaattattgaaaaaagagtttgaacgatacaaaattttacggcaataaaaattagtatcaacttgtcaattgagaaagagctcccagaactcagagttccaatgctagaactgaagaaaaagataggcaacaatgttccatcttagactattacccaatttaagctgcccagaaaataactttcacctgcttcaatgcaatatcatgcaattgaaaaagattacttcaagctcattcattgtaagatttatttgggagaagttcaagttttaattttgtttgttatattttagtacagatacaatgctttagaaccatctgactggactaactggattgatggaaacatgtaaatcaacccaggactttgtctcatacaatttcaaacaacaggaagttgtggttcaaattagaatggcattataaaaggcaagaaagtaacatacaagtatagaatctctccaggattgatggtacattcaaatggcttaggaccctgaaaaaataaaggaaatttctccatttcctcaactttgtttttcccagaagggtagggattcacactacaccaaggtacatatctaagcgctttatccaattccaaagtgaaatctttagtgtcctgaacagtcaaaattttcaaaaaaaaaaaattcatatgatgatgaatgatcaatctaataaacaaagacagacaaaaaaaaaacgttaatagagcaaagaacacctgagaatacaaatattgggcagcaggataatctcgaatgtacatacgatgaacatccgtaggaggaagaagcaggaaatgcttgcgtccagtcacaacagcatatagattttcgtaatggtccttgtggaatgatgtctcagacaaatgattaccaatccagagattaacagcctcagggaggcagccaagagcatccgatgcccaaggaatgttggcatcacaatcgggagatagcgctgagtactccaaccgaaagcaatcattttgttgctgagcataagcaacaaaattggaaccagtggagctgataaggcttagagcttccgggaaaggcatgtgttcaacatgagcagaggcaaaaacga

SEQ ID NO: 221116 - DNA, 2432 bp, Cannabis indica
attctagttgcaatgaaacaatttacagttaatgttatcatgtttagtaagtatttcttaaggaaactaaaagaaattgtttggaagaagtgaatggtggggaacctgaagcaagcatgttcttccatcgatgagaagtcgagttccagctgcttcttcctctgcatatatcacatgactgtttccatccaactgttgagaaaaatacaaacatattatcagttagagttgtgaaatacaaaaaggacaagctgaataagattgcagcaaagtggtcctcatggctagtcttatgccttaattcaggacagattttgtactcccaaacatcgtttcttagcttgtttagctttgcatcagcgtatatcaactcgggacagattgaatcggtttggggtggttcaagttactgactgtttggtgtgtggggattctgtagaaactcactcccatcttcttttctcctgctgttacagcaagaaactcttgttcgaaatagcccaatagactggtttattaaagccagcagactgatctggtttgtcatgatagggaaattctctcaaggaagaaggaagatttacattagcattatttatgccatgatttaatgttggaactgaaaaattcctagagtcgaggtagttgttaacaaaattatacacatactgtctgtcatagaattcattatatgaatatacaaaagttgaatacggtggataaggattgggtggctactatatatagagcttgtaattaatttgtttgtgctggtttgttcaacacaatttcatctgattttctcaaaaaaattatgcacaaatagtttaacttgggagtcaagtaatctcattttcatgggaaacgagaaacacttgagtttagttttgcataacaaaaacatcagtgtttaacttttgaaacctgaaattttttgtttaattcacttgcctgcatcaataaacctccatcgcgcaacgtatgtatctctgcttcaatctctgactcattcatcctcaatctataacttcccggtccacctcttaccatgtcaatctacaacatatgtcaatagaaaatgaaaagcaacaattttccaagaaaaaagaaactgatttacaatgccatcatttaaacatactgtgtatttgcttccttcaatgttcaatgccacttgtgagtgtacaagcgaaatgtgctgcaataagtataagcatgaattaggaacatgagaaacatcatcatcatcatgtatggaatttttaagtattttcaaccaaaataccttgggtggtatttgtcccttttcaagataaccaatgtaatctgaaaccaatgcagcactacctgcagatgatttctaaattggccaacaaaaaagggtaagtgatgaattttgcgaatatgaaagatcgaaaaataaatgatttgcttacaaataacgctcctccaacaacagacaggtaccaaggtggcctttctgctctcactcgcatagctattctactatccaaccatcctgtgtggattttattctctttgtaatctaaagcctgtgaaacattgatttcgggttagtttgagtactgattttttggttagttgtaaagaaatcattgatttgtgtgaagtttacatgtaagagatcaatcatgtagtcaacattagttcgaatttctccacgaatttgaatttccttcaacccaagaaccatatttgcaatagccaatgctctagactcaccaaatgcaaaaacatgtcctgaggtgtgatttaacaatcagtcatttcaatagctaaaatattcaaataactttcatcattaagactaaccgaattgagaatcggagaactcatgaatccctcctccagactgcataacaaaaactggttattagactttaataactcgaatttcgattcaaagacataaaaagttaccttaatagagaagtaagcccacacatttggcttgcttttaaagctcaactcctgtgcaaaatgatgtaataagtcaatatgatttaaccataatcacttcattgcatctgaacataaaacactaacctgtactttcccactagtaggtttgaatccatcatcaggatcctcactcgttacgcgaacagcaacacaatgacctttcggtttaatagattctgcatggtcaaaatcaaatggggtagcagtaactgaagtgtttctccaagaatcatatccaccaccatgttcctttccataaaatcttgctatctctttttgaatcaaccatgttaagaaaagaatgggaaatattagaataggtaaaaaagaaagaagaaaggcgaaaaagagtttgttaaagaagtgcccaccaggaattttccaaagaggaatacccatcccaaccacaatctgagctgctggtagattaacttcagcaatccactcag

SEQ ID NO: 221117 - DNA, 3930 bp, Cannabis indica
attattcataagaaaaatcaagataaaataactctttctctctccaaactctccctccctctctctctgtctccctcgcaccctagaaccagcaagtggttagggtatttgttacttcaattcaagcttgtagcaagtttgtagtgtctcaactgctggtataacccttttatattttcctttttgaattcttaggcttcaagttatggttttatgcatgtttttgggatttaaggtggctgtagatgatgttttgttctgtttgagtgtttgaggtgttattgatgttgtttgagcagattttgagctattaggtggtttggtttggtgtttagacaaggttcgagctttggagctcaaactttggtctttaatggtgaattgtgtatgtgtgggtattccttggttttattgtatggattttgtttattatgatgaatttagtaggtctggaaggttgggtaacatttgtggttaaattgaattgtttagagttagttttgtgtttcctacacctaaaccaaatttccagttcaaggggacctataggaaccggtcaaccgattggtccccaagaaaacccacagaactggaattctggttgggcattttagggaaccctagtttttcacgtttttatgatatttagggtatttccatgttatccatcgataggaaaacttttagttttaagttttccctaaaaagtgatttagcgtgtcactcattagttttgcaaataatgtgatttaggggcctgtaaatcgtcgagcagccattccactcaggttggccggtacacctaaactcaaaaatgtggtagtattagtataatgatatgcatatgtgcttacatgtttagcgtgcatgttagttaagcttgttagattacattataatagcggtatcaatatatttagtattatattggatatcaataaacgtatgttggcttaagtactactcgatagtttcacatcgatacgactagagtgcgactagcgtatcgggtataaggtgatattatggtcgatagtactgtactacttgacagtatcacatcggtacgactagcgtaccgagtataggctgatattatggtcagtagtactgccgtatgaatgttcttgactcagtaccgtgttggacaggaggatagggttatagttgggtgtatgggcacctaattataattcaggttattgctaagttattgtttatggatttcttactgagtctgtcgactaatagatattgtttgcatgtgtaggtaagggcaaggctaaggttgagcagccgtgagagcgagaggatgaagattgtacatgtcggggcggttaggcatggagcgtacggtgtttgggacaactgggcatcttttgtatagtcgctaggcgataacttttatactatgcactttaaaacttttgtaaatattttgttaacgggatcgcagtttaacataagtaaattattttgggtatttataaataatgaaataaagttttaattattcacgattttcaataaactcgttgttagcaatgagctgaataattaagttaaaaatcacattagcacacttaaaactagttgggtgtttcacttagttaaagtaaacagccttgctggagtgggttttgtagttgacttatgctcctctttcttaagctgcaggcaatctcttttatagtgtcttgacaacccacactgaaaacatccttgccctctacactgacccagattgttttttttttttttacaattgggacactctgagtaaatgtatcgagtttcagaaccaccttgacggttgcctcgaccgtggttccctcaaaaacttttattctgacttgagccaccgggtgcaaatggtgcctttcttttctgatcggtggtcgagccactaccaccctaccataactagaggtaggaggagtaggggctccaccaacaacttgagtccctcgagactactgggtgcactcaactgcgccctcagctcgcagtgccattcccaccatgtcagcatagttggtgttgtcattagtagtaatcacaagatcatgttttattttgggtttaatccatccaggtacttttctttcttattgaaatcggttggcatgattcttgaggccaacctagccaattgatcgaactgagttgtgtattcagtaactctcatattctccttctgtgtcaactgagtaaattcctttctttttgcacttctaccgcctcgttgtagtactttgcgttgaacaactcctggaattcttcccaggttacagtagtaacattatgagtcatggacaccatgtcctaccaaaccagggcatcctcttggaattgggatgtggcacaggccactatgtcgttgccggtgacgcccataaaattcaaaattcttataataaccgtcagccactacttggctttcatcaaatcgggacctcccagaaagattggccgtgcctgcttgcgaaacctttcatacaatggtttcatcgattcattacagcaatcagccctactagcacaacaggggcaggagccactggcatttctggactaggctttgcaggagctccctgctgcctcaagcatctgatttcttcctctttttcattgattctaacttgcattgctgcaaacctattttcccattcctgggcacactgcggtgggttaacatctctccgaccacgtgccctacttctagggcctctacctcagccacgaacatttgagggaatctgagctacctgaccgccactagatccgaccaagttaccctagctccaagtgtttcgcttggcgtccattctattagaacaacctacaaaataaagagtagtctagtcagatcgtgatcaagaataacttactgattaccgcttattttggaaattaaaacatgcacctattcagctatcaggctactaacatgtttcctatcaggcttttcttaaatcatactattataataaggtttactgaaccgtgagtcgagctgatcgctgatgatggttgtatatgtcgtgataatctttggaagacaacctggcagctttgataccaaattgtaacactgtagctcattgctaatcaatgagtttattaacaatcgtgaataataaactttatttaactatttataaatacccaaaataatttacttatattaaatcgtgatcccattaacaaaatatttccaaaagttttacagtgtatagtacaaaagttttcacctagcgactatacaaaagatgcccaactatccctaagaccgtatgctctaggcctaaccgcctcgacatgtacaatcttcattcgctcgctgtcatggctgctcaaccttagccttgcctttacctacacatgcaaacagtatctgtgagttaatagactcattaagaaaatcataaacaatatcattccaataacccaaattataatcaggtgtccatacacccaactttaaccctatccctgtgtctaacatagtcctgagtcaagaacgttcgtacgacagtactattgaccattatatcagcctatacttggtacggtagtcatactctagtcgtaccaatgtgatactgtcaagtagtacagtactattgaccataatatcagcctatacttgatactctagtcgtaccgatgtgatactgtcgagtagtacttaagccacatacatttatcgatatacaatataatactaaatatactaatactgctaatataatgtaatctaacaagcttaactaacatgtacgctaaacatgtaaccacatatgcatatcgtcatactaatcttacctcatttccgagtttaggtgtgctgggcaacctgagtggagctgctgctcgatgatttacaggcccctaaatcacattattcgtaaaactaatgagtgacac

SEQ ID NO: 221118 - DNA, 1614 bp, Cannabis indica
ttttttatttttatcctgacacttcaagatactctgtatgtgactccaaagtattttgggtacattacatataaaaagaggtatgtttcaattaaataaaaattaaaggtaaatttagttaagtgattaataaaagatacacttttcaacttacttcttttaactttatgtgtatttgcaaattccataaaccattccaccatataaagcctatcgaagaagccaccttaccataattcaccatatataaagccagagcatatacactacccttaaccgtataacattcattggaatcataatactaacaccactgatccaataaattaacaaccacctgccaatgaaataccaagaataacatcagaagcctctaataaaataattaatagaaaaaaattaaataaatttttcatacaaagtaatatgtggtattttttttttttgaaagaaaatactaataataaaaaaatattcattcaactatttaataggacaaactcttatactatcaagtcagataaaaacaaaatttttcaaatctcacaaaattaacaatacaaataacaaatcatgtcaattacaaaagaagaagcaaactaacatatgaacaacatgttagaaatttatatgaaagatataaaacacatataatcatgtatgaagtgcataattaaattgaatgtatatgcactataaataaataatcaaaatacctcctaccattaattgcttccaagcttatgctatttttatatgaatttaccgtgtttcacagaataagtagtaagttcaaggaccaagactctatatttatataggtgagacattccattaaagtctctgtcacaattaattgttataatattttaacaattaattcgagaaatcaaatcgagtaataaataattcgtaaatcgtaatttgaccatatataaaataacaaccaattaattgtgacaaaatacaatgaatataaaatatttactcttatactaatactatatataatattctaatatttttttacttggtcagtatttaaattaatttatcacttaaaaatcaacgattattctaattaaataacaaacataataaatcatggagataggtcatcattatatgaaaagtattatcttccatgtattattacgatatattcattacataatattgtacttaatgtggcagtatacttaaaaaaataaaccccaaaccttatgttgattctgctcatcttacgataatatttttcaaataaaattaaggtgcacataaatataaaaaaatatcaaaattaggttttattgaataaaattagttgtacaattaaaaactacataaaaggtaactggatctcatatttactttattatttttgaatttgtgtcgtaaaatgcctttaatcaagaatatgcaatcacccaataattcaatattgtgtacttagtaaacacttatcgcgcctcttacaaaaaattaacaataggaataacaaatatgtcgattacaaaaaaaaataagcaaaccaacatataaataacacatccaaacaaggcagcacaaagaaaagggtcagaccctatgcaacaattacatagtataccaaag

SEQ ID NO: 221119 - DNA, 1894 bp, Cannabis indica
ttttttcccgattttttttccagtggacgactgccccacctcgtattatatgtgggtccgccccctggtttacatcctaaaaatatttaaatacacttcattttattatttatattttacataaaatacatacataatttattatactcacttttttcttctcacattgtaaaaaataaggcatatatataaaaaataaaatatattttaaatattaacaaaaaaatcaaacaagaaaatatatgaaataagtaaaaataaaattaaatgtatattatttattaatatatatatacatacatatgaatgtaagattaaaaaataatgtgggagtgtgtttaaaattttcgagtgcaaaaataatcctctttatttttattttagttctttaattttcattgaacaaaactaattacactatatattctttcttatttttgtttgtaaataatttttataagttttttcaataaatattaatttattattacaacactacaattacaataagttcattatttactttccttaaataagttaattatttactttagttaactcagtaaatacaaccgaatataattatgaataaaaaaaatttaattattaaattatttctccattcataaaaaattattaaatatttcttatttttaaaaaaagttttacgtaaattaaaaataataaattgactcacataacaaaataaaaaaaaataagagtcatcaatcaattgaaattgtaagtggaaaaaataactttgaggataaaaaagtaattatgaaactattaaaaaaaaaacaaatatattggtctggcaagtcaataaaaaaaggcaccgttttatttaaagaaaagcataactcaaagaagagaggatccaaagaagagtttgggaaaagacaaaacatgcatataaggagctctgaaagcgggacgaggaaagcacgcagaggagcagatgataattaatccacatgcactaattagaacatgcataaagaaggatacaaatgattctttgcgcctataaatagaagacccacacattcgaaaaatgagataaattcttgatcacactagactagtcgaagctctatcaaaatacatcctcaagagcacatttgagctcgggaagcagtcgacccagatcacattgagtgaatataaagggaaattgtgtaaacagataaagattgattttgattagatcaaacctggtgtaaggaattcaaagtgataatataattttgttgttgagccaatttttgacatcaacagttggtgtcgtccgtgggaatctctagaacaaaaagttgaagttgaggatacgaactaagatgggttctaagaaagtgtcggagaaggaaacaacgccgagtgaaggagatacgtcaaatccaatcatggatttaactactgcattagtgttagagatgaaagaaatgaatcaaagaatgactacaaaagataaacataatgaggaaatgcagtgtctcatagaagagaaattccagtaagagtggcgtgcgactcaagagaaatgtcagcaggatcaggacgagaacgggaaacatcaagaggatgttaactacaatatgaagaagtttatggggaaatggttgatatgcaggctaaaatgaacaaaactcaaatttgttgcgaacttggataaacaagtgggtctgaaccaaagcatgtcattagtaagttgcagccagtaacgatatctcaaaactctgagagagaaatgagaaatcaattgacactagtgctcaaagagaaagaagtgatggaaggagtaagaaaggcagacaaaataagtgaaaatcatgattgttagactttttatttgggcttacattaacttttattggttttattaaaacttggg

SEQ ID NO: 221120 - DNA, 2838 bp, Cannabis indica
ggcataaaacccaacagttgctaataggaccaagttgcttgagtgaaaactgtgtttcaagagcagtgataacttgctgaatttgacgagaatcagctcatgttataagtatatcgtccacatagaaaagtagcaataatgatttgtttttgttcatatagaacaaattggtatctgattttgaattgttgaatccccattgaagcagagatgttttgagagtgtcaaactaggcccaaggggcctatttgagaccataaattaccttgtagagtttgcaaacgtgatctggatattgaggttcaatgaacccaaggggttgttccatataattttttttcttgaagttctctatgtaaaacaacattattgaaatcaacttgttggatatcctaattgtgagtggttgcaagagtgaagatgacacgaattgtgcatgattttatgacagggttgtatgtctcaaaaaagtctatcacaggtgtttgttaaaaccccttggccaccagtatggcttggtgccttttcacaattccatcaatattatattttaactgtcatagcaggattccaaactagactggccaaggcatctttaacagtggttggttcaagatcatgaggtgaagtggtaaggtacactttgggtttgaaaactcctatttttagatctagtgatcatgggatgcatatttttgttggaacttattttaccatgatctaaatttactaacatgtatgttgattatagaactataatctaacaccctaaatatgaatttcctaaaacaataaaataaacacatataaagttatagaaaaccttacattgatggcagcagaatataatgtctcctcttgtttagatccctaaccctttatcctttctgtctcaaagtatgatcaagatctaaatctggatcttcttttgttgttggaattattcacaattttccacaaagacttgagtattggcttaaattgtgtaggcaattcctcaactcactatagggcattcaaaaataagaagaagaaaagatgaggataattttgaaatagaatagaggctttttctttattttctaggttgtctgacaaagtagtctgaaaaagatgtagaaaataagagcatcttattctatttataggatttctactagggttaggttttgaattatatgaaattaaaaaagataaaataatgggtcttaatttaaaccttttggccgaaccaaccgctatagtggaccctatagattttaattttaccattttatttaataacttatcttttctttcacaaataccatatttaattctaactctataaatgttaaatctatatatttaataattaattatcaaataaaattattatttaacttatttattaattagaccttataaagtctcttaattaacaaataaaccctaaattctctcttcttctcaaataatcccttacttagtgaaaattacactccttattacatagaatgctctatatgtttcaaatatagatacgctatgaattatccatttttttcaatccaaataatcaaagatcctctgtagatgatctacatcgagtacgaacaaatttaccattctacccctcaatgtattttacccttgaaacacttagcttccattatgacatccaatgagcaggtgtgattgttgacagattttctaaccttgaaagtttgtgtttgtttcaattttgaagcacacagaaaccagttacaattttcatcaacaccagtaaccatgtattgccttggttcagatctcttagttctaatttgaaagttctttatctttgtatagaaactagttactattttcagtatattcttgtcactatatatttgtccttcttcgatctcaagcacgatgtaatctttgatgatctccatttcttcatcccttctcttttttgttacttcatttgatttctctattataaaatctgtaacttcttcagctattgcaaacatatttggagagattgttatttaactattatcatgagttgaatcatgtccttcattatcaaattgttggttgaatagttcattatgtatttgtagaacaagttcttccactgtcttgctttgctcttgtattagttgttcgaaagattagttttccactgtttgtatagatgtctcttctatagttgtgatgcatagtggagaattagttactccaacctatatttttcttagctcaatgtagaacctgagggaattgtcactcaatatcttcattggtgttgttatcggaaatatctggtatgatacgtctatgcagcttctattgcaatttatttctatttttatcaggtccaccaagtttgctagtcatcataacttgtattttctatctattggcccccatatttgatcacacacatgctttgttgtatacctgcatttttaaaggaaaagtaatattagaatctgactataacttttttatttggaaccggttctgtttaaattttctgtatgattgttctttttaagtttttaactggtttctaatacttattattattttataggtagaatcggtttcttttttctgttatattcttatttgttagttatcactttgattattttttttttctagttgtttattctatttatcatatttcattaatattatttataatcggttttctatactattatatataaagttatatatttttttttattctgttgatttaactggtttttttttgtttaagtttttataaattttctaaatattcattattttatattgaaattgaaatttttgatttttatttatttttcagatgat

SEQ ID NO: 221121 - DNA, 2966 bp, Cannabis indica
caagtttgtttttcttagtgaaattttgtgtacaaaagatgttgtggaaaaagttaaaaatcggttgggctttgagggaagcttttctgttgatgtaaatggtagaaagggtgggctagcttttttatggaaggataaaactgaggcccaattgctcaaatattcccaaaatcacattgatcttgttgtgaatattcttggaatggtttcatggcgtctctgtggcctgtatggagaaccgaatcggcatctcaggcatcacacttggactctacttcgaaccatggctggtgaatcgaatctcccctggtgcattattggcgacttcaataacattctcagcaatgaagacaagaaaggtggtcgcccatatccctcctctttgctcacgggatttcaagatactgtcaatgattgtaatctcattgatttggagctcaaaggctacccttacacctgggaacgaagcataggagcagctaatgcagtagaaatccgtctagaccgagctatggttactcaatgttggttagatgttttcaaagaggtatcccttactaatcttggcttctcttcatctgatcattcccctttatttttgcttcctgaatttactgctgccactattttttcttctccttttcgttatgaaaatgcatggcatcgagagcccttatgccatcaaattgtgtctaacgtctggtactcaaacccgactgtagacatcatgggaaaaattgcaatctgtggtaagcagttggctgattggggtcgaaacttgactggaaatttcaagtctaggctgaaaaaaagtaagaaacgaattgctcagtataaacattctgccaccgattttgatgctgaaaattttatggtagaaaagaacaattattttgaaatcctagcacagcaagaactctattggaaacaacgctccaaacagttctggttacactcaggggacaaaaacaaccaatatttccatgctacagctagtgctcgaaaaagatcgaaccatattcaacaattgcaagatgctaacggttcttggcaatgttggaatactgatattgcaaatgtgataaatcagtattttgaggatctatttcaatctatggattctttttctcctctaattattgataatgtaagaagctcagtcacgatatcccacaatgaagccctcttgcaaccgattcttgacgaagaagtaaaagtggcggttttctctatgcaccctgataaagctcctgggcctgatggcatgggtcctggtttctttcaacaccactgggatattgttggttcggatgtcactaacttggtaaaagaattttttgcaaccgaggtattaccagaagggctcaatgataccaatattgtgttgattcctaaaaagaaaaactttgttataatgagcgatcttagaccgatatcgttgtgtaatgttctttataagatcatttcgaaagttttagctaacagaatgagagacttgattgactgtatcatttctgaaacccaaagcgcttttattcctggacgcttgatatctgataatgttatggttgctttttaggttatgcactatttgaagcgaaaaagaagtggcaagaaaggtttcatggctatgagtaaagcctacgatcgagttgaatggagtttccttagagcaatgatggctcgtatggggtttgctagcaaatggattgagcttatcatggcatgtgtctctacggttcggtacagagttgttcataatggtcatgttcttgatcctatctctccttccagaggaattcgtcaaggtgacccactctctacttacctgttcattatatgtgttgaaggcctctctgctctaattcagaaatttgaagctaatagactcatgcaaggttgtaaggttgctcaacgtgcgcccccaataacccacatgttcttcgcagacgacagttatttgttcagtcaagccactcaaggggctgctggtagcatcaccaacatgcttcaacttttcaaaaatgcttctggtcagaaggttaattactccaagtcatccatattttttagtccaaatactgacattgctacccgtgcatccatctgctctactctccatatgtcagaagctcttgaaggcagcttttatttaggcctcccaaacattataggccgtaataaaaatgctgtgcttggattcataaaaaacaaggtcatatctcgtatcaacagctgggatggcaagtttttgtcttatgcagggaaagaaattttactcaagacagtgatccaatccctgcctacctatgctatgagtgtattcctcctcccaattggtacttgtaatgagattgagaaactaatggctagcttctggtggaaaactaaatcaagtaatgggcgcggtattatatggatgtcatgggaacgtctagcaactcccaaagaagaaggtggtatgggatttaggcatctccatgattttaatcttgttatgcttgccaaacaacgttggagattattatgtaagcctgattctcttgctggtaaagtttacaaagccaaatattttccacatactgactttctctcatccgaccttgggaataacccaagctttgtgtggcgcagtatatggggtgcaaaggacttggttaagttaggggcttctcgggtcataggagatggaaaagaaacaacaatcctgggcttcccttggcttccatcttccagcaataggtatgtcacttctacacatcctggactcatcaacaacactgtcaactcccttctgcaaacgaacacaagctgctgggatattgaggcagtccgtgaccttttttctcctaaggaagctgatctaatcctagccattcctcttggtatcaactcaagacccgacagttgggcatggtcagcagatcatcaaggcacttacactgtgcaaagtgttaggttttatg

SEQ ID NO: 221122 - DNA, 2465 bp, Cannabis indica
ataaacaagcaatgcattgtgtgggaaatgttgtcgcgtattgagttgagaaatggagatcctttgagccgggattaggaacgctaagatcatctataagctctctgttccttctgaaatgtatacaattttttaacatgttttactcttttacaaatgtaagttgagattaagcaattacactaacctgaatagatctgaagtcttgaaaatatgagcaaaatcaattcccaaagctgtttcttgtgctgaagaagtaacctccaacatccaagttgctggattataaccatctttaatcttattcacaccttcaatagactttacacaaaaaattactaattagtagttgttactattagtgagtttataattgtgaatatgaaaagcatgaaattacctcaaagtattggattagattggaacaatggtgatctaatggcccaacatatatttcttcacctccacatttcatcaagaaaagctgtaaagaattttagtttcttagttatcacaaacattcgaaatagacaaattatgaatgcttaaacacctcatcaaaagcttcaaagatgtcgaggctcggttgatgaatggtgcacacaatggttctgccagtattcacagcattcctaacagctctcatgacaattgcagccgctcttgcatcaagccctgaagttggttcatccatgaatattatagaagggttcgctactaactcaactgctattgtcaatcttttgcgttgttcagttgagaggccattaacaccaggcaatcccaccagtgcatgtcttatcacatttagctctgttagctccatcacttcctcaatgaacatctgtggcaattagtaatataattagaatccaaagatgttgagcaaataaatagagaatttaaatttcaaacaaacctctctggttttggtatcaacttcagttggtaaacgaagccatgctgagtagatcaaggactcgtagatagtaacatgtggtgaatggatgtcattttgctcacagtatcctaaaattcgagaaaatgtttcttgcttcttaggatatccagaaattttgatatcgcctttgatgtatcccttggtctttctaccagctaagacatccattagagtggtttttccagcgccacttactcccattagcgctgtcaaaacacctggcctgaaaacaccacttaattcctttagaagaatcaacttgtcatcttcaattccctggttcttcatttcctacaagtttggtttagttcaagcacatgagttacattattagaatggattacaaaagctggcaatataaactcaaattcctcatttaaaacttacttgtggcatgtcaacagagtaaacaatatctttgaaagtgatccaatgtggttcaaatggaagaaccattcctgtatttctattttggttcatctcttcagtactactttctgcattttgattatctgaatcttcaagtagaacaatcgaatgagatttcccgaactctgcaatgaaaatgcagacaacattagaacacagtcaacaaagaaaacacactcattttagcatacaaggaagaaatactcacggttgaggaaagtgagagaaagtgcataaagaacattgaaagcgatagtgtaaccaaccactgctccaaatccaatccaataccaatatggttttgtaaagaatccttgagattctaacactgcaattcctagatgtcttgttccatttggttcaggctgttataattttgagtaaaaccccaaaataaaatccatgatcaaaattactcaaaagtgagaagaaaaaaatatcattatgtctttgagtccaaaaccttacatgactccattggtctgagagaaactcattgacctgtattgcattctgatagtacattaggggtgaactccaataaccccaaatccaccatttcttaatatcatctgtagtgaaacactacaacaatcagaatgggaaggcattataaaacagcataaatatatacaagacaaaaaagaaagaaaagaaagttcatttactctttgataacagaaagcctcccaaaccgaaaagcatgagcaatacaaatgagccaaaagtgtcagctacaattagattccgagatgtagctgcaatagcttggaacaatgcagagcccatttggttcacgaaaatgagaagaagaccttgcttaaagaaactgaaaaagtttgcaaaatagaactcaacccaactattgaagaggttcaaaaataagattcttcataataagtcaaattaaatcatgttaccttgcaacactaggatcaagtccaactaggtagtatgtaatggcaacccaaatcaagacttctaagcatgcaatagggatcttaagaatccaagtgaaaagagcataggcccatgcaggataaaaatttaggtccctttgcttgtaaaacactgg

SEQ ID NO: 221123 - DNA, 2673 bp, Cannabis indica
aaaaattctccttgatcattattgagattgttagatttaagaacttttgttcaatttcattcaattttactaatttagttatttatgtactaaatcatactcccatattttgatatctaccaaatcatgttgttcgaactttgcaaattatactttttgaactttcattcaagttagacattctttactaaaattgaacaaaagtccttaaattcaataatctcaatagtttaagaagaatttttaacgatcttaaaagtttaacatacataatttaaacatattaaagttcagataaaaaaatctttattagccaataaaatactaactattcataataagtactcacatccacacttaaagaaacttaataacaatttaaatattaaaatgctatcaagtatatactttcccaaattagatgtcggcctcaattcttcttccttttttttttttaaggtttgagattgaaagtagtataaccatgtagttatacgtattaattgcaaagaaaaacaaaataaaaatcaatatagaatccacagtttttattttttaaaaacaaatcgataattttaaattaattgaaatattaaaattataggtatttaggtcattaacaaaaaatattttgaccacaaattatattctttatttttttttcctttggaagaaataatactcatttttaataattgaaaatttgagatgtagttttaattatttttaagaaattatattctgaattttttataattaataaaattatgggaacgactatgtcgactacaatgttgaaccagtaccatatcacactacaaaaaactgctacttttagtgacaactttttaatcacaacataaattttttgtgactaaatgtgatttttagtcacaacaaaaaattatttgtgactaaaatataacatttaaacacaagttgtcactaatttaattttagtcacaacaagtattgtgactaaaaaatatttagtcacaacaaattgtaatttttgtaactaataatagcattagccacggaccttttagtcacaacataagaataataatttataattagtcacaacttttttatttttagccacaaattttgttgtgactaaaagtaaaattttttatagtgtcatatgcttatacagtgccttattgtatgctttagtatgttgtatgattctcaacttttttttttcttttacataaagatatattaattatagttagagcatgtctcttgtacattttttttaaaattaaatagtttataaaaggccgaaagtaagatcaaataattaaatataatattgtacccatatatacttgaagtttgaatcttattttctaaatataatttgaaatttttcgaaaacatatactaaagattatttgatgtaattaaccgtaatataaacaacaaagtttaatatgacacagcataaaaaccatgccaaaaaaaccaaaataaaatagtatttcttttacgtatacatacattattcaattagaacaaccattatggtatcatcaaaataatataagcaactcatttcacgaggaacattatgaaatatataaatattgtaaaacaaaaatatagaatagctagattttagttcaaagatatatgatgtaagattgatgtaatacaaacacatcataatatttattcaagtgggttagatctgatctatgatgtgtgattctaatatatacgcaccaagtcaaaaagtgttctggtaccaacataaacatatcataagccaactgccaaagcctatatagaaagataggtttttggagttgcagaggtggtggtgctctatctatggttgtatattatggcgcgtgtcggtcagctaaataactaaaagctacacccactatcattagtttttggctgtaactttcagctttagataaatttgagagttgggttgtggacggttttccattttatctacctgatcataatatatatataaaaatatattttctatattttctttctttcaatcgaactgcttttatattatttatgccgaaagttttgaactttttagtttttaaatccaatttgtttctcatgattttaagacatctctttctttcctgtgtatagcgcattcaatttgagtggaaaaaacaggtttgtatattttaacatataaatgcaaaatataattcattttgttaaaagttaaattataatgcaaaaatctcacataattaaaattgatctaaatttatattacaatataacatgatataaaattcgcatcattataaatgctatacttttatatttacaattatgttatttttaatattttattattaaattttagctaacatactcctttgcgttaaatgacttgcattattattattttattattaaattttacatttaactttgcattattatattattattttatattttttttaataaattattaaattttacatcaagatttacaattatgcattagagcacaataataaaaattcatttaaaaatatcataaaactactttttgtataaaatatagctcaacttttacatcacttattaaagatggtctaacagcatcaatcaaaataatataaaatttacgagtattattcttttctttatcaattagttttgcatttt

SEQ ID NO: 221124 - DNA, 4394 bp, Cannabis indica
agggacttagtcttttgaatcatataatcacaatcacattctactgtgttgacatcactgtaattgtgaatgactatatgttccggacttaacaaattttgtgcatatattaaaccataagcatgaaaactacatgttaacataaatcacttctaattctcttattgataacaaatcagattagattgtaatgggttttatttagggcagaaaatcccaacacttaatactccccctcaagatggactttaaatgtcttttagtctcatcatgtctttgaatacattgaattggttaggaaataatggcttagttaggatgtctgcaatttgatcttttgtagaaacatgaactgtcttgataacaccttggtgtaccttttccctcactaaatgacagtctatttctatgtatttagttctctcgtgaaacactaggttgacaactatatgttgtgcagatttattgtcacagtagagtaatgccggcccttcgtgctcaacctttagttcttttagaattgagagaagccaaaccacttcacatgtagtgttagccattgtcctgtattttgcctttgcaaaagatctggaaacagtgtgttgtttcttgcttttccatgagatgatggatgtcccaacaaagatacaaaaaccagttgtggttctccttgtatctggacaagcagcccagtcagagtcagtgtaagtatgtaatcttacttctgagtttgcagcgaagaaaatcccctatcccggactacctttgacatactacagaaccctttgtgttgcatgtggatgagtgactctaggtgtagacaagaattggctcagtttgttaacttagtaggagatatctggtcttgtaattgtcaagtactgaagttttccaacaatccttctgtacaatgttgggtcagtaagtttttctttctcatcttggataagcttgaaattaacttccaatggtgtattcataggtttacatcctagataactaaggtcttccaatagctgcaatgcatatggtctttgagaaacaaagatccttttttctgatctggccacttcaagacctaggaaatacttcagttttcctaaatctttcaactgaaatcgagcatgcaatatgacttttaaatattcaagctcaacctagttgttgttagctaggattacatcatccatgtacaccagcagaaaaatgaaacttccattggaatgtttgatgaataaagaatggtatgtggctgaatggtgaaatccttcttcagttaaagcactcgagagcttggcaaaccattaccttgaatcttgcttccagccatacattgatgtttgcaatttacaaactgcatttggtggaaactcccccttaggtctataccctcgaggtagagacatatacatatctttaaggaggtcaccatgtagaaaggcattgttgacatccagctgatgtagatgccaacctttgattgctgcaagagataaaaccaacttgacagtaaccaacttagttacaggagcaaaggtatctgtgtatcaatccctcctgctggttgtagtccttggcaaccaacctagccttgaacctctccacactcccatcagcattgaatttaatcttgtaaacccacacatcagaacaaaaattaaaccataaaagatgatttatgctactatttttcaaatttcagtatttattagcaataaatttaatattttaagtatttatgtcacaaatttttaatagtaaaattaaaattttaatactaagtaattattattaattaaaatacacaatttattttttatacataatttaaaatattttatatatcctctgcaaaacacgcgatgcttactagttatatacattattaagtttataataatatgttattaataaattaaaaaataaaaattttaattgaaaaaaaactacacacgtagtaggtattatttttttttaaaaaattatatatatattattaagtttataatattatgttattaattaattaaaaaataaccaaagatcttgtggagaaacatcagcaagttttttaatgagtgcccaggtatactttttatttttagtttcaggaaatccataaacagctgagaaacgccaatgggggcatcatcaaacaacaagtagcagtcaaagggatttgtattcattgaaagaagagttacaataacattatctttccgtagcaacataatacctccctttaaaccgacacgagggacttcaagtccattattaaaattaaaagattgcttgaaatgagaaagagaaaaccatgacttttgtttccataagaaacaaaacatgaggagtttgctcatgaacaagcaaacgtaatcgacggaatgcactcaggttccccaaactccgtgcattctaattgattattttcatgatgatttgcatgattgcatagcaatcaccgctgagttgtttgaatgatcattggaatccacatttactgtagaaaccgaatgatccaaatcaacttcatttgacaggtttgattagcaatactctttaaaagttattacattaaattatatgagacacaatacttaattgcaccaataacaatatcgaagcgtaagaggataatagacactattagtgcctttcgaaatttctcttaaatttatattattttggtgaacccaaaaaattagagttatatagctatattgatagctggaggtagtgctgcaaatataagtcggactttttgacacgacatggaactgacacgagcccgagaggtacaagcatgactcgacatgaaaagttatgtgcttaggcacgacatgaaaaaatataaacttaggcacgacacgacacaaaaaatatggacttaggcacgacacaacacgacaagcccaaaagcacgatatataagcacaaatagattaactctaaagcgtgacacattaaaatatccaataatttgataatagtaacaataataaatatttatttatcaattaaaatgatagtaatattcaaattataataattataattattttttatatgattgtctgtaactattattgaaaaaaaatataaaaataattaaaactataaaatacacatatattttagtatttagctcattaattataataaaaatacaaaaatatggagcacaaatttgagcccgtataagaaaataggttggtctatttaagaaaaacgggtcaacccaaataaagcacgatatgaatgcaagcacaacatgaaattatcagacttgcaggtagtgtcgggcctacgcctaccctataaaattgttgcacagcatgacacgactcatattttttatgacacagcacgacccatattttcttatgccacggtacgacacgtctcatatttttttataatctgaaacaatacgacacaacctgtattttaaaaagtacgaaaaataggaatcatgctagcatgagatacatatatttagaactaatggctggaggcaatatcaaagaaatagcaactcatcagttcgtcaatctagcaaaactagattttgtaagttactaatgaaattgttggaaaattttccagtaatcatgttgtacaacttttttcaattaaaaaaaaaacttcacatttttttttcttacaacgggagttcactataaattttttacttttagtcacagcaaaacttgtaaccaaaagtaaaaaagttataactaattataaattataatttcttatgttgcgactaaaaggtacgtggctaaatgtattagtcacaaaaattacaatttgttagattagtcataatacttgttgtgacaaactaaattagtgacaacttgtattcaaatgctatattttagtcacaaataactttttgttgtgactaaaagtcataatttagtgacaaaaaaattatgttgtgactaaaaatttatcactaatagtaactgttttttggtagcggtcgatgtataatgaactaaaattccagacacacaacacatggcatcacaaatggttgacgaaagacataacgtgtaaagttttggttgagcgtagtgggcacgagcaatgagtagggtgcaacgttaaagggaaatgtcgcctccagcacaatctcaaactcaagcacctctacaatcccgtccacacaaggatttctaccacacgtgtcaataaagtgtgcacctatgccgtcggttctttgctaggaatcgacggcatagggtttctccaaaacccttaaactttgccaatttcgatccaaccgacgggatagagtttattattgtatatacctacggtttttaccaaaaaatcgcctctaaatgtcaatttcgaatcaggtgggtgttttcacacccttt

SEQ ID NO: 221125 - DNA, 1318 bp, Cannabis indica
gtttggccttccacccttgaacatgcttcaaaactttgtccacaaggtggttatagtcctctatttgtttaggtgacctgaataggggtaggcctagatatgaagcatttgcacccatcttcttcatcccaagataattagtgataactcttatcctctcccttggcacaccttttgaagagaacacagaagatttttggagattgattgattgtcccgaccattgacagtacgtagatagacaatcttggaacgccttagcttctttcaaagtggcctgaccgaagaagatgatatcgtctgcaaacattacgtggtttaccacggttccatgtctctccaacttgatgcctttaattaagcctttttcttccttatcgaggagaagactggatagggtctctgcgacaataatgaacaaagatggggataaggggtctccttgtcgtaagccccgctctggattgattttccccacaatgaattcgctgagcaagagtttaatccccttcactgagatgaaggcccaaatccactcaatgcatgggtgggagaagccaagttgagtgagaactgcgatgataaaatctcagtccattttatcgtaggttttttccaaatcaagtttgatcatcatgaaacctctattccccctctttttcttcatagaatggacaatttctcttgcgatcatcgtgtttttcgcaatgcagtggcccttgacaaaagctgcttgatttggcaaaataattttttgaattattccctgaagtcgtgacgcgatgatcttggaaataatcttgtaggccacattacaaagggctatcggtcgatagtcctttgtgtacactagagaatctttcttcgggataaggacaatcgtggtgtcattactgtaatgaggtagttccatatgagtgaagaaatggataaccatctcaaccaaatctgcttagatggtgtcctagtagtgcgcaaaaaaactcggaggaaggccatcggggtcgggggctttgtcctttcccatctcgttaatagccgtagtgacttcctcaacattgggaaaagcatttagaatgagattatcatggttagaaatagttgcactaaacactccattcaaagccggtggtgagtagtcatgctgtctgttgaatagaaatcatatttataccgtaatggatgttaagattcaacgttttttctactaaaatgatggttggaggtataaccaccacaatgacttcttagcttcagtttacacttaaaacaagataaaaatctaaacttttcgggtgtataagtttaggtatagaat

SEQ ID NO: 221126 - DNA, 3090 bp, Cannabis indica
tgtgtagaagagtagaattgttcatgcaagagtagtagagaaaatactaagtagaacttcatgtaatttattaatatttattaactctctcaactctaatattccccaaccaaacttgtacaatagaaaaagtataatattaagagcaccctttattctctcaatattcagcaactagttgttgaaacaacctataatctacacatgtgagcagtagtgaacgttaaatcccatttttctcaaggtttaccacaaaattataattgattgcatataagagatactatatccgtgttttcctataagaacctatgaatatagtcatatacatatgaaaagacaagacacatatattagaacatatcaacaaaacataggaattgaataatgttatttcagaaaaatcttaagtttatctaattttgttttacgagccgggccatttatcctataatgatcttcattccttattaaacatctcactttcctatcttttccaactcattattcagaatggtattcttgcaactaattctgtaaaccaaaccaggcaaatttgtctataattaatagattggaaacaggaagttacatactttggcaacaatttacagagttatatggtaaagttgctttctttattattcttggaaccaatggacaagaattacatgactagaaatctcaaaaacatgagtataacattagtgttgatggaattctgtttgtcctgacagaaatattatattacgagtttaaaaacaaaaagaacagaaagtgattagaaaagtgtctgaatataaaaaactacactaaagaaaaatgagagtgaaccttcatcaagattctctttaaccccatcattttttggacaaaaaacatagccataaattgtaaaaatatatatatacatatattctctgataatttgaattttttatccgccgactatataaaacattcaatgcttgttttatttttctttaaaaaaaatgagcaacaattcaaactcaaataaacctaaaacgtaataacaaacacatggagatcattataccataatcaatgaaactaacatattgagccatcaaacaaaaatttcaaaatttcaaaattttttctctccgtacgtcttgaaggaatgttggaattctgacgcgagaggtggtttcgcacgtccctgaaatgggtacggaggggcaatctttgtcctgtgtacggcgggaccaaggcgtccatagtccggaaaggtattacctttatgattctgctagggttgtgataccaatccattctatttcttcctttttccacagaaacagaggtcctcttatcgactgggatttgggtttttcttattactggttgggctgttcttcgttgccctctattccttgcttgtgtgtttctctaaaggtttgggttgtttctgcaatgtcgacgccggagatgaatctgaatacgatggaggaggtgatgagtttagtcgaaaatgttactatggatgatttctctgtggacctgaccccagacgatgcggtagcacaagacactatcaagaaaactgtggtgggtaagttttttatcaagaggaagatcggtaatggcaagcttcgttctatcctctccgagatgtggaatatcagccccggttggcgtcttcaagagataagtcccaaaatttttatctttcgattctctagggaatccgatgctctgaaggtggtgggcaatggtccttgggccccctgtggaggttttctgcttgttacactgatgccggatgatggaaaatggaaatctgctgatcttaaccatgttaatatttgggtgagagctctgggagtcccctatcggtattttacagatgagaatgttgaaaaaattgctaatagggtgggtaagtgcttgtccaccaacaaaatgagagtgagaggggtgcttcgaagcaactttatgaggtttcgggtgagcctggacattgctaaaccgctcctggcaggggtgggtttggatgatgaagatggtaaaaaggtgtggagctatttcaagtatgaacgacttcctcttttctgttttaaatgtggctgtattggacatttggagagttcttgctcggcggggaagagaatgatgtctttggatgatggtagaagcgttccgttattcggcccttggctccggtttggttcaaggctggaaaatggttttgcagtgcttgatgcagaggatttcaaagaacgaactagtatggaacaggaagatgatccactcttaactcgtggaggtcatgatggcggttcggcggtaatgacaaaccgtattattcaaaagagtgataactctttcaatgtaccctctcacgagaaaaccatacctcaaagtcccacctctccttctgatgaacctcttattgggctgattacaccccttaacagagcaaggggaaaggtttcatccctgctttccaaagggagatcaaggatggcccataaaaactctcattcaagaatgcttgggccccgtgggattccaaagaaaccgatctttgggaattctaatgatctggataagagtgatgttggtacaaaaagaaagaaaatctcggatggacacaatgaattcgagggagacaaccttaagacgaaaccggggcttgagattgaccggggaccaaaggatgtgtttgctgagggtagttcaaattcgggtatccttttgggggacgtgcgaccagctgttaagttgggcgagagaaatcttggtctaatggaggacaatggaaaagaaaaaggaaagccggcgccgataccgaagttagagaaggccaagggaaagatgacttgggtagaggaggtgatgatcattctttttcaggagattcgcggtacaagaaaccggagtggaaaaagcaataaacccgaaagcttgctggcccttgaacaagatgatgggttgttcgaagacgaggaagtggcaaagtctgagtctcgacctgatccctgagtcgggcctcccaacaggtgaacattacataactatctctggttctatgtcccttatttctgatgctaatgtggctaggggtac

SEQ ID NO: 221127 - DNA, 3258 bp, Cannabis indica
taatatataataaatatattaattaaaaatacaataattttttaaaattattttattgtgtggtattaaaaatgttatttgtataaatacttatgagaattatgatacatgtgtaaattattggagataataatgataaattttattgtgtatagtatatataatacagttacatggttatacattaatttattatagttatatattgaacctagtatatgcatatattaaattgatacgatttttaaagtatataattatgtaaattatacatatatatattataataataagtatgagagatcaattaattttgataaaatattaaagtaattgtaatataaatatttgctctaacttttatcctcattatttttaaagacacaaaaatatcacgaattaaaaaaattaaaattaaacatcttctctctctcttagatagattaatattaataaaattataatgaaggataagcttcctctgtttcttgctctcgcagctctcgagctggtgccatggcaaaaacgagatctaaggcgcaaaggaagcaacaatcggtagctaagaaacctggtgcgaagaaacgaggccctaattcatcaaccgatgctaagaaattcaaatccatggactctatccttggaattgaagctgctgagtttacggacgatgaggagatacctattgaagagaatgctgcactggatgagcaatccttgatcttatcgcctcgatcatctcttcgagccctgcagtaacaagaggatgttcgtgctgattttgctttcttcctggaagctaatattcaatgcagcaaagaccttgaggaaggtaatcactcagttccccctatcttgagatctggttctgtcttaaggaacttaactgattcttttaataatgctgagaattctgatgtcaataagagagataatactggaaaagggaaagttaagattaccatggacgatattgaagaggaaattttattttggaattcatctatagtttgttatgtacttggggccaattcgcctttatcaattttggaagggtttgttcgtcgaatctggaaagacaaagttgacaaagtgggattgctatcctatggcatctttatcattcgatttaccacaattgaggacagatataccatccttaatggagggtatactttctttaataacaggccagtgataatgaagccatgggatcccgacaccaactttaagaaggaagatatccaagttgttccaatttggattcaacttgaaaacttggacttgaagtattggggccaaaacactctcttcaaaattgtagggaaatatggaaaccctataatggtggatgacaatacaaaaatgaggcataaactatcctatccccgaatccttattgaagtatcaatgaagcaggatttacctggaactatcagttttgaggatgaatatggtttcaatgtcacagtgggcattaagtacgaatggaaacccctagtgtgtaaaaattgtaatggtcttggccatcttactgaagaatgcaggaaaaaaccagggcagaaaaagcaacaatcgatactcaaggagtcgaaaggtctaccaccagcaggggccacaaacacagatacggttgctagagactttcagcctgttactaaagggtggaaaccaaaaagcaagcctcatgttactggtacaatgactgggaactcgttccatgtgttagatgatcaacaagagaacaacaatgatgaggcagtgacaataccagatgagaagcaggaaaatggtcagacaagaagggggaagagtggaggagggggagagcctcctctacaaaatggataggctactaagttggaatgtccgaggagtcaacaaccaacgaaagcaaaatatggtcaagcaattgatcaattcccaaaatgttggtttagttggtctcctcgagacaagagtaaaggcttccaagcttggagccttgtactcaaatatgttctcaggatggtgctttactagtaatttagcttggcataaaggaggaagaataatagtagcttggaatcctaatttcttttccatcaacatactcaaatgcacaagtcaacttatccacctcgaagtatctactttagatggtaagaaattctttactacttttgtgtatggatttaatgaggtagaaggaaggaaagctctctggaaagacctaatggatatggccactcttgatccctggattgtgatgggggactttaatggcatacttgcaaaagatgaaagggttggttctaaagttagacacaaccttacacctgatttcccgaactgtgtagcctactgtcagctggaggacatcaaatatacagggaacttcttcacatggtgtaataaacaacaagattcatctagaatctattcaaaaatagttcgggctctagctaatgatagatggattgactcttttcctggggctgagactatatttttaaatgaaggtatctttgatcatgcaccagctttacttaccgtccatcagaatatgcaaatagggaaaaaaccatttcgatactttcgaatgtggtcttcacatcctagttatgcagaacaagttaaaagaatatggaggcagaaacatgaaggcaccaagatgtaccaagtggtgacaaaactcaaagctctaaaggccattttcaaaggaataaacaagcaggggttttctgatatttaggctgctgtgattaaagccaaagaagctctagatgactgtcagaatcggttgcacctggatcttttcaattctggaatacaggagcaggaaaaagacttgaggcaaatttattctgatgctcatgctagctatctatcctttcttcatcaaaaagccaaactcacttggattcgtgatggagatgacaacacagcaactttccacctgagtattaaagccagaaggaaccaaaataagattctctcaatagaagatgcacaaggcgtaagagttgatgacccgagcaaaataactgatatttttttgtcatattatgagtcccttcttggtaccagcaaacacaacagaaaatcagttaatagaagggttcttagaaacaatggccccacagtcaccccacaacaagcagaagcacttgtagctattgtatcaaatgaagaattcaaaaaagcaatctttgcttcaagctacttttttcaagacaattgggatctaattgagggggacatatgtgatgcagtgag

SEQ ID NO: 221128 - DNA, 1932 bp, Cannabis indica
ttttttttttagacccattaaatatgttcaattcaatattggtccataagtttaatttattagttattatagaaaatagtgaactcggcaaagtaatgataaataaatattttaatggaaaacagaaattattattgtcgaaaaaaaacagaatctcctatcaaaccccataaaataaataaataaataaataggtagaagtgttgctgtgtaagcaaagataaataaataaaaaaaattacaaaatgaaaccgagtaaaggaaagaaagcgatagaggaaacctgaaatggttaatacagttgccagttggcagttggataccgtacagaaaaacgatgagaatatgatgaaaaacccatccaacggttcaaaatcactttagttttactccattcttaagaaaaaataaaatataaacgtgtagaatctttaacgggctttcttcggaatatccttttatcaaattccactctggtttttaatttattgatttattattattttaaaaaattataccaaacaaacaaactcttctttctttttcttctatattaacccctcaacacctcaaaaaaccacaactcaaacaacctaaaaaaaaaaaaaaaaaaaaactcctatttcaaatgtgtgaagcacctaaaaacgcataccaactgttggaagaaattggccgcggacgcttcggcaccatcgtccgagccttcagcccagtcttggaagacttcgtcgcctgtaagataatcgacaaaagggttcttaccgatgacactgacagagcttgtctcgaaaaggagccaaagatcatgacccttttggcttctcatcccaacattctccaaatctttgatgtctttgaaaacgaagattttctcactgtcgttttagagctatgtgaatccgctactctctacgaccgcatcgtcggccggactctttccgaatctgaatccgcttctttaatcaaacagcttctcgaagctttggctcattgtcaccgcctcggcgttgttcacagagaccttaagccggagaacgttctgttcgactcaagagggaacctcaagctcgctgatttcggctctgctgagtggcttaacgaggatggcttggtcgaaggggtggtgggtacgccgtattatgtggcgccggaggttcttttgggcagagagtacaacgagaaagccgatgtgtggagcgccggcgttattttgtacataatgttggctgggattccgccgttttacggcgagtccgccaccgagattttccagtctgttttgaggggaaacttgaggtttccgacgaggattttccggtcggtttctccatcggctaaggatctgttgagaaagatgatctgtaaggattcttccagaagattaactgctgaacaggcactgagtaagtttccttcttttttgcatttttggttttaatttcttggctaaggttgatattttcttgaatctaaatatgggtgtcaacctcactatatagattgttctgaaattactctttgaacctttgcatgcaatttttatgttgattttctgtgactgatctctgttttgttcattgcataatgcaggacacccatggattctaagtggaggagagacaaattcaatggactgaataggaagaaaaaagaaaagggtttgtagtttttgacttccaaactcatccaagagaaaagccagtgtacatagatgccgtgctaagccatgccaggctatagtaagccttagtatcatgactacccaataaaaagattcccacttttctttcttacccaaaaccacagggaagatcatcatggatggttccatgaaaaaaaacacaccaaattttctactcaagaccagaatcagagttcgatgagaagttacacatgaggctcttttccaaagggttttttttttttttt

SEQ ID NO: 221129 - DNA, 3029 bp, Cannabis indica
gagaacaataatgttggcaaagatgttaaatccaagaaaggaaagaagtgactctccactcaagatcaactcatcgcaagacaataagtgtagctagtacaatgatgtacctcaatttgtcatgtagagttaataatataaaggttgaagttatattatttgtaccgattccatatactttgttgcccagaaagcttcaatgcttcttctttttttcatcatctttaattttgttttctctcttttcagggtcaaataattgattgaacctcactttctcgaaatacagccccggtgtcttcttttttaaaacatttggtatctcttactcaaattaaaagagggaattatgcaaaggaacaaaagaaaaaccaataactaacaaaaatctttggtagatgttgggaaatcagattccatatttagtggagagtacgaattgaagatgtctagtaatatttgcacaataaataagattggatgtgtatggattggaaattgagataaggtagtttacagctataaaagaaaaagatgaaaaaagatttgtcctatatagctatactccccctctcccttagtctcctatagaacattataattctatttgtgtctgtggttgagtctgttggcaaagctaaattaaacaaataaaaaagaaattgatcaaagtgaataatagtactacttgctgaatcaatacaatactgtacaaaaataccatctcatattggttggcgccatagaaaatgcatgtttgccactgttcggttctcatatttgtaagttaaaagtgtgtggacgacattaaaaagtatacaataatttatcaatataatttcaaaattattatatattgtttttcttttgaggcaagattttgctccatctcagatttaaagatgtaattatgatgttaaaaagtcttcccgaattataaatagtactaaaatgtattaggaatactggtggcaaaattattcgaacttttttttttaacacttaatcacataaactcaatttttgacagcgaaatttactgattccagtttgttctttacacttccttccaaaaagctcacttaagtgccacaatggacaatccacatgtacacaagtgtacacactacaagaatgatgggcatcaccaacaacactatcactgacgccataaagtcttcactaaatataagagtatcaccagctgttaacgcagattttcgttaaccaaaattaaatacccttacagtaattaatattctacagaaattaataagtaataaaagatataacaactctagatatttttacgtggctttgtaattaaaatttacatactccacgagtccttattattatgcatatttatgtttacagaatacaatcttttaatttgaataatgatcgttaagtctcaaacttgtcgcccccgaatataggttgacagttatcctatttgggattgattcaagtataattgttcatgaaacgtggacaatctttacgttttatttaaatcacatgtgagataatattaaataactacccaagtgctctttagttatcctttacatggttattgctgatgtggaaggttatatctttttttattcgagtaatcttctttgtccatcttgataagaaaaaacgctaagtgttgggaagattttcatctcgttatgttctctttgtgacttttgtaatgcgaggtgatcttctcgcttgtgtaatgcggcagtttatgttgatacattcattctcctcgggtggatgaatattctcttcttgtttatatattctgaggtatgcatatgtctcgttaatctcaaatcaataattattattcttgtctcacttttgactataaaactaatgagttttcaatattatctatttaaccttttattaaatagcaacgagttatttaacatgcatttattgaataaaactaattatattattcagaattgattcatattccttctattggactcctgtcagtttctgaagtgtattctaatttcgaatataacaccagcaaaatttaagtgtacatctgtgataaaaatgttttcttttgtaaaataatatatcaatagcaacaagcactatattaatgacgacaatgtcgtcattgataaatatattaatgacgacaaagtcgtcagtaaaactttttttaaaaaaacagactgttggaaagacatgctttttccctttgaaactatcgctgacgacaaagtcactaatactcactactataatatgggcctttagaggctattttttttaactcttttcataaaaagggaagctaaagggtgtaaaaatacccgcctaatacaaaattgacatttagaggaagtttttaataaaaattgtaggtatatatttatgaagtacatttagaggtaattttgggatcaggagttggaattaccctctatggcgtcgattatttgaaattaaccgataccatctgtatagctgacacgtgtaattttttacactaaggcgtcagttaattttaaataacggacgccatagaggtatatattaaccctttcaacatacagggcctcatttcgtcttcttctttattacgatacacacagcagcccataaacccacccaaacccttgccaaccaccaccctaaatccttctatctccactattttacaccattttaccctatttttaaaaaacttctatttcgatacttaaccatataccaaaaagttacaattttctcctatttcagtgttaaccaaacctattggaaaatagtggtgggtataatttcggtcaccgattttagttgagaaatgttaaatttcaacatctattaaggtataaatatgatttctattcatttttgtattgtacattgcttttattttttgtttttattaatttttttttttgggattttttttatattatttaacattgttgttgtgcatgtgcatggtggctggactttttgcagaattgatcgccagattgtgcttataaggtaaaaaattt

SEQ ID NO: 221130 - DNA, 3840 bp, Cannabis indica
gaaactaataacatgaacatgacgagttcatgattactcaggatttaggcgatctactattaattattgttatgatatgaattgtataataaacggcatgttaataaagacatcttcattcatatcggtcattgccatatataatatctattatatacaacaccttcacttagatgtctcactacattagtaatctaaaccaagattacttgcaccgaagaacaggcatcagtgaaccgtactagcaactattgattaaagattcataactataatatgtcgctcactattttattcataactaagtggccttagttctctgtatagctataagtcacaatctcatatatgaataaggaatattctgatatataatataaattattcaattataaatattaataatttaacattcaagcatatatcaattattcaattctttatttaataataaaaatgtctttataggcttttcagggcttaaagcccaataatatcatcctttgataaggatggttcccctatatatgcctacaaatcctcctcagggagcatatatgggacgtttgtaactatccagattgcaccacacctgatgagcaagaagaggcacccgaaaagaaaagcaatgtaaataagctaaaagcaaaatgggaaaataaccaaaaggatattggcccacttggcgaatcctaaggaaaatttaactacttagtcaaatattccttcctacaaactattggttcacgaggacattcaaccaacaggatgggaatgtgaagaggatgagcataaatcattactccaatgttacaaaccaaagaagtacaaaccaaatgactcacacctcttcatgctaaaaggtagaaatgatagatttccacttccttccagctttatggatgaaataagaaagctcactcaccagccaaaagtccacaactcaaatatttgagaagttgatggtacgttaaagaaaatccctctggccgaacctgtccttaattagcaaacagacaacatgctatcccaaaacaagaccctccaacagatacatgagaacctttatacggtcacccacaaagttacaaagatcaatgaagatttttttaaaagtcaacaccattatgactaggcccatctacaaaatttcacatatgcacgaagaactactatagatagccaaatctaggcaagttttccaagagatttttctaacaaaagaagcaaagctaaagggtctgaagagccagtacgtctctactaaaactcaagctcaatcgaaagaaagaacacctctcattccaggcttagactctacaccatggatattttcaacattatcaaaatctgtgcagccgttagcacatcaccccaaaaaaggggagactgaattccccgtctaaaaagaattctggatgaagaagatcaactaaaaaaataaaggccaatgcagtactcaacacatggtcaaaaagagaaataacattacaaacatcatcaccagtactatctaaagaatcttccacaaatcaatctcaatgaagagatagaaaactcagatgacaacgatttgtcatcatattctagccaatctgatgattgggaaactaatgaccaaagaagcggtgatgatgaagcaaatccacctcaattcatgacaactaaccatacaacagcagtctcgcgaatagaaagagaacaaaactctgaccaaatagagtcggtcatagaagaagaagtgtcttcagaagaaaggcatacctctactaaacagtagtttagtggcaagccctacgcattcatgcttgatgatcttcctctaaatcaatggagatctcgctcccaagaattcagagcatggacccttttagaagcacaaaaaccaagagcagaaataagagacatcttgctagagttagtatcaagattcacaagaatcctacaagattgatggaaaagtcttggagaatacaggcaacttcaatttctataaggagagtccattgaagcggcactaaatcacttgtacgtcgaattctttagacaagactctcaagtggtcgaacatttcagggctgaatttttcaaaatgaagagttgtttaatagaaaaagaggatatggaattgcacttccaaagaatgactgagtagttttatctaatcggccgtatcaacgatccaaaccttaaataagtgttccttgcatctatacctgaaccattaagagaagatatatttagactccttttagcaaacaacagaacactgcagaacacaattcttggagagttattccaaatgttgatgagctccttagaaaaggtgtgctcttaaaacaaatttctacaggaatacatgaagcaaataaaataactcgacaaggcatgcatgcaaccaaaaatgcttactatcaaatgttcaacaaaagacacatactcatgctcaaagtagaaggtcaaaaaaaagaaaaaaaggcttcaagtatatatctccaaacaataggactccttaaaaatctttcaaaaaaagaacatcctaaaaaaatcctcaaacaggtgtttcttgtgtggaaacaagggccattttacaaaacaatgcccataaggtaaaattgccaaaataatagcacacatagagaacgccattggggtatcactctttaataacgatgttgagtcagtcttttcaatcaaagatgaaatatccccacatactatgtgcgcattatagtcggggtccaatttagacaatgaaagctatgccaaaaattttcacatggatacaatcaccactagacaaccgatcccaatagcaaaaatgcatgtcatcccaacaaaatactcgaagccaatcaaagtagttgtattttttaatacaggagcatcatatacaattatgaaccccaacatcttgcccctagaactgtggaagaagagaagcaatttttccgaaataaccaagtactccacatccaattaatcagtaagtcgataaagctacgattcttccccgatgttcccttcccttgtccacttagtcattggatcaaaacttccaaaaaagggtctcattgtgagattcgaccttcacacaaaaaagaaaaggacttagaatactcccacaagggttggcctacaagcatttattcacccaatgggagtaaatcccaaattactttcacatggcacaagacgtattttcatcaatcaaagaaaatctaatacatagttcatgtgaaaattctcactcaaaattctcaatgaagtgtaatctccaattatggaaaaatgataaattctacatctctataccattcaaacagaacgaggataaataagtaattacaagggtaaaataataatttgactaaaactaattacaaactgacacaaggatgactaatcaccagaattgattatatcaatggacattgtaataaaacttagtaaatataattttataattattaagagttcaattctatattgataatggagtaatcatagaattaataaacatgattatttggttgatgagattcaataaataatctagttattataggttcatggaacccggatcgccaacttgaaatattgtcaagggtgtcgataaaagttgtataatgttcaggaaataaattttgaagtgttaaagtagtaattatttattttataataaataatttattttcaaatttattaattaaataaattggggaaaagataaaaactgtttggacaagggtggtgccactattactatgttaggacacagtgataggcactcctattagtagggatatcctattaaatttgtttttgggttaattaatt

SEQ ID NO: 221131 - DNA, 1771 bp, Cannabis indica
aagaatttaaacacctgaaggagaatcgggctcagatcttgataatactctgcgacagaaaggaacaacggttaaagatctaggtgggaggagtcattatattctgcttcaatcaatgtaaggttactcaaactttatatgtgtttaaattctattgttttagaaattcatatttaggatgttaataaacatacttgttagtaaatctagatcctggtaaaatataatctaacatgtttgtgacaagtctaattcatgtctcactacaaagctgtacccattttcactaagacaggcccgaaaataaaaccctggtagggttgttaacctgggtgctgggcatagggttgacttttgagttgttgtttcatgtattttcatcttccaagtcttggatttggacacttcacgtcttcatggtaaagaatagaaattgagttggaaacaacttcgcaggatccaaacacccattccagagttcttggagtcaacctgggcacagggctagggaccccttcaggtcgactgccatgactcaggactactcaactctaggattttttctttcttaccacatgtcaaatattgatgtccacatcaccagggtaagtttttggagaacattcacccccccccccccccccccccccatgtaaactttatacttatgtgaggttgacttgatgacgtcaagtaagcccatttctctctaaactatcagttgggcatcaattttggcaagcttaggcaattgtttttgttcttcaatgtcttctagtgagactaggaattttgaaaccctattccctttggaacaagggaattttaaatttaaaggtaaatagaaaggagagaaaagagaaaagatagttgattttctctctcttatctttttaaatttaaatttaaattcattgattcttggcttaggaatagatgagatcaataacttataaatagagaactcctctattctcttttcacactactccacacgcccaagactgagattgagagactgggaatcttatttcattaatctttcaagtgttctttagttcttcataagttttttgattttttttctgaatttttttttcttctcccccttttgtgaagctcatttcaaggattttgaatcttattggaaatatataaactctattggcaagcccgtcgaaaacaaaaaatatgattttcatgtgagtcgttagttttgaatttttccttcccgcaaggtgcaatttttctaaatttccttggaaaaaattattttgagatgatattcaacctttccaagttgaggaaagtcaagctgagagtagacattcctcgtatgaaaagaatcacaagaaaacctgaagaatatgaccgagatacaactcgattcattcaggaggagctcacagtaccataatccaaagacttatataaggcccatggtaaaaaagtcaggaccactgagttactcacttcttctattgaatgtgaggacctgagggatcgagtcttcaaactaagacctctcgtttttagctctattactcagcaacaaattgaactgatacgagatgagtagtcacttcctgagattgtttttagaaaaccaaggacaaggtgtccaagtagctctcgaaactattgttgcagtgcttggtcaaggtttcatatgaaggtaggtgcattcttgcatcttcacccatggtttatgtcgatagctgattacttcggagtctccattattagaaatatttgaatggttactggatct

SEQ ID NO: 221132 - DNA, 2490 bp, Cannabis indica
attgtccccaaaatcaaaccttccacctttacaaacaactgaagtcctatttgttttttcccaatcggagtctaattcgtaaatagtggcataagtacacaaagttttaagtttgtaaactgcataaactcaatgtttatatttagctgcataagtacctaatgtttgtaaaaatgtaatttttatctaatttcatcagtatagactctgttactatcttaaacaggagacatattagactcaatttctagatcatttggtatagacagaaatatatagtatgaattatttctaaatattcttttaataaattcaaaatggaatctgtactgataaaattggaaggaaattatagttttataaatattaggtacaaataagagtttcaatacatacttatttagttttttttttttttttttttttgttaattaaataaaaaactaaatctaatacctattagcctaaatatatattttgggggttgaattttattttttgcccaagttcctacaaatgcttggatcgatcctggttattacaattgctatgtaacaatgatgcccaatcttttttattattgttgactgagattttcgtcaactattaattagagttgcgtgaaataattaatgaatgttagaaaagagaatttttacgtggttggatcattaatgagtcttagtacatgagttactatattcatgaaagtgtttattataaaataaataattactattttgacaaatcaaaataaaatttttccgaccatcgatatacaacttttattcatacccttgacagtgttttaagctaatgatccagagaccatggacctataattttaagctccaataaaattgtaatttcattttcaaaaaagaaagaaagataatatcctcctttatattcactcaaacatctaatttatactaaagatatattaagatattccaaataataaaatatcaaaataagataatagaatagctcataatatttttatcaactatctcatgcattacaaactcattttctcaaaatatatacaaaatgaatattattattagacaccttaagattttcaacaccacactaatgtgattcatgatgaaggattaacacttttttatattagttattaaatcaaaaagtgtgagacctgatattaaagtacaccaataatattttgccaccttttttgtagtgtttggcaccttattaaaatagtataaagccattaattaaaaataataattattttgcaaaagtgcattaatgacaagtaaggggaggttgctatgttgtgctgagggttatgaaaggctcgaaacgatttagtttgaaactaaaagtatgctacggtggatggtattcttatctcatctatgagttgtcttgtgcaatagaagtcagcgcaaaatagaggttaagaggtttgtttttcaatttttaaagacggtggtgaagctgaaatttgggttaagccgtaggagagtgcaatcaaagtaattgttgatgccaccattttttgtgatcgaactgtgttggttatggcatagtcgttcgaaactctcaaggggaattagtgatggctaagtcaggtagttttgtttttttaagcactccaaatttggctgaagtaattggtataaatgaagtgctaagctacatttaaactcaatcatgacgaaaagtgaaggtggaatcagattgcttggtagcagtataagatattgggaattcattacctatatactttcttattttggattattatagaaaattatcgtaaacttcttgcatctttaaacaatgctttcttgtttttaattaaacgatatgctaacatggttgctcacagtcttgctaaaacatcttgttcttttctagatcgaattttcaacaggggtgatgttcctgtttaagtacactcttatcttttgtttaatatgacaaattaatataagttttatatttatattaaaaataataataataattatattaaatgtaattagagtgacattgtttgtaaatttaggggtgttcattggatcacatccaatagttttaggtttatccaaattcgattcaattatatattagatgttagattttaccatctgatccgatccaattaatttcagtcatccaatggatgttggattggatcggttctattcgttagatttatttcatgtatatttatttgtttaatttaggtttattcaatattttaatattttagacctaatattttttgaatcggattggatccatttaatattttaagtcgagtatgtattggattggaatagatccatctaaaccaagaaaaaagagtaaaattttaatgttaatttttatatatattttacgtataacaatataaaatctaaaaactcaatcaaactaaatgaaaatactaattagttcaattgaatattggatttattagatttttggataccacatccaatagaggaa

SEQ ID NO: 221133 - DNA, 1354 bp, Cannabis indica
atttatatatatgttatgaattgttttgtttacataaatattttgatgcatttatgttttttttttaattcagactttattttttatcctttcaaagttatttaattaaatttatttccatcaaacaatgttttatagcacattaattatattgacacatgtcctaatacatatgttagactgagaattcgacacactctagacagaagatcctcttccatttaagtattttaacatcttattaattacttgtgttatattattgtttcttgctttaaatagatggatgatcagaaaattcaacatgtctgcaatcaacaacataatttgcacctaattaaggatagtgaaatcaacattactgatcaaattagttgtcaactatgtaagtcttctgtgaaacaatctccttattatgtttgtgattcatgcaaatattatatccacaagtcatgtgaagaactaccaaagcaaatcgatcactcttttcatcctcgccatcctctcattcttacatcaagatctgtctggtgcgaatcttgtttcaaaaccccccaaaagagactcatgttctgttgtaaagaatgtggatttgacatggatattgaatgtgccttaatgtcaaactctataacaacatgtcttaatgaaagccaacattgcatccaacattctagtcatcctcatttgctactacttgttgacacaacagatactatttataaagatgtcaatcttagatgttttgcatgccaatcggccaaagaatcaacatcagatgttagtggagtgtattatggttgcaatagatgcaagtattttcttcataaacattgcattgatcaattaccacaaaaaatccaaacctcccaccaacctaatcacaaccacctctcccttcatatgaaaaggtataattgtaaatgtaatacttgtggatattcaaccaaacctgctttatattttgaatgtcctcaatgtgattaccaattgtgtttagaatgtggaatgacacgaagagccattacatatgaagatcatccacacattctttcctttctagaaaagaacattcaatgtgatcggtgcaatgtgtacgacacttgtttgaagcaatcagtcaacatgtccaattccaatgaattccataaaactcattcctccatatttagatgtttggattgtgattttaaactccatttattatgtggtccattgccttctgccataaagtgtaaagtctttttttggcaagttaggtgtcaaaataatttttcctttttatggtaagattgctatgcattcattttcgaaatcttacctcttttattcggttataagttgccattttcct

SEQ ID NO: 221134 - DNA, 2515 bp, Cannabis indica
cacacacaggacacgaggaacctttaggctggaaagttaaactattcacacaattttcttaatgaaaaaaattgattatatgagattgatgttagaatattttcaaccttttgtttgttcttgctgcattatttgaattttatctgtcttattctttgaggatcccctctgtatgcttaggtacatcttactattagtcacatcatatagccacgagcttatcagttcttgttatcttatgtagagggacactacaggtctgagtacagagaacacagagcttaagcttcggttacaagctatggagcaacaagctcagttacgtgatggtaagtatgtaatgtactgtatctttttcttagtcctcaggtacgtaaaataatgtttctcttttagtgccataccttattgatatcatcttaaatgttgtagctttgaatgaagcacttaagaaggaagttgagaggctaaagattgctacaggagagatgattaaccattctgagtcatttaacatgggaatgcaccagatgtcatataattcctcaaattatttttctgttccacaacaagccggacattctagccaccaaaacatgcagttgccgtttagtcatgcccaggctaccatgtcagctcaccatcttcaacaatcaaattctcataataatacctccgaatttttgcagaatgatcctgttggtcggttacagggacttgacatcagtaacaaaggttcatctattgtgaagtctgaaggtccctcactctctgcaagtgaaagtagcgccacattatgaggcaaactctctgctgacctgctgacttgtccatgacacaccatccgatcatttgttcatagattgacatccatccatttagagggggtactcttgttcctttcctttatctaatttatttgtgtcacggtttagttcttgatatattttttcatcaaggggcaaaaaaacaaaaaaatgaagaagaagaagaaaaatcacttttagttgttgcaatgttatcttcagtctttgttagatatttgtgttcttaagggggtaaaatcatgtgggtatggaaggtcattccccattaggaatgtagcattatgctatcccttcctttctttgtaccttaaattattgtttatgacttgtaaacttatgtatccattatgaagtgttgttctagtttccatttcatggattggctgaagtgagctggttctgttaacaaaaaaacaaaacaaaatgatgttatttttttttcttggtattgctttttgcattggataattctgaacagagtgatgtggtttcttgatattatttgattatttgaaaggcctagacttcttctcattactatttttgtgtattgattctccatgttaggacaagaacataaactcaagatttattttatagccatacctgttgtatctattctagatgaactctgattttattattttatttaaatttttacaagaaaagctaataatttccaatagcaagtgctgattgcagatctagaatgtctactgtggtcctcctaaaaagtccacctttacagtcatctatctagtactactgaactagtagcttttatttgtctaaattaccttggcccacgtcatgtgctttctattattatctatattattatcatgggcatggaaaggacttgatcttgaccctttttgtctaatagtaaacttaattgaaattccacatattctattttacatcccaacatatatcagtttctcataaatgttcatacttagtgatagatacacccaatcaattcttaataactcaccagttcaatccctttctatggtttctctagctcttgggagaagataaatgatgcacatataattagtttgatgtaaactaaattcacatatcaatgcaggaatctgaggtggcctttgaaatttgttaaatagggtgatctagaaaaaacagtatatatatacaatttgaacaaatgaattagaagaatataattaagagaaacttcttattcacttaccatataatgtatatacagagttggttaatatttcatatataatataattttggctagtttagaaaatatgatgaactgactctgaagcacattgtattattgcatattagtaacattggaacttggaagcactttagtcttttgagttgtataaatgaaggttagtttttcggttggcagcttaacatcaatcttaagttttataagctaattagtatgaaatgaaaatagttgtacctaaattactaaatagctgcttaattaattttttatagatacaaattgatataagtgcaatgataaatgtgaaaattttcttatgattcgtcatttaagtaatgtataaatctattagattatatttaagagaaaattacactcaaacacgtaaaatatattttatttataaggatacccatattaatttaaatagataaaagtaacgaaagctatttacatatacacatatatt

SEQ ID NO: 221135 - DNA, 3411 bp, Cannabis indica
ttccatcgttccatctacatttcttggacgttgtaccgttaatttagtcgttattgatggtactaatcccttaaaaagtgtgcctaacagaatttctagggttatgctgtcaaatggagctaaaagccatatagaatttttattattttcaaccacaaaaccctcttgcttgactgctagaaatttgtcataaagggaccccatttgtgtgtttttgaaatgctttagtactaattttttcatctcttttcagcttaatatatctcatgttttaattttatattcataccatagtaaaacgttccctgaaaaatgaaattacagtaacctcaatcttctcgtcgttgtcatatccatgacaagagaaaaatgtttttgcttgtaatatccatctatttgggttctctccatcaaaacttgatattttcaacttcttgagttgattttcatgtcagaattgtgagtcttgctggttctagtcaaaatattcccgctttaagctctgattcaaataaaaacctaccattagagtgatgcccgtggtcgctgattgttgttccagcattgcagctgtgttggggtgtcatggggtttgttgggcccttgctttcctccttttccttgtttctaacaactccattaacatcgtctttgggttctttgagagttctaagttttcttgaacttccaaaaaatcttgaattgttgctataacatttcttggagagattcttgcaacttttgatgaagtggttgtgttatctcttgtattgaatcatgaagagattccttaattccagaagtgtcaacttccaaagctttacgatcttcttccgaaaccatggagtaatcacttttctctgactgttttttaggtccaatgtccatcctcgccgcaccaatttgatagaataatcctagagtaaaagaaatattatcagttattttccaaaataaacaccaaaaatgaattcctctaatgatctttattcttaaaaaacagttacaaagttacaatatcgagctttcaagaggctcgtctctctaaattcacaatttttcgagaggattgatctctccacaaagagtctactcttatctaatgctaagctaatctaatctaaatgaggttgctccctctctatttataagcattggttttaaaaagatttaggccacctaagttataattagaccaatagaattaaaacactaagataactcgacctatgtacataagagactaagtatttcatttaatcattttgtgatacacaagataaatcttaggcttatcagactaaaaagtatgacatccttcgggtaaaatagataaatattatttatttaaagggtgtgtgcttctgggagcataatcttaaactagactcaagctggtattagagaaagctatgttatctttgggcagtttttgacaaagatagaatgctagctgctagagaaacgggaaaattcaagacagctaaactctataatagtttattgcagcagaatcagttttactttcaaagtcttatttggtgtcgacttagtcttcctaagcatcggtttgtgctttggcaagtggtgcattctcaatttcttaccagggataatcttgtgagtttttgtatttccttggactctttgcaatgccatatgtgtggtttggtgaatgagaatcatgcccatatattcttttattgtattttgcctaaaaaaaatttctagattgatttttaactggctggaatttagtgcttggcctctagacatcagtagctggcttagctggggtagtctcaaaagaaaggggatgtttggttcgattgttactagaacaataggaactagtgctattttgatggtttttcacaatctgagttgcacatagctaaagatctcaaagagtatcatacagtataggttatacaatattagacttacgaattttaatgtacaggaacaacaaatcattcataaataaaaaatgaggaaattgtttttatttatttattttatttttataaggatttaataagaatcttatttagaaatagaaacaaatacacaagacataaaaagcaaattactcaagaaaaagactactgatttttgtaaaaggctcgtaattaattggggtccctttctctccatcccagtctattaccactaaacattttttttttggtagtcttcttttttggggatgaagatccgaatctcaatcattcattatttcatttcgtacactcaatgaccgccaaaataaagattaaaaaatgcatagccaattggcattaaaagctaccttatattggtacctttatgcagatggccagatactcataaaaaataataataacattgaaactaatttttaaaaatattcattaatgacttaatattttttcatttgtattattgtatgcatggcaaacaattggcatcggtaataagaattaagagccaaataaaaacggattttttttcttttacaatttttttctcatgtttatttttggtaattaatggctaaaatcaaaatcttactcgtccctaaaataaatgtgtccttatcctgtgagccaattaagaatgactgcctataaatagccaaagataaaaaatgtctatgtcattgctttgattgagagttttctcctccctcttctaatctaaacttattccaaattgcactggttttatgttttaaccatacaactacacacatcttaacatcgagtccttctctcattttcttttctcttctcttttcccaagttatgaatttaaaatattgttttcaagctctcccaagtgggactttttagttttttttaaggagtcaactgtaaattaactaaccccaaaacaatactctgttcctaaatcctaacaagcccctaaaaaatcaaataaatacccatttcagaaattcaagatttgaaaatggcaggtggatcttttgctccaggtggtttggccatggaaagggcagaacagtaccaaggaaaggtcacctcatatgttatcatcgcttgtcttgttgctgccattggagggtcaatatttggatatgatattgggatttcaggttagtaatttaaaccaaaaccccttctttttttcttcttcaaaaaacaagattttgtttctgatgagaggatataccatgtttttttgggtgtaatttagtttcattatcattaaagtgtggaccttttttgttcttttgtttttggaatcaagaaagagaaaaatttggcgtggaaagttgaaaaatgttgaaagagcgtgtgagtgtaagaaaagaaaaatgagtacttggatttagaatgaaaaacggggcagtagtagcctactaaaaatagtttttttatttgtaatttcaaagagaataaagagaag

SEQ ID NO: 221136 - DNA, 2853 bp, Cannabis indica
gatgagagtcggggtcctgatggcatgacctcggccttttataaaaaatgttaggatatagttaaagaggacacaactcgctttgtttaacagtttttttgatattggagagtttgaggttggttgcgaggatgcacatgtggttttgattctaaaaaagaaatttccagactatatgacatatctaagaccaattgccctatgtaatgttccgtacaaagttgttaccaaagtcatgtctaacaatatgaaatcatttatggatgcaatcatctcggattctcaaagtgctttcattcctgggaggttgattccagacaatgttatggtctccttcaaagtactacactatcttctgagaaaaataactcgaaagatgggctttatggcttcgaaactcgacatgagtaaggcctatgatcgaattgaatggctttttttagaggctatattgtagaagatgggtttttcccataatttggtatgtctaataatgacatgtacttcttcaacaaactataaaattattcatggaagtcgtgagatgggccttatcttacaaactagacgtgtccgcgaaggggatctgcttttttcgcatctgtttattctttgagcagaggggctttcagcacttctccgtaagtatgaaaatcatgatgggattcatggatttaaggtttttttatggggcttcaagactctcacacaggctctttgttgatgatagttacctttattgtaaagccacagaaacaaaagttatctgaatgcaagagttacttcaaaagtttgaaatggctttaggtcaacaagttaatttttccaactcatcttgttagtgtaaataccgaagctagtctaagaaaccatctttgctctcttctccgcatgagtgaggcaaccgaagggaatttttatttgggccccctaagtacaaatgttcaaaataagacagtggtcttgggctgtctcaaagatgagttcgtaagaggattaaaggttgggaggccaagttcctatcgagagtgaggaaagaaattctggtgaaaatagttattcaagccttaccaagctatgcaatgagcatatttttgctgccattggagattaatagaaacattgagcggatgatgactataatttggtggcaaatgtctaaggacttttcgagatttgcaagattttagtctggctctcttgagaaaacaagaatgaagacttctcaccaaacctgaatctttggcaacaaaaaatttccaaagcaaggtattttttttatgggaattttctttctactcaacttggctcagacccaaattttgtttggcgaagcatcttggaaactaaagagcttgttcgagcaggaattaggtggtgtgaggggaatggtcaatctattccatttcgggagagccttggttactcaatatcaataacccgaggatcacatcgacacacccgactcttctcagtgcttctgttgcaagtttaatgtctttacgtggttctagttgggatgaagagcttattggtgacatatttaaagaaagagaccaacgtttcattaagagcattcctttgcaagtcacgacaatcactaattatttgttttggccaaatgaagtgtctagtctttacacagtcaagaacgcttattctttgttgtaacaacagaaatgtaaatggtatgatgataatgatttgtccttttggagtaaactttggagcttgaaattacccccaaaaaatatctaatttgtcatggcgtgcatgctctagctatctccaaataatggttcaacttcgtaccaagagggtggatgtgagtattctttgtctgatttgccttaaatttgaaaaaactactctccattgcttagtcacttgtcgggtggtccaaacttgttggagctgagtgagaatcagcatagcttcagcacctggtgtgtctttcttagactggtgtactactatttttcaaatggtaagttcttatccgaaatgtatattggcagcagtgtgttgggctatttggggtgcctgaaacgattttatttggaggattaaaggatttaatccagataacgttgtttttgctaaaaagtaccttgatcaattgaagaatgctagaaaatctgacatagatacatcatggtctattttttcagacgggtgatgggagcgagaattggacaccaccataatgtgaatgtggcattgtttgatggaggctgaagtcatggcctcggtcttgtggcccgagattccaacgacatgcttattgaaggtcgaacttttcttgctaataacttggtagaatcggtcattgctaaagctttaggaatcaaagaagcctttagctagataaaataaatgaaagcgagttagtgtagaatctgattgcctttgcgtggttcaagctttgaggagctctttaaataggatttctttgtttggtttagtcatttaagattgtaaaactttgcttgcttctttgaaaaatatttctatctcttatgttaaacgatctgttaatttagtggctcataattttgttaaggctgctttttattttctgatcatcaatttaatttggagagtattttaactaatttgctactttatttggtaggtgaagtttttagttaataaaatgaattttcattgaaataaaattattataatcttccatttatatatatatatatgagttaggaatttatagttgttagattgctattacaagtgatgatatgataatctttaagggaaggatagtagtgatgatgttttaataaatattaaagtagtaagaaaagaaaaaggataagttgataaatattgtttttt

SEQ ID NO: 221137 - DNA, 1056 bp, Cannabis indica
tgtgacaaaaataaaaaaatttgtagtgtatatatacatattcatttaaattatttgttttagatattattattttgatagtaattacttttatttttgttgcaataataataataataaagaaaaaagagtcggcatgaatcattatacttgtattattatcaaccgtacatcaaataaatgaagatgaagatttattataaagcttaaaaatttccacatttgttgatgaagttgatttagacacaattggaaaatgaattaataattcaaccattatagtcattatcacaaagaatatatatatatatttatgtatatataattgaattgaatatatataatggacgtaccatcctatttataggtttataataataataagctctcatcaatttggtttggtttggtgtgtgtctttcctataattgcatgggaatcaattttgtggtcacaaatatatataagtgaaagaaagaactttgggtaagaacaaatgtttgttgttattatttctttatatataccatatgtatatccaaagggttgaacaaattgattaagacatttaggattaggaatatgatatgtcttaattaatttcttcctttaataattagtcatttttttagtgtcacaattttatgaaatgtatttatatatttatataaatatacatataaattgatgaataatttaggactgaccgatcctagatttaggtgggttaggcttgcacaaggatctacctagcttatgagcccacaaataaattattctcttttaaaaatatatttttttattgattttgaaaaatatcatatttttttttaaatgagggcccaattttttttttccatgacttgctaaattttaaggcagaccctgataacttatgatataaggatgaaaattttctctatgggatgggctccgtggggacctgtccctaatggggaacgaggtgggaatatgtggataatactgtccgccccgacggggagctggcttagtatatttagttatctttttattaatattttattattttattat

SEQ ID NO: 221138 - DNA, 5413 bp, Cannabis indica
tatctttgacattcttcctgcaaatttactcagacttgcttttccactcacagtgctcgaaaaacttatcccgctgaccgtcacgtctccattcgtagaagtttccagcatccagcttttcgacttcatacagtaagtatatcattctcccttttcttttatttgggttaagatttgtcttacattccagtacttcattcggtttaacaattagggttcttatttcctgggcgatttttagggtttagacatagtttaggtttgtcatattccttaagcctctggtttgataaatttcatctcgaagttgggattgtctttcttttgtagagatgtcccaaccttgttcagaaaattattctccaaatctgtaccaccggtatatcccaaacatatagcctgcccatataagccatgaaatttcgaacctatgtccaaattggaaataaatgatgccaggattagagaccattcgattaagtcaaactaagaagagactgccagtcgttataggcgattctcgcaagaaattttcgagggcaaacatcgctttttgggagacgcgacctggcctgaacccacgattttatcttctattccactcacaagaccaatgtttttacccaacgtcacagttgcttttgaaccaagtgaccttgagtttgaaatcatgtctcctaagccccgcaaatcaaagaccccttaggaccccaatgttacctttgaggtagaacttatcgagtccaaggttaggtctattgtggcctacattggtggcatcctacagtctcgcagcattaagcagcagaaagggtgcattataaggtctgtggcacctggggaattaagttgttttcccctagaaaaaataatacacgaagagtgtagtggtcccagcacgagtaactcttcgggtgttggagcttggagccttgagcatatcaaggctagagcgatccttcccctcaaggattactttaaggaatactacaactacctcagggttgccccattccaactaaacccaacctcacataggatcctcatgagccctcaaggttccatatcacatcttaggctgggaatgcctactcctttggagatagcctacttttattccgtcaaagtcgttcctgcgagaaagaacgctgcgggaggcttctattatcttggggcctatactggtgaccgcaagctcatagttagttttcccaataagacagattttaaagaggacttcttctggacaacggctttatctccaataaacacaactgccttccgaatatatcatatgtaagttcttttccttgcgaagtcattcatattaacttgtagtttctaaagtggcttactgaatttttatctgtttgtagcggttcctaggagaccaattcctaccccaaagatagtcaagcgtcaaaagaccttactgagcctaccatatgggttgcgagctgcagatttcctgctaaacaagtagaatctgaagaacgttggcctccttgcttcatacgagtatacttgcgattctaaactacccaagtatacatcgtggaaaaatgtccccgtcctagaagaagaggaaagcaatgactttgtggctcgtgcacactatctcgagagagtccctcctcgggtagatggaggatcccaaggtaatcaatgtgggtgatcaccaattgtgcttagagccgaacgtaataccttagtgtcttttcgagatagtcggtataatttttttcatttggaaacctctcctcacagatcacatctcccataggttcgatagttggtacccacagtttcgtgttcaattagctataacagctctttctataggattgccgaacaatatagaaccatgttggatagagcaagtcacctagattcaagctgggacttagatccactaaacccttatgacatatttcacatcacaggatctagggagtttagtgaatattataatctttcctcgccatccgttgaagaatatggtaaccctcctaagtgggagctcttccacattgttattcattttaacttagtgttaatgaattcttcttgcttcagagatatgggcctgcacttggagaatctattcaaaagtcccaccccagctgaaaagtgatccaagaaaagggtagccaaaactgatgaggcctcgtattcaaacaaggaacccaaaaggaccaagaccaaagccaacaagaaaaaattctcaatccagcttaccgtcgaggctgctaagtctcccaaggcaaggaataaggtctctgctgcagggattgaggtccctgctacagggattgtcgaggaacaacccattgggtcagtataccaagtgaagttttctggttctcgttcggaggttgttctccacgagccttcttgtcctctacccctcgaagttggaaatgaggggtcacaactaagctcgcaacatactatcaacgattggcgcaacctcttgatgcttggatctagcgactcggatctctctattcgaggcagtactgaagactttgccaaaataagttgttagcttctgcatcaggttaatcttctgacttcctcacctctactattctttatttttccctctttgcttactttagtttgccctttcctcataggcctcttttcttgtccacgctacacatcaccggttgccttagtgggtcgaaatgctcgagattgagcttcacaaagtcatggaacatagggatgttgtggccaagaagtggagcgattctgaggttgaggtctctcgcgcaagagaggaagctaagaagcaacatcaagctgaccaacagaagattaaggaactcgaggattctcttaaatctctccaagttgatcatgacaaaagctcaaagagttggaggctaaaacaaaagaaaggttcaacaatattggtaggaggaccatttatcagatttgatcattcaaccccgagttggacttcagctttttgggtgacaaggctgaggatatgcttgtgttttgccagaagactcagaaggaagaataaggcgaggaagaggaggttgaagcagagcaagaaggtctagccaagtcctctataataatgtagacttggtcttaactatatttttttttttgttaggaaaatggccctaaggctgagacaatggtttgccccttgtggcactttttgtaaagacaaatttgtaaggttggatggctaactttacttttatcatataataccgacttatatctaggcgcccatacacctatttagaaggcttaacagatgagtaagaacgttccatactaggatacaaccactataccacatacactacgtacctcactgtacgagtgttggtagggtttgttttgtaccctgagtaccactgagtgatataccacacacaccttgtactttcccgtacttgtgctggtatcatcataatgttctccttaacaatatacactataccaatacacattgtaccataaccgtacaagtgttggtagtgtaactaacatataagcatgcatatacacttaacatatacatacactcgcatagtcatattacacattatacacagttcttaccttctttccagattcaagtgagttggccaacctgaacggaaagtctcgtgctggatggatgccctaatcacatattaaaaccagataaatcacatgttcaaaaccctagtccaggaaacccgaatctacaactcaaggctctgttataatcactagggattacattaacctatgaaacagggaaacaataaactaaggcattgaaatggaactgaattgagaaattggttatttggggaacctgccaaaaccagttaaccggttttataggtactggcaaactggttaaccggtttgtactagttttccccaaacaatcccaaacttgctcgacacagagccaattgctaccaaaccttctagagtacctaaagagggcatatacatcatattccaaccaataaaactcagaaaaacacactggattaaaatgttccattagagacctaagtttgagtttcaaaactcaaacttgctcaattctatcataacacatcaaaaccagctgcaagaagctaattcttactcaaattaaccttaaaattcgaactaaacgggaaccatactctaacagcccctaaagctaaaaatcacatacacaaaccaaagtttaaatcttcaaaaaatacaaactattgttctagggtcaccttagcttcaagaacacttgatccttggttgaaactctagaacatagcaggaaatcaactaattttcctctggtttatgactggctcgaagagagtgaagggaaagaaagagttttcttcaattctagtcttttcatgattttttcctcaaaatgaaaaaggattttctaattaatcctttgctgaaaataaagaggctaggtatcaacacctaaggcagccaccaaatcacacaacttaagcattttcaagagtagggataaaatggtcaaatccataaccccgctcaaacccggtactcaatttcctccaacatatatcctactaagaaataaggttcgaaactacccatgtgatcaaacaagccatccatcgcattttccgttgtcaccgagcaaaaattataaaaactgcataattcacatataacacaaataatacacctagagtttaataaaatttctagaattgagaaattataactctaatgtccatttctaataatgggagccacaattaaataaattcacaaatgactattaaaatattaataattagtgctaattgcctttactaatctaaattgctaatgcggtcattacaatatcactggaaagtcacaggaaagggatagagctacaaaattgtcactgaaaaaagtagttggttgggtaaaatggcttagtgtaggttgtttttcgtgacaagctaagtctagtggtgaagacggattgtgaaacagaggtcggagctggctgaaaaatgcattcaaagtttgaatctcaaaactttgacccgcgatctcggtttaacgaagatgtttgaggcgacacagcttaaggtgttggatccccagaagtcggagagtgcactactccggcgtgtgtggttggacggtgaccaaaaataggtcgtcagagcttgtgtaaagaccgcttagtttaatttggaaatcagcagttaatcatgcttaattatgaaaattatttatagatatttaaataattgtttatactattattattgaattctgaaatgcattttatgtcatatagtgattttcataagtttgcattttcggtgcccggtaacatggaactcggtgtttgggtcagtaaaatcacaacttagtatgttagtattgtgggacggtttattagacattggga

SEQ ID NO: 221139 - DNA, 1972 bp, Cannabis indica
aaattggacatggaggatatgcatcaattttatagataacaacaaagctagcgcaaaagactatttctcgctaccgcaaatagatcaaatggtagacgccacactcagatacaaacttatgggtttcatgtagcgaatactctaactataatcaaataaagatgcatgtatcggatcaagaacatacaagtttcagacaagggtgtgtacaactacctagtgatgtctttcgggctcaagaattccaaagcgacctaccagcgtcttgtgaatcagatgtttaaagatgttttaggaaataacatggaggtgtatgcagacgacatgctggttaattccaagatctctaaggagcatggagatgacttagaagaaaccttttcaataattaagaaatatgggatgaagctaaatccaaagaagtgcacctttggagttttctcaagaaagtttctaggtttcaccctcagctcctagggcatcgaagaaaattcaaagaagattatagctctcttagacatgccttccccaagaaagcataaggatgtccaaagtttaattagaaggatcgttgcactcagtaggcttgtgtccaaagccactaataaatgcattccattctttaacattctcgtgggagtaaaaagtttgagtggactactgagtgcgaagaggtcttttggaacctaaaggagcatctggctaaggctcccatcttgtaaactgggtgagggggaactgttgtacttgtacttagtcatgtccgatcatcctatcaatgttgcacttgtacgtgaagaaggaagagtccaactacgagtgtattatgtaagcaagagactgtttggcatgaagtccagatatttaatgattgaaaagctttcctactgcgtactaattgcctcccggaagttaatactgtttcaagtccatgccattaaagtattgacaaatcaccctctccgacaagttcttcagaagtcggagtcctcaaaagactattaaaatgagctatagaaattagctaatttgacatccaataccagcctaaaatctcaatcaagggtcaagtcgtaactaactttattgtcgagtgcaccgagatcaatgacaatctagaagaaccagctctagggttggtaatctggaaagttgatgttgacggagcctcaaatgaaaaaggttctgaagccgaaattattctgatctcccctcaaggccacctgctccaaagtgcccttccttttgagtttttagcttctaagagtgaagtggagcatgaagtgatgatagatggattacatctagttaaagaagtcggagctaaaaatattgacatctacaacgactttgagctggttgtgaatcaagtgtcaagataatatcaaacaaagaggaaaaatatggatgcatatgtctccatacttacaaactacttcaaggcttcaaaatgtatacaattaggcagatccccaaagaccaaaatgcattcacggacatgttagtcaagctagccacaaatctgaaaattgaggcccatggagtagtactaggttcttgcttactcatgcctagcaccaaggcactgggggtaagcataatcaatcatttaaccttttggatgtgacccatcctaaaatttttaatttccaaagagatacccacagataaagccaccataaattaagttcaataccaaactcgtcgatacgtaattctagacagaaggacaaagataggagcataaatagggagtggagatggggttggggtgcattcctcgctcattacccactcaatttctatctctaaatttgtgcttcaacacaattacaaaacttgatacaaaatttaatttttttattgaacgtataaaaaaaataataattttatcattattattattttattatgtaaaataaaaaaatataaataatttttcattaatattatagttaaatatattaataaa

SEQ ID NO: 221140 - DNA, 1672 bp, Cannabis indica
attttttatttatcgcccgacataaaaagagttttttttagtgtacagtgtggggttcaattggaggcattgtacatttgtatataatattcacacaatggaaaccaatgaaatataaggtgggattcttgcatatgttaattttttttattcattgtataaaaacaataaaagaaaattaattgtatagaaataaaatagatattacatatttgtatattatattgttttattctttaaattttgagttctcaactgtattcatatcatcatatgtatatgtttgtttctcataaaatgggggtataattaatttaattgatactcttgtctttttatatatatattcttagtggggttgtatcgaattatttataaacttgaagaatattgttattatatttatgttatatatatttgtttacatttagtgtagcatgtaataaataagtgaaatattattgattttaattttagacgatcagagtcaaaagagtgtaatgtaaattgagtagagggataaagtcaagattatgagctttttcatcatctgaattctatgtatgcatcactttcacttttaatttaattttgtaagtcaacagtcaaataatacatttagatttacacatattgatcaaaaaagaatttgttattggacgtccgtgatgtttagcatcttttataggtaacgcctcacggttagttgataatattttttaaaaattattattttaagttatatagaactcgatatttaattacaccaataacagtataatactaaagagtgtgctagacatcaataatactttgtagcacttttacaaatgcatacattaattgagacacaaactcctacacttgttcctttaaaccaaaaaaaaaaaagctcctacacttatggaaagttaaaatattgatgttgtagaataattagcatccttcaataaaaaaaaggcattacatttaatgaattttttatatgatcttaaagtttacataattaactaaaattagaacacacacaatatatttaatgatcagaaattatataaaaactaaattgttacaaatatataaataattttattttaaaaaatgtatacatataaataatttgcaccatataatttagtagtactaaatttctttttaaaaagtagaagttgcaagttgaaaccccttacccaaatttataaataacagaagaaaaatcaaacctaactaagactgcacatttattttgttaggtaaaataaccaaacattgtaggccaaatagctacacataagtggtcgaagagcatatttggtattattttttgttttttgtttttaatttttttttttagaaataagaataaaaaatagtttttgaagtttttaaaacacaagtcacgtttagttagtattttctaaaaataatattaattaacaataatattttttttaaaatagaaaacaatattttttgttttcaaaattcttattttttgtaacaatattttttaaaaaagaaggctaaataagcctcattgttttcaaaaaaataattttctatttttaaatataaaaaataattttttatttatgatgtcaaacatttacttactgtcttaccctgtaatatcattggacaatcgaaatagtcaatttttttcaataataac

SEQ ID NO: 221141 - DNA, 3128 bp, Cannabis indica
cacaaataggataaatgccccagcgagaggatctccaaagatggatagccacatcacaagataagaacagatgcttaattgattcattctctgatccacacagagggaacagaacctcctcaataggaaattttttacagatcacagcccgagcaggaagagccttagctaagatacaccaccagagggtcttcggcctttcagaaattctactattccacaatttgttccacaaagatagggcgacctcacagtgaggcgctctgtcaagagcttggacgagataggacaatttataagagaaccgcctattattttccagggtccaaatccatttatcattttcctgaccaaatggattaccccttccaagatagctgaaatagtggctttgtcaaaaaggttgttaagcttggggatattccagcttccattatctaacaagagctcaacaactttgttcacttcagccatggaggtgccaataggtcgagggatgaactccttcttatgagtgatccaagggtcatcccaaacattagtatctttgccatccaccaccaacttgcaagctcccttcttcaaaatggagttggatttcaccacgtttttccaaaaccaggaatcagaatttttagaactacaattaagaaaaggctttccttttaggtatttcgcttccaagatccgatagcaaagggattgattgccagtcaacacgttccacccccatttagccaagaaggcaagattcatttctctggtcttgcagaatccctgaaccccccgggacttagggaggcaaagcttgtcccaagctttaagatacaatccatggtttcctttttcggacccccaccagaagtcgcgaaccataccatcaatcttccccacaagccatttagagagcttggtcgtttgcatggcatacataggcagggatagtcccacagactttatgagagtggcgtgcccagctttagacagcgtcttagccttccatcccaagagtttcgacgtgagattttcaattatgaaattgaagtcggcgtccttttgtctagagcgaaagaaaggtaaccctaagtacttgatgctgccttcaagggaccctattcccagcaccgactttatacctcttctcataccgttgggagtatttttactaaagaagatcgaggtttttagtttatttacttgttggcctgagcaggcacagaacttctcaatgcattgccaagatcctttaacttcttccaagtttgcccttccaaccatgcttaaatcatccgcaaagaatatatgagtaattatgggaccaaccctgctgatctttatgcgcttgataaggcccttacactgggcgtcattcaaaactctagacagaatttccgtcgcccaaatgaacaagtagggagacagaggatcaccctaacgaaggccacaagagggtgaaatcttaccaacttgaccctcattaaggcataaattaagagatgtagtagtgatacactgggaaatccaacctcaaaatttttgcggcgccccaaaccccgcaagcacttggtctatgaaattccagcttagtttgtcataagctttcataagatcaaattttaaggcgaagcaaccttatttgtctttcttccggttgaaggagtaaaagatttcttggatgattacattattatcctgaatattcctttttggaacaaaagcagcctgggtagggcaaataagggatggcagcagcgatttaattctattggcaatgattttagagatgacctagtacattacattacacagggagatcggtctataatcattagttctttttgggttttggatcttgggaataagaccaatgttagttgcgttgacgcctttgtgcataattctagtcccgaagaaatctgagactgcttcacagaaatctacacccacagtttccctgtagagcttgaagaaaagaatgtacatcccatctagacccgaggccttgtggttagtcatagcaaacagagtcctacggatttcttcatgagtagggcatttcataatctctgtctgatcatcaacagatattctgtccctaatgagatcatcgaaaattagctcttgaccattatccgatccggaaaaaattccttggaaaactccatgaatttcttgccaatcaagacccgactggtaatccaaacattatctttatttaagatacattcaatagcattccgtctccctctgcttgcagccgattggaagaaaaatttcaaacatctatccccatcctttagccaagaaaccctggcctgttgcttccagtaaagctcttttcgaacataagcctcattaagagcccgtcgaatattgcactcagtaccccattctctagatcccactggcatgccctggatgaggttgagtttacttttcagctcttttattaagttgtcaactttaccaaactgggttctactccaattcaagagagcgacccgagttgcaccgattttctggaaaactctggcgggagcccaagaataacaaattgagtttcaggcgctatcaaacactagcttgctcctatcatcccgggtccaactttcttcaaacttaaagcttcatttgaattattcccctagaccatcaaaaagaagacacagaggcctatggtcaaagttgcagatctgagaggaacacagaacagcctttgggaacaggttaagccacactccattgattaaacctttatcaagagctgaattgacatgattctccctagatctatgattatcccatgtaagcttatctccatgaataggcatgttaatgagcccccttgagtttaccaaatttgtgatgaacgggataaataggtccttacccttacagccaactctttccgattcattcaaaataaaatttgtatcttccagaatgagccacggaccaccaaacctatccccaagcttcatgaacttagtccaaaatgatttcttagcatagcaatacagaggaccatacacacaagatagcaaccaagagtcggggatccgaatagacaagaccagtaatatggttttgggagcaggcaatacattcaaactcaaaccctaacttcc

SEQ ID NO: 221142 - DNA, 1256 bp, Cannabis indica
gtgcctagtaccctcctatatgttaatagcgctatttatccaactaagtatcgggttccatataatttaatataataatttttagggagtatcgctagccaatcgcaacgcgacatgtcgagaaagtattaaccactactggtgcctaatagcaatgctcaaaaaaaaaaaaacttgaacttttatttaggtattgtaaactattaaacaatttgaactaaaaagatctcttaaatactggaatagataaaaaatataccaaaacatcattttaaaggaaatgtattactgatctattttctattttttagagtaataagtttatagtctcttgtttgcatatcctaaattatattttaataattatatttttagaacttctataggtacataatcgttaagtgtcatataattatttatatgttattttttattggtatatttaaattaattattaaataaaaaataaaaatttaattacttataccaatcaaaaattgtcatgtgcctgttaactagacacataacgattaattatctatgaaagttctaaaaatattattattattatcaaaaattaattttaagtataattaaattttcttttaataggtacattatcctttttgagacttttacactattttttttttttttgcattattattatgattgttaaccattatttggtgtgcatgtataataaaacattgcatatagagaattattttgtgtaagattacctgtatttggtgacaagttgatgaagaaatattgctagctcaagtctagataagtccaaaccagggcacagcctttgtccaccaccaaatggtgtaaacatattactattaacggtattacctgtcttctgcattatcatcaaaaacattattaattatcagaaatataaatttgaaactattattatatagttaacccaattaagtgtaattaattaatgaagatcatcaaacaaactaaaaatgtttacctcccatctccatggattaaactcatatggcttttcataattctcttcattcatatgaaccgaaataaaagatgccaatacacaccagttttttgggtataaaatagcctaaaataaaaaacacaaaacaatatcaaatgcataaataataatatttataattagagtaccattaaaataattaataaagttaattataacctttgatatctacatctttagttagcttttctcctaaacaccacttaaatgatattttgcc

SEQ ID NO: 221143 - DNA, 1959 bp, Cannabis indica
tttttcctttctcaaaagacggtactatttcgtacaatactgaatatcaaaggatcacaaatgagtgagatatatagaagcagtctatttttttgttggcataaataatatcttttactcattttttaaccatctctatgtgagactatcttatttttctatgagcacgatttgatttttcgtgagctttattttacaggatgtctttattgtacattattatatgaaaaaattattattatcaaaattatttagatatcaaaaaataaaaaaagaatgtatatgtatatattgttgcaccataaaatttccaacattgaatatatatgattttatttgcttgtaatatcgatcattacaatagacaaagttttgacacttatattttgtgataaaataaggcagatctatagtccatttataatcgtagctacacatattggtgaggtgacattgaataatattagacagggaaatttcaaatggtgaaaaaagaaatggatatgggtttctataacccttatcatagcaaagaagacattaatggctttgtggacctcactcttcgattaggattacctgtttatcacaagaaccaaaataatcccaatataatctcccaaacccagatgcttcatcctcataatcaactacaaccgcaaccacaacaacaagccccatattttaattatatcgaatatgcctatcgtttaaaccattttcatcaggtatgtactcttttcccaatgttttaaataatttatgttttcagttttgtatatgtaaaaacatcagtgtgtggcaaacaatgcaatttttttattgaaataatttttttttttcatttacatatattaacaaataaagtcagtcaaatggcggtttttatttttttttcttttaatgtattttatttttttattccaatttccattttaggtatttattggttcaatttctctataaatgagaaatattcttgtcaatttttgttgggaattaattatgggcagatatatttatatatatacaaacaaaataaagtcagtcaaaatataacataaagttagtatacgcacgtacgttttagaaatatatttagtaaatgaaaacaaaatagcgtatattttagtttctgtatatataaaaatgaaataataatattataaatattgtcatgtaaacaaaggaaaaccttactaagatgctacttgaatgaacagggcattttaattaataatgattatatgtttatatgtatatataggaacaagtcatgtcatataagagtggtggcaatataaacttgatcatgaatgaagatgtcaataacagcagtggttcgaatttgaaagttgaacaaaacaataatgtatacttaacaagtaacggaagctacaacaacagtactacttattatgatgcactactggaagaagatcaagtaacattagctcctcttccttacagctataataacagtaatgactcaatcttcttttcttgttggagtcagaatatcatgtaataccctttgataatgatacaatcttaataatgatacaatattcttagggataggagagtcacagtacaacaatagtggtgtaagtgatcaaagtgttcttgttatgggggaggtggatcctgatgatgatttcaactggtgttccaactgtaattgttctactggatttagatcatatacccctatctggtgcaataatgctcctctgggctccaaggttcgtatattaattattatattattttaatataacttgactatttattgccactgcgtcgaatgtacttgtaatttattgttataaattattgttgtctattataattgttcaaaagattttatgtttcaggttgcttgtggaatcatgtatcggaaagtagaagagaagagagcaaaggaggagagtagcattacttattaagtagtggctt

SEQ ID NO: 221144 - DNA, 2860 bp, Cannabis indica
atgaaaatataatggagaaacaataacgtcgaagaggcgacttgagagttgggaatcggatgtgaaacaaaaatatcatgaattgttcagttaaattttaagacaaaatttttataaggagagaataattataatatttcaaaatttaaaaatgaattagtaattttaaataactcaattaagaataaatgtaaaattattatagaatatttaaaattaaaatcttatttttgtgtttgggatatttttataattttgacctcaaaggataaaataataattttaatatatattttgtacgaatgaattacattattatgtagtatattcgctttctcatgttacatataaatttcgataagttagtacaatatagttataatttaatattttggcttggattcggaatccaaaatttgtaagtaatatgattaggataataatattaaacatctaatattacatgaatttatgtgtggtgtggaatgagaattgcccttatgtgtgaagtatgatgaatttttgtggtaaggaaaaatggttatttgacaataaagttaataatttgaactatacttgttattattaaaaaataaaaatcaaaatttcatttttggctttgaaaccctcttccatcaacctcctctatctgctaatccctctttgaaattattgtaatcttgagaatgaagtgtagcaatttcaaaagaattttggttgtgggttgtgtttagctttagaggaatcatttgaggtagttttaatctcctttttattaatttaatttcagaatttttaattttgttttggagctagcatattgtgttatgttgttcttgatttggatgtaaagtatttttgttatggatattaagttagtgatgttgtgttgcttcagttcagcaaaatttaaattttgggtcattttgtagttgtgttttttagcatgaatttttaacatttaggttgtgttggttgcgtgttggttgctttgaaaatgatgaattgaacataaattcatatttggattctaagcttttattatgtgagctttgggaatttttgagattgaatgtgtgaattagctatgtgatatttgttttcttttgaattttcctacactctaaattggtattagttaccaataggatattatgtttgaagtttggtatgaatttgtgcatgtttggagctaaaatttaggttttttctcggttgtcaagtcctatcgctacgaccagacttacggtggatgcggagaggttttacccaaaacaagggatagcctttgccgagattggtcgcggcaaccccgaggtgacaattcaatttttttcttttattttgggcataatttttagctctaaactctgatttagacattctttatatcgttaaaaagctcgttttaagctctattacatatatagagttggactcctatatgtgaattttattaaatgtgattttagagttaaccatattgtgtaaaacttaagatttgtgaataggaataccaacacttgctctagagcacatgtgggcttgaaattctcctcatacattcgaactcaggcaatatacaaaactaagaacatagagtatagtgcaatggcacatttttatgtgttgacctcagatttagccaacaaacaagggagtcgaatttattactgatgcttgccacgtattacacaattggagcaataaagtaaatagacacaggattttatagaagttcgaccccttagttaacggctaatgacctactctccttttagctgtattgataccaagaaataatactactaatatcactatagtaatgggatttgaaatagctctcttagattataatgtgaaaactagagtttgcaaatctcaagtgagaataaagcactgggatgagttattagacttagagagagatgagttatcaaacttagagcataaggcttagggtttgagacttagactgaagacttagagttttagggtttgactaaggctctttatataggagagcttacatccctaaaatcctttaaaaataggtaaataaagccatactttacatattaaattattaaaataataatgattaaattgcctctagaaaataaggaagttgctgatattttttctctatttttctgggcttttatggcccaattcgtggtctagcctactctccacgtatgaaagctgggcatcagaatcctgtcaagccaaaatttggttggccatgcacctacaaagtgcatgctggtcggctagatgatgtccaaaagttggctggcctatgttggctatagggccggccagccaccttgaggtggctagttcgtcactttgtcatctcgcttcagtactcgaacccctcattggttgaagtaccgagcagacggcttggccttcttgttagcaagttgtactaccatgtggtattgatgttggccacgtaaacatgccacatcagctgggtaaaaatcaggataacatttgcctctacgtccctattcaaacatctttgcgaataaggattttcaagcttatttgagactaaaataactttaaactgtgcaaatcctgcagcatttttaggctttgaaatatttgctcttgactgtctgatcacactctttgtagtaagttaactgcattactcttctgcatgatttttagttgcaaactacatggcaagtaaaaaagggggtcccacggaagctatataaacttataagagggaaacaacttttcactttctacatttcaatctctctctaaaaaagtaaatcttgaaagctcctccttctctctagaggctgacacccacagtgcttcaactcccaagattatc

SEQ ID NO: 221145 - DNA, 955 bp, Cannabis indica
gcatccacgcaaaagcaaccatcaaaacccaaccgaactcgaattatctccagatacgcacttttcgaacgagtttcagaaagggaaaccaagcttaaattgaattctttgacgtgagtggcaagagccgtgacagtccaagggttgccaatcccttgaacattccacaatagggtactcattgctctcgcaaggtcgccgcttcaattatctgttccgagtttgaatcacatagttgagaaacatccccggtgaaaacttcaaatctggatccagagcccaaatctcccttcatttgtttcgttgtcatctcttgtcccccctgggttttcctttgacggtttgctgtttttggaacaaacttcttcctcttctcccgggtccctttgttctgcgagttacttccagattcataggtaattgggatgtcaaagaggatgccagtagagtcttgtatataagtttctggttccattagtctggctttacatgccctttcctccattgcattcaagactgcctctttttttattgctgatctctttcgaatgccctgttcctctagatctttgttcatccttgttattgttggtgtagtttcctcgaccatttcattacagatagcatgaaaattgggagttaaattgggttcttcaacacacatattcaattgattataattattaatgttaggtgttataggtaatgtacctgattgtgtgttgttgttataggtgaagtcctctctttcatttgtctggtgcaccattttgggaattgattggtgatttatttcttctaagccctctggttgtgaatttttcattgtgtcttctcttttggtggattctattttgcctatattatccacctttagccatgagccgtaagccaaagtagtttgcccatcctccttagtcaccataatcggattaattgcacattggcgcatctc

SEQ ID NO: 221146 - DNA, 3668 bp, Cannabis indica
gttgtatctcctacaccaagaacctcctataacagctgctggtttttctggtttagttttaaataaatcaattgtagatcaatggcataatcgccttggtcacccatctttgtatgttcaaacattttcaataaaaagattggttcttctattgttcaccatcctcatactcactgtcatatatacaatgttgcaaagcaaaaacgattaccttttgtttctcataacaactttgcatctcatatttttgatttaatccatatggatatatggggacctttcccaataataagtactgaagggtatcgttacttcttgactattgttgacgataaatctcgatatacatggacatatatgttaaaaaccaaatctgaagttcaaaaagtcattcctgatttttttcagatggttaatacacaattttctcatgccatcaaggctgtaagatcagataatgctaaggagttgaatctttcttccttttatgcatccaaaggagttacacattatcactcctgtgttgagagaccacaacaaaactcggttgtggagagaaaataccaacacattctcaatgttgctcgtgcgttaggatttcaatcccatctccctctggtttattgccctcacctaattgctacagcaacttacctcataaatcgaacaccctctattctactcaagaccaatacctcttttgaacttatctataacaaaccccctacttatgatcatctccgatcctttgggtgtttagcatatggttccactttaccctctaaaaggcacaagttttctccaagaagtcgtgcctctgtctttattggctatccacacggaatgaaagcctatctcttatttgacattgaatctcaacaaatatacacttctagggacgttatattccatgagaatatttttccctatctctctaccacttccttagatgagattaacaattgtctttctcctttggttctcccttatcaacagcctgttgcaccagcaacaacaccagccacttccaatatatcatcatctcatataaagcaacatgttgcacccaccccagaaataatttccactgcagacttcacccaatcggttgtttctgcacctatatcaaaaaaaccagcaactaattcagcacctgcccagcagcctcttgcaccagtttatgcatcagatcatgcaccaccttgtgcatctgatcgtgcatcacatagtgcaccaaattcccaacccgactgtgcatcagatattgcaccagtttgtgcaccacattgtgcaccagatattacaccagattgtgcatcagacattgcaccagattgtgaaccaaatattacaccaccttgtgaacctgacacaaacaaaaccagccctccagctgctattagcacaacaaaaacaggtcgacaagttgtcaaacctgctcacttgaaaaattatgtatgtcatgcggcttctactaatcatcctattgagcctttcttatcctacatcaaacttcatccctcttttagagctgctgtccttgcagcctacacacaaaccgagcctcaaaactatgttgaggcttatcaattcaaacattggcttgaagcaattgataatgaaacccaagctttagaaaaaaaataaaacttggatcattaccaagttgcctcctggacacaaacccattggttgcaaatgggtgtacaaggttaaatataatcaagaaggtgaagttgtaagattcaaggctcgcctcgttgctaaaggctatagccaaaaacccgacattgatttttcgcaaacatatgcacctgttgcaaaattcaataccctcaaagtttttttggcactttaataattgggttattcatcaagtagatgtcaataacgcattccttcatggggatctccatgaagaggtctatatgaaaattcctcccggttataatgctcctcccaatacagtttgcaaactcaataagagcatctatggcctcaaacaagcatcccgacaatggtatgccaaattaagctccacattgatcgaggatggcttcacccaatctctatccgataactcattattcatcaagaaaacaaactctatcttcattgccattctcatctatgtcgatgacatgatcatagcaagcaacaacaatgttgccatctctcagttcactcaaaaactggatgccaagttcaaactcaaagacttaggaaagcttcattttttccttggccttgaagttggtagaacttccaaagggatctccatttcccaaaggccatttactcttcaacttctcaaagatacaggatatctaggggcaaaatcggcctctacacccatggaactcaaccttaaattgagcaaagacaaagggaaaattctccctgacccatccggttatagaagtttgataggcaaactcatctatcttactattactaggccggacatcacatatgctgtcaatcatctcagccaattcctctcttgtcctcggcttccccatatgcaggccactcatcgaattttacaatacttaaagcaaacacctggacagggactcttttttccttccgatacagcaccacatctgcaagcatatactgaaaccagtctatcctgagacaatgtccaagtctcgttctttgctgatgcagattggggcagctgtcaagatactcgtcgctccatttcaggttattgcatttttcttgggaagtccctctggaaatcaaaaaaacaacaagtagtttctcgttcgtcggctgaagctgaataccgtgcaatggctaatgctacttccgaattgacatggctccttgcccttctcaatgactttggcgtctcccacaaacaaccagctaatctttattgcgacaacatggctgctattcacatcagtgaaaaccccgtgtatcatgagcgcaccaaacatgttgaaatcgactgccacttcatccgagagaaaattcagcaaggctccattcgtcttctccatgtctcttctcaacaaaacttggcggatatttttaccaaacctttacttcctacccctttttctaccatagtttccaagatgggcgtaattaatatctacactccatcttgaggggggctattaaaggttgttaattagttattctaactgatttgtaatcagttatttttctgttaattaccttgccaagttgcttattttgtagcacatgtctaattgtacctttgcctatataaaggcttgtaattcagctcaacgaatatacaacagattattcttttccttttcactctgttttctctgttacaaagcttaaagcttctcatagtagatagggcaaaagtaaacttaaaaaggaaaaaaacaatgctctacgtaatctaatttaaccattacactaaatctaatattatatctataaatatcaattttttattacaaatatatgtcgtaactaactaaattgcatatacatttttttttccgaattttttttatccaaggacgattgtcccgcctcgcttacatgtgagtgcgccccacatgccatgtgtaacgtccccgcttcaagcctccattgggtccttacacccacagaatgaatgactcttatacacgagtacgttactctggctgcttcatggactgatgact

SEQ ID NO: 221147 - DNA, 2799 bp, Cannabis indica
ttctctatgacttgattttgtacacttattccattttaaatactgatttgtttagctttatagggacattgatgatttttatctatggtctcgttcgacgtaatggtctaatatagtccttgacgattatccatattctgagtcctcataaactgcacaatatttgtttttttttatatctgtttttcttttaggaaagatatatttaatctttcagataaaagaattatgatgtatctggttatttttattaaatgatttttgcacatttgttgcattagcaacctaactctaacaccctatatccaatgacttcaagtttatttcttaaatcagagcgttaatttcgttcttcctagtgttatgtttattttggtcactgaagagccttcataatcccagctgagctgaaattatgtgcttatctgattcatgggaggccaatattgattgatggaagtttcgctgataaatgcctatttcttactcattattttaggtgtttactagtaactttccgcatatccatatactgctaataacatctacttttgcagttttgtaattgatatattttgtttatttataatcctcctatctttatacattttcaatacttctgcatagagtatggactatattgtttgctgtctgcctttctcctctcttacattccgaagtcatttataaacttttgttctgtttattttagtccctgtgatgagttaattattaagttaaaagtagtatgaaatgactttgatgtaaatcaattttctgagggattttttttcagcctcttgcaatttaatctgtaatattttcttcaagatttgatatgaaatccttccgtatgtgagagattgttttatcatcacatctcttatctttaatgcttctttcctttcccaatgattttattcttggagaattttcgttttgcatttgttgattttaaacattctgaggtacttacaagtgttttatttaaccagttattggtttccaattcctttgtatggtgttgtcgattgtagtcatctcgatatgaagattagttttggaatggcgtcatatttttatttgcaatattatgtttttcaatcatattttaatgaagaactgtccattgtttgtttttatctctatgatgattggtttataaataaaagtagtggactgatttccattgatgattacaaccgttctgagagatctttaatttttgccaattgttgtaaataatatttttttttctcattctgtattgcaaaagagaaaatatatagcaaattttgcctaaccaatggatttctaagcttatctttcaaccgtcgtaatgcaatatatctcctggtgaatcctatcactacatgccgcattttctatctatttcgttgtttatgagctttttctttccttactaatttcgaactgcagtgtttttgattaaacatctaggatttttagagcactatctgaatttttgtcctttgttaaagtagaaatcaaaggtgatatggtttctaatgaacttggagaatggagatctttgctaccataataaatgaacgttcgtttgatacccaatgctgatcagtttgtaaacttaacattgtgattgttttaactacaaatattgactcagtagtaataaaagtcattgtacttgtatatatataaaaactaattgaacttgttggatctactggtaaagggctgttatctagtggtggtagtgttataaataataatattctttgtgcaatttaatgtttcacttatatttctattgatgtctaatatttttttttcgatgtacgaaattttatcgtggttgaaaatattgttcttcagataaagtgaaacagaaggctaattatgctaaacagcccaaagggaagaataacatttttaccaacaaaaagattttgcctaacatggtcaagcacaacgatattatcccacctaatgaataattcgagaaatattggcaaaactatgttaaaacgcagttcgcaatccatatcatctcctcgaggatcatgtcacttcaactaggtgcacaaattgcttggcgcatcatataaaaaatgcaatttaaaatctttgcggttttaaatctttgcggttttaaatttaataattacggttcaaattgtaccgtattatatatataaagttactaatttttcttttcgattaaacaaatcattaatttttacaatatgtttttttttagataagaacaaatatatataggtgccgtttggtaacatttttttaatcagttttttatttataaaattaaaaaagtgaaaatattttttaaaaacatgttctataaaattgtttttactttttaattgagaataattgagaatcaaaatttagaaaaaaaaaaatcacttttaatatttttttaaatagaattttttcctaattaatattttggacgtcgactagacctggatttaaataccctcccacgaccctgacattgaacccggcctctgacccgaacttgaattcgaccccggacctagagcgaacttaaataaaataaaaataaactttaaagaacacacttttatttactatttttaaaattgaaaaacaaaagtgattacagaacacatttttgtttttcaaaaataaaattttaaaaaacaaaaattttactttaattatgtgattaaaaaattaaaaaataaaagtaattaccaaacaacactataatatatgtgtttattactttatttttttgattacaacttaatatattaacttgtatgatta

SEQ ID NO: 221148 - DNA, 3715 bp, Cannabis indica
accatactccttacatctgggaacaactagatgtaccatgatgtgaaaagccctgtattagtggatagggtatgaaaaggtgacactgtagagtacgtgtcgaaatggctaaattgttagcaagtcaaggcagagcatcagagaccaacgggtttacttcaacccatgaagattcctgagttgaagtgggaagatataaccatggactttgtggttggattacctaaaacagtagggttctatgattctatctgggtagctatggatagatatacaaagtcggcacacttttttacagttacaaactatgtatacggtggatcagtatgctaatctttatgttaaggagatatttcgacttcatggtgcttcaaagtcgatcgtctcggatggagaaccaaagtttacatccaagttttgggagagtttgcgatgattaacgggtaccaaattaaagttcagtacaacctttcatcctcaaatcgatggtcagtctaagaagactattcagatacttgaggatgtgctacaggcgtgtgtaataaactttaaaggtcattggaataagtttttcgtaaaacaatagttatcaaaatactattggcatggcaccatacaaaatgctctatagaagaaagtgttgttcacccattcattgggatgaaaccgaggaacagaggtaccttagacctgatgcagtccaaagaatgattgaggccattgagaagattcacgctcgtatgcttgcctcacaaagtagacaaaagaattacgctgatccaaaggatagagatattgaattctaggttggggatttcgtcttcctttgaatgtccccaatgaagggaattcaaaggtttggaaagaagggaaagttgagtcccagatttattggcccgtttgagattctataaagggttggtagggtagcctatcagctagccttaccccctgctttatttgaagatcataatgtgtttcatatctcgatgctttggaagtatgcggctgatacgacccatatcctaagctatgaggatattgaacttcaaagtgatctatcatacgaggaacaaccagtccagattctggataggaaagagaagatgctatggaacaaggctattctgttcgttaaggtgctatggagaaacaacaagattgatgaagcgacctgggagctagagtcgcagatgcgggagaagtatcccaagttatttaggtaaatttcaaccacaaaatttcaaaaggagggaatatttgtaatatctcgaaaaatataatgatatttgtttaggcatattttattaaatatgtgactatatgaatattggagtaagattataatcttacttaagctaattgtgggttgattagtgtaagattagtaagtgattaaataaagcgtaatttaagaattatagagattttatcgggttatgtaggtatagtaataccatttttgaaataaaatattttcgtgttcggcggccgtgaaaactcgacgaagcggtcagaaatgtcacgataaaagatgaattgaattttaattagattggattagtttagaattttaagttgtcgatttggcgggattagttggaaatgaccaaaatacccctaagtctaattttaacctaagtatttaattatgggtaaaatagtcaatctaccttagtttgttttattttatttatatatattagtggactgagttaggaaattataattgatgtatacttagtagttaaatgaattaagttagaaaaatcaataattaagaaaaatagcaaaatcaaatatgataactccattctcctcttctcctcttcaaaacctagggttagtagctggaaggggaattattcaccaaattcttcaagttttagcaaaatttaacttagtctaaggatttcttaagctttgaggtaagtttcccatatatttttctttcaattttaaggttctaggttaggtgttgttagggtttctttaggttttggggttgtggtataaattggagcttagaacatatctttagatatgatttaaggttggtttgtttatgaattgataattgctttgactttttaagcttgtattgagagaaatttagttttagaacctaatttaattcaagcatggtaaattggttaatttgagtttttttgggttttgaatgattatgtgttttgattttatgttattagtgtgttctagaaagtttaagtaggattggaggagctcatgattggttttggggtgtaaaactagaattaccccaaatctaccaaaaccggtcgaccagtttttggcaaaccggtcaactggttggccaacagggggaattttagggtttttccttgaatttgattttggctcggggtgttgcctagaacctagtttagggtattttagtgatgtttaagttattttagagtcagtagggatttagagttatccggttatggaattagggtttattctagagtttggacaagttgtttatcaaattttgttatcgtgacataggattcgagatcgttgagcataattccactcaggtcggcccgcacacctaatatttgattgaggtaagaaaagctttgtgcactgctgagcatgttaggtgagaaacgattcttatcgtttgtgactcgattgtgatcgaggtaacggttattattattgtgacttgattatgatcgaggggaagatacaatcattaccgttactatgaatgggtaattacttgcttaaaactgcatataagtttcttacttatcgtttgctttattgggtaatgatagtgacatatgtagctcgtggataacgagtggtaatggtactttatgaggcatcaagatcggtacgtcttataagatgtataattggttatgcattggttgattgtccattaaatgatgaatttgtttaatatgctatattgtgattacttgctatattgtttgtgttgttatagcttttcttgctgagtctctgtgactcatggtatcttcgtggtgcatgtaaaggaaagaagaaaatgggccagccatgagttagaggtctcccaacgatgtacatatcaatttgcggtgacctggcttttagtggacaggatttttcctttgatcataattttaaaaaggaactttattttgtaaagctaattttgaaccaagctgtaaaaattcataaacaggggttccccatttttagtaatcttttgtataagagttatattttagtataaacgttttaaatcaaccacacttttcttaaaattaatctcttaataagtaacgactaatttataaaagcacacacgtggcgtccctgtgagacatggcgttacaacatggtatcagagcgaccaaggttaaagatcctgaagaatagtttgatatgaacatcgactgcaaagactcgttcgacttatggtttagtaagtattaattgttatattatttgttaattacctaattacctacttatctgaaatatgctagttattagaaacgcatagtaatggctgatgtgtatttgtatacatggaaatacttattagtattggtcacgatttgagatatattaaaacaatagaagttatggtcgcaggtgtattagaatatgcacccaaggcaacgataggtttttttacttatcgtttgctttatcgggcgaacgatagtgacatatgtagctcgtggat

SEQ ID NO: 221149 - DNA, 1943 bp, Cannabis indica
gaacggtgaggggaaaccaaggagaggcaagacaatgttacaatgtcgcagcatacttgtcagtattggtggtgcacagggatgaagagccaattatgacagaacaagacgagttggatccccgtgtgggatccgaaacagctatagaacctatggaggatatcgaggaagtgagtattacgaccttgactccactaaaatcatttgcctaggaaaaaacatggagccggaggaaagaagcaagatcatagaaacttaagggtagccatggatgtcttcgcgtggtgccacggggatatgaccggagtaagcccccatgtgatcacccatgtcctgaatgttaacccaacatgcctctggtgcagcaaaaaagactccctcttaatccagtaaaggcagacgccttagagaaagaggtggataagttattagccaatggcctaatctaggatgtgtactacccggaatggctagcaaattcagtgttggtacataaaccaaatgggacgtggcatgtttgcatagatttcactaatcttaacaaggccttcccaaaagactacttctcgttgcctcgaattgatcaaatagtggacgccacctcagaatttaagttgctatccttcatggatgcctaattcggatacaaccagattaaaatgcatgtcgcggatcaagaatgtactagcttcaagatgaacaagggggtatactgttacctggtcatgccttttggattaaagaacgctagtgcaacttatcagcgaatggttagccgaatgtttaaaggcctcctgggaagaaatatggaggtatacgtagaagacctactggttaaatccaaaaatgcatgggccatgcagatgacctcacagagtgcttcgaagtggtccgaaggtatgggatgaaacttaatcccaagaagtgtacattcagcgtaaaattaggaaaatttatgggatttatcgttagtcaacgtgggatagaggctatccttaaaaaatacaagccttgttgagcatgccttccccaaagaaaaacaaagatgtacaaagcttcaccgggaaggtggccaccttaagtcgattcatctcccgattgaccgacaagtgcatccctttcttcaatattttgaaaaagtgtcaaaaattcgaatggactgaagagtgggaggacgcattcaaaaaactaaacgaacatatggccaaacaactggtactgtcaaaatcggttcatggagaggacttgtcattatacttggctgtctccgagaacgctgttagtgcgaccttggtctgggaagaaaacaaagtccaacacccagtgtactacgtcagcaagcgcatgttaggagctgaaactcggtatcccttaatcgagaaattagttttttgcctcctgatggtttcaaggaaactaagaccctacttccaggcccatcccattaaggtacttacaaatcacccgcttcggcaagtcttgtagaaacttgaagcctcatgaagactccttaaatgggccatggaattgagccagttcaatatacattatatcccacgcgtctttataaaaggataggccctggcaaacttcataacagaatgtaacaaagtagaagccaactccaatacaccagccttgaaaatgccagtgcggaaagtgtatgtcgatggggcatcgaatgaaagtggatctgatgtcgggataagcaatgatatcaccagatgatgggctctgattccaggccgccctacagttcgcatttctagcttccaacaatgaggctagaatatgaaagcgctaattgcaggactaaggtttgccaaagctgtaggggctgcaagggtagaagtcttcagtgattctcagttagtggtcaacaaggtatcacgagaatacaaacacgtggagaaagatggctgcttatgtaacaattgtcgaga

SEQ ID NO: 221150 - DNA, 2136 bp, Cannabis indica
ttatatttattttatacttctaattataaacaaaagtaacatgttccaaaactcaaaaacagcttttaaaaggtgagcccaaaaaaattcagcgtggaaggtattaaactgaaaacatgtgttgaatcaaaatatctatttccagaactaacaaacaaaaacattattacgtatctaattcaacctctaaaattttaaacaaattaatcataattaactttgccaaaactattgctatattacatatttttgcttaagttatataacttaaatctattttgagacatccctttcaattttcaaagagaaaataaaaacaaaaacaaatacaaagttcagaaaacaaccaagagttaaaattaaaaaaaatatatatgagcatttggaattttgctcatagatattttgttatgatgaaattcatggttagtatctacttcaacctatgatatcttatctttcccaagctccaaattttggttggtctaaaaactctccccattttttaagtaacatattagaaaacgtaactagtaaccaaaagggcgccaatatatatagaaacagagaaaaatatacaaaacgacatcgtaattcaaaattatggcttcaacgacttcaacttcaatttctcctcaaaatttcagagcccaaaagaaaataccatccaagaccaaaaacctcagcagcaattacatttcattctcttctcatttattcattaaaaatcccattatttgttcatcaaaatcttattattctactagtaactatagtgttaaagccaagttaaacgacaatgaagttgttgtcgttgatgaagagatggataaaattcggaggctgcaaaacgggtcggatgttcgaggtgtggcgttggaaggagagaaggggcgggcggtggatttgaccccggccgcggtggaggcaatttcggaaagttttggggagtgggtggtggcaatgttgaagcagagtagtaacagtaatagtaatggtaatagtaatagtaatagtaatagtagcgatgaagttgttaaagtgtcgcttggaaaagacccgagagtaacaggacctttgttaagtggcgcggtgttcgcggggctgtcgcgcgcgggttgtgcgacgtttgacatgggactcgcgacaactcccgcttgcttcatgagcacagtgttgcttccattttcctttgatgcttctattatggtaaaattattgctactacattagtacacatttataggtaccattttcctttgaaaccttaattaagtaaagtgtcccctaacatttatcttatgtgaattatgtatatgcagatgacggcatcacacttaccatacacaagaaatgggctgaagttttttacaaagaaaggtggactaagttcaccccaagttgaggagatatgtgagaaagctgcacgtaaatatgcgaataggctcaccaaggtctccacaatgctcacttatcgccccaaaagtgtcaatttcatgagtgcttatgccactcacctaagggaaattatcaagcaaaggatcaaccatccacttcactatgacactcctcttcaaggatttcaggtacataaaatgtatatatatattgacatgggaaatatgagacatttttaacattattatttgtaagtgtaaaaatatatcactatgtttcttaaggtaacaatttataagtaattcatagttttttatattacatcaataggagtatggtactattggtatttggtatcacttatgtcatttagcaattttatgataatttagcacatattttgtgtagaattatttaagtcttaaaagttgcaacatctattttaatatcgttttttgtactgctacaagttagaggagctaattcattttcaacccattttatttgtattcattttgacattatgaaaaaagagtgaactgttaaagagagaagctatatattgtcaacattgagagactttgaaaagagagaagatcaagagtgattatttatttttatttttttttgagtagtgaaaattctcactatggttaggtcggctctaaaagttagttatgtgtacgatcgtgggtcccctaacgactagattagttcgaaattgtgtaaaaaaaaaaa

SEQ ID NO: 221151 - DNA, 3616 bp, Cannabis indica
aacaacatatggtttctcgttaatatactaagtaccagtttgtatattgattccttgcctaagacctttcaatcagcaggttacaaatatactctgatacttaggtaattaatgagttatcccataaaaagcgattacgttgatccgtactccttttatcttgactcgtgtcctctgttgatatggcaaccgaatttcgggtataacatttacagttggcatcttcttgctttctgaaataaagtgacacgtaacattatttctttggctcttaggattactttaattaatggagcgtgtgctacatggatttgtgaaatgacagatgatcatgtcagcgaatgtcccgaggagaatatcatcacttgaatatctcaattccaaacaatgaattaaatgaaaatctgacatctctttcggatcgtttgatgtattttgtgttttcttcgatatcatctttgtgttcctgatctaatcgtgctggaacaactttcgttaagaattttactttcgaatgtagggtccaaaagggacccttcgaagcagtgataagggaagactctcctataccattgttatcttctatagtgtgggtatttaagtgcttgactttttctttttctttcccagtttttatcatgacagaagttgtccaagttgataaagcttaaattttggagcaagaggaagttgcagctctaagaatggtgttcgtaatccgaggagatggatcactacaacaacaagttaaaaaattacgaggccctccttgcgtatgaataggatcacggtctcaagtatgaagactcgatcaaactgagtaaagaaaagagtaaaaaggtttaataaaggatgtgggtggcacccacaattttatttatttaatcaaaccccctacttgtcagaccctttctctaactttccctatttctatctttctttctctctcttcaaaacaacaaagagaaacccataaccaccaccaccaccggtgaagctccagcaaacacaatccgatgaccgcttgggcctacacgccgcacctccaacacttggcaatctcaccccaagtggtgcctcctcattcgctacaagaagcgagagatctcgagtcaaagtttggagttttaaactttgaatgcattttttagtcacatccaatatccgtttaacgatttgtcttcaccactagactcatctcatcaatgagaacaatatacactaagtcattctgcctaactcactactttttctagtgacattttcgtagctctgcccctttttggagacttgctagcgtatcgtgtactgtgttgacaaatcgttggcatgggtgcgatctactcattgtggtggtcattttgatatatactacccctatttttggtgatgtttctgttacactgatttccacctcaacaataattaatgtctaccgcataaaatatagttatgttatctgtcattggactcaattttaattttagaatgcaatgatgataattatttagccatttgatggtcataggtgaaagtgatatataagattggactaaacaattggagctcgggacttgagaggttaggatcctctttttagacaaagtttaatgacctgtgagaggtagggactcaagttgattattggaattttacccaaaaactttccttggtgacatgcatttaaatgtttgacatgtagcaagaaggatgaaaacacagagttgagtagactcgagtcatagcagtcgacttgggaggagtccctagccctgtgccaggttgactttaggaacttcatgatggaagttcaaacttcaataactcatttccaacttactatttttagtataaggtatgatgaagacatggagtaactaaatctaggccccaggagccaaaattacatgaacttgcaccccaaaagtcaacctaggcacaacgggtttcacccaacacccaagctgacatcctcaactagggtttctatttctaggactgcctttgttaaaatgggttaaattttgcattggaacatgaactagacataccatggacatatttgaagcatcaaaattagatttagagaaactccatttttgagcacctggtgctcgggcacccagcacccagcacccaggttgacaacttgtcaatctgggcaacatttaagtatcaaattgacaatctaacttttgcattgtctttgccttcataaaaaatgtggaaatggtactttcaaggaagaaatgacacatcctaggtgctagaatagcgcccaagttgacacctagggctggcccagcacccaggtttacattttgtcaaactaggtcgatttcgatgatgcttttcgagaaaaattccaagcatgttctctaatttcaacaaatattaagattcaaaaaattatggggacgaagtggaactttcaaggggccaaaattgggacccagctcccaggttgacacctggcactaggcctagtgcccatgttgtcatattgtcaacctgggcctttttcaatcagattctcaaaaatatgttctaggcattttttccatcatcaaaaataatgaagattcaagccaactcagggggaaaaccacaaactcgagggcctggaaacagagcccatcacccgagttgaccttgtgatgggcccaatgcccaggttgacaatcaatatggtgcactggtttcaatcattcaaatgccaaatctgatctgataaatctttccagaatggccaaaaattgtgtaggagacctcatcctcaagttttaaaactttggaagtatcaaaacatcccagaagctccagatgttgggttttgtgccttaattaaaacccaatttcaatataatcttgaatattcattacttgtctaatgtgttaatttgttcatgtgatcacttgtttgatttataagttcatccaaatccttatcacattgatattcttgtttattgggatgtcaacacagtggaaagtaatcgagattgtgtgattaaatgtattggtatgatttatcagtacacaaggtttaattgattggataatctacaatgtatagtttacttgtaccttggataagtgctatattctttccagggcattggttaaagtaagcttgggtttgatgtattgagtatacatcagaagagaccgatatttaatttggataaaagataataaaatgaccataatatctatttaattcaatatcacctagttgatcttaaatcaaatgatctcaatcctgagatggctagtttctagttctgttgtattatttatgttcttcaatttgttagttaaagtcgaccaatggatcttcttgtgacatacagattaaggacatggtagttcaattgattgggagcggtaatcatagatacgaaatctatagcttctacctggacatagaactgaaatgaaaatttccttcgagcttggcttaatagagataaatggttgagtactcatttcagtaattatattagtttacaaaaatatcatttataggtagctaagtgttttaaggataaaatacattgaagggtgtagcagtaaatttgtcccaactcaatgtagatcatctatagaggatcat

SEQ ID NO: 221152 - DNA, 1172 bp, Cannabis indica
ataaaacacatatttctaataaaaaaaagcaaaacaaatagattaaccaaatcccactttttaaattttgcttccacagtacggaagaatagaaaaacattagtcaaattaaacagattatatattcaaatatttacgtacacacacacgaactcatgatcaatgtaaccaatgaatttacactgcgtgtcaatatatattatttttttttaaaaaaaaagtttcacgtaataaataattacttgggtaatactctttttcttcttctttaacaagttatcagtctactaaatataaataccaagtacctatagtagtaattgattaagtataacaaatacaaatttgacgcagtttaaaagatactttgatattaaactacataatatggaattggtgagtgaagtgatgatgacctcttactacttattattaaccctaatcattctcactgtcgttttttcattcaaaacaaagaaacgacactacaaaaacctcccaccaaccccaccctctcttcccataattggtcatctccatctagtgaaacctccactccaccgagccttgcgcaatctctccaccaaatacggcgatgttttctcccttggcttcggttttcgccaagtggtcgttgtctcatcgccttctgtagttgaggaatgcttcaccaaaaatgacgtcgttttggctaatcgtccacaacttcttgcggcgaagcacataggctacaactccaccaatatggttgacactccctatggtgatcactggcgcaacctcaggcgaattggcgcaactgagatcttctcctctggacggcttaacctctttgtagggattaggagagatgaagtcaaacgactactcttcaagctctcacaccataaagattggcaaaaggtattgtgttaagaaatatgcaataaaatattatagtgtaatgatgatatatgtgaacaaatttaaattcatagtaaacttgtatgaaaaagtaatttcaactaattatttttgtttaatataggttccacttattaaaaattacttatttatttctgtgtttcatgtgtccatgttttatgcattatccattattacattataaatatgcataaaaagttacaaaattatatgttgcacaaaatttgagatatttttacagtttttaa

SEQ ID NO: 221153 - DNA, 2218 bp, Cannabis indica
agagattcaacatgggtgatgccaagccagttagtacacccttggcaagtcattttcgcctatccaagggtcagtcccctgagacggaggaaggtcgacatttcatggctaatattctttatgcctcagctattgggagtttgatgtgcgcgatggtttgtacaagaccagatattggacatgcggtgggagtttttagcaggtttatgtcgaattcaggaaaacctcattaggaagcagtgaagtggattttaaggtatccacgaggcaccacagataagtgtttgtactttggaaaggtgagttaaaagtacaaggctttgtagatgcagatttcaaaggtgaagtcgatcaccggaaaagcaccacatgtttttatattcactgttggaaatatagttgttagttggatgtctcaattgcaaaaaattgtagttttatccactgtagaggttgagtatgtcacagtgactgaagccagtaaagagatgatatggcttcaaggtttgttaactgagctaggattcaagcaagagaataatgttttgaacagtgatagtcagagtgcaatccacttggcaaagaattcaacatttcattccagaaccaagcatattagactttgttatcatttcattagatctctattggaagatgaagtgttaatactggagaagatccaatgatgtaagaatctagcagatatgttgacaaagacggtgacgattgagaaactgaagttatgttcaactttagttggcctgcaagaataacaaaaccagaaagctttgctacataatgtggagtgttaagacagtttaaaaccagtcttcaagtgggagattgttaaagaaataacattatcctttcttaattaaaataaaaggaatggatcgcatccattgttatttttaggaagcctaagttatcaaattagtaatgaaaggtgcataactattgactaatttctaccactcatttcatttgtccaaagcctatataaacccacataagtttcatttatatatatcccaacacaaaaagaagaatagcttaagctagaggcttagagagagaaaagtttttgagagaatttttgtgaaaaaaaaaaatcttgagtataattggagtgtaggttgtgaagagtgttgtaaaacactatgtatttttatttctcagtttcagtaaaagatttgtagtagatttagagacataccaaaaattgttatcaaatttgtatgtgtgtgtgttatttctgttgttagtttattctcactaatctgatttataagaaaatttgcataattttctcaacagaaagttcggttcttcgagacaacatgggctcagttgtattggctgctaggtgacattttgaattaatatattttcatcatttcgtaaaatgaattgggatcccaaaatttgtgaacttttctaaaatataattaataaagtttgtatttattaataaaatttttattaaacacgtcttttagtaaaccttttaattaacaaaagttagcgcagtaatttataatttattgtatcgcgcttaaacaagtagggcattacacttgtgggccatctctttgtgtggttccagtccgttacctcggttcggcccatgattgggcttcaatttattatctttgacttgaatatgccacgtgcttattcccttccagaaacacggataacaaaagtgactaaagaatttttatgaggattaatacttttatagattttttaattacattattttacaaaatccctcaaaagtacataaaaatagcatgcaaataatataattaatatttttgtgaaaaacaatagtctatatttttttggtccgtaaaaatatttaaaaacctataaattcttaattttgtaatcattaccaaaaatactacttttaatggtaattttttaatcacaacataaatttttataactaaatattacttttagtcacaacaaaaattacttgttactaaataatatttaaatacgagttatcactaatttaatttagtcacaacaagtgtcatgactaaaaaagaatttagtaacaataaattataattcttgtgattaagacttttaagcaaacactttttaatgataatgtacgaataaaatttatatttaattataattttttttagggtaaataccattttggaccctgtgttttgcaaaagttacagattggacc

SEQ ID NO: 221154 - DNA, 1617 bp, Cannabis indica
ataatatttgcatgtcattgttttaaccgaggaatatatttaattatacagctcaaacatctcttaatcagattttaaaataaaacttggtcgaattttgtacaataaataacaaaaaaagtcaaaactcaactcgggtctccaaaaaaaagagacaacctccgtcgatcattcttgtttattatagtatcaatttggtctttaaaagacaaaatcagcctttggagctagtagctatatttttattgttattattttaaaaccttttcataaaagaaaaaatatcttttattaaaaataaaatatgcgaaagagaccttattatataattaatatcatttgtactgatccataaatgataaaacattaagacgaccccaataaataaatttggtgagagaaagcatagcattttcagttactcatcatcatcaactgaagttacaaaatgcctaagttatataatatgatgattttgtatgattaaattttggaactttgtgattatgaagacttttttttggttgagctattctaaaatgtggaaaagatttgtaattattctttagggtcgctttcgttttgtctcagtcccttggatttgggaccccacaaagccgtgtatacctctgtggagctttctcctatgatctcattgagatgtttcaagaatcaatattggctgcaaattgggaaaggcttaagttacgtttggcttaatctttgaacaagtaaacgactttggaaaacaaggtaagagatttatgggaattcttccatttggggtctctgctttgcttttcttaccatttttttttttcttttatgatacaagggtgtttgcaacatttcgacactgaagtgtttatatcagagccagatgattgatggacaaaatttagatttatgtttttacttttgagtttcttgatctgggttttgcttgaaaacggttatggtgatccggatttggctgttggaatgatgccgtgatcagctcaaaacgagctaatagtgaaagaagttagttatgttcaaaagttgttacagtgatttgagtatttccttctaaggaaacccttctttgagttttctcccaaaagagtactttttctggcccagttaagtttttcctttttccttttctttgtttaagtttgatggattgaattttcacattttgagatattagaatctgggttttgcataaaattgcaaacttgacattgggatttgcccaaagttttggtttttgtattgacattatgagggaggaaggttttaatgaaattgtatgaaagcttgatgtgaaatggtggtgagtgagtgagtgagtgatccattttttattttgattttggatccatggctgccatatctccctctcaaaattcacctccttcagccgtgccaccggctcctagcaccacttcaactccaccacctcagatttcttcatctcctcctccaactcctcttacatctccaccactttctcagcccaacgcaaatccaccagatacctcaaactctactgctacttctccaccacctcagtcccctcctcctccagccacacaattaacacctccatcacaaccactcccattggcacca

SEQ ID NO: 221155 - DNA, 1957 bp, Cannabis indica
aaaccattagcatgtaaaatttatgcaaacatcaatcacttcaaatttcttatattgataactaatcagattgtaaagagttttatttagggcataaaacccaacactcactttccttatacagaaggctaattgtagtagatgaagtaaaagtttgagaggtcatggattcatttgataaaacagattcaagtccacagctttgggctctaaaattaggcccaatctaatttttcatctctgagaggcccaataggccagttagaccatttgaatcgagaaaattacattgtatacccactttactttacttgttttaatttttatattttttaagatgtacacatttttatagatgatgccccattagactccttaagttaatatatattatatgctagacttaagtagaaagtgaaggtatattgtgcaactcactaaaaaaattggtatattttaataaaaaaaaccatatgaagatatttttaattaatggataaaaaaaagaggtacttatcccatttgaatccacaaccccactaacatctccactttccataacggttggcttcacaatatggtggggaaatttgaatttccatacttacaatatcctataattttttccctaactgcatagttattaaaattggtcatatatgaccactttactaatttctcaaaactacccctcacatttcaaatcctaatctcatcctctctcttcctctctctcaacccacactcccctctcggtcagcctcctcaacccacaaaaacccgaagctgtgctcacgttgacggcgcacggcgaaggcgagttcgacccagccaatcgacggcgagcccacccacggtgacccagccaatcgacgacgagcccacccacgctgaaccgaaaccatgtcaaaggtatgttttcatttttttttttttgtttttttagaaagtttagatttattgtgtttgtgattttgtttgagattatttgtgaaacctattatttgttagatctaagaaattttgggtggaatgggtggattcggatttgtgaaatttttttggggaagaagacagtccgatggtcccgatggggtcagtccgatggtcccgatgggtccggtccaatggtccgatgggtccagtccgatggtctgatgttatggggtctgatggtttagtttctttggggtccgattttcatgtgggtccgatgggtaccaatcggacccatcagaaccgatgccctttttttttctttttaattaattatttttgtaatgaattattaattattatttattattttatgaattattaatttattttgtattgttatgaaagtatataaattctagtattttactatttacaataattattaatctttctatgaaagtacataaattgtaatatgtttttttttaaaaaaaactattggatattttgaatccttttatcaaaaatacattttcataaaataaaacttcttgaaatattttgagaatgttgagataatttgttgtgtttaaaacaatttaaattatgtctgctcgtatcatacaataaaggtaaccaaatttttaatcttaatttcaatacaatagatgatcgaatttgggatcttaatatgaacttagtgtaagagtttcatatgataagttttagttgggaggggacgagattaaagagaatctctaaccaaaatattaaagagtttaaaattaataaaataaacttaaaaataagacccaattaatcataagctatcaactaaaattataccaaaaagacaaaccaaactctatacgagacattccataagagtttataataaatacaattatataaataaccaactaaaatccacatgttgaaattattaaataatgttttaatttttattgttttatttattattaattatagtttttttattaattagtaattattgttt

SEQ ID NO: 221156 - DNA, 3320 bp, Cannabis indica
catctaaaaaattgtaaatcagattgaaaacccattcaaaattttaagaacgaaaaataactcgattgtgatatgtttctgaaccaatttgaaaaataaatctagaaacattgtaaattagtcaagaatgagattcgcacaatgaattttaatcaatattcaatagaatcaaaaaaaaaaacccaaattaatttcataatacaatcataaaaactttaaaattttaatttgaaaattctcgcaatttactaaataattttatgaatataatatatcattaaaaagagaatttagtgaggaacaaaactcttaaagatttaagatcaatatataaaaaatttaacatataataatagcgaaatcaatatgtaatttcaaaaaattaacatatattaattaattgttgaataaattataggtcctaaatcatatacaatatgtaatctgataccacattgtaaaaaaaattaataatcccaagatataaatttatatataatatagaatactataatgtatatatatatatatttaaatatacatacctgattgattcataacaattagtgcaattcgatagtgcaatactatcaactaagtcttcctctctatatttctaaatcagaagcagttttatttatctgattatttaaagtgtagaattatgatgagacattatgtatttatagagctagggagggatacttagctacataactctaattggactaggtctgctcatcaaaaacttcagttaactagaaaaagttatacttttactttaactagactttacacaaatagatactaaatccattgactattgatcactaaaaattaataaatccaaataaaaatctaacacaaaatactatataacttacgccagtggttatatatttcgttaatttaatttagatattttaaaatattccttaatggtaaattttatagaggtttctttatttttcactttaaaataatttttatatatatataaaaaaatttatttagaaattctcatagcaactaacggagcaacctaaatcgcaaccaaaattcacatatatagcaacttaaatagaagtcgccggagaaaccaccgaagcaacccaaactgtaaattttaaaaaaatatattaaaaagttgtatatggaacaattttcctaataataatttaaattatgtaatcggcttctatatttattttattatgattcaaattacttaatttattaataaaaataaaaaagaaaaataaaaaagaattgagatatctttatttatatcacttatggctactttaactttacaatttattacagctacacaccaatttattaaaattaatttgctctctcatttaattttatgtgaagatcaagataagagtgatgatctttccttttgtggaatagttttggcctattcaaagaaaaggttttgctttattaggctttcactttggacttactagctagttgtactctccatatttacattattaacttttcttttctttgcatactttgcatcaaaatttatctcacttcgatcaaagtgccttttgtttatttcacaagattcttcttttctttttttttttccatttgttctctcttttaaaatgctcaaaagtttatatataattatttagataattgttaaaaaatattattagtgttcagtaccttcttcggtatcatattgctattagtgtaattaagtatcagatctcatataattttagaaataatttttaaaaataccattaaccgatcgtgggacgctatctacaaaagatgtttagcactactggtactcaataacaatattcaattatttatacaaaaaaatgttaaaaagacaccaataatgcataacgctttttaaagtgtaatattattatttgtgcaattaaatattagaatctatataatttaatatattaacttttaaagatattgctaaccaattacaaaataatacttctaaaaagtgctagacactattaatatgtgttgaaaatactcttatttatttatatattgtgatcttatgtgagttaattacaacattataacacaacccccttcatgacctaacttttatttttgctttatgacatatataataggaatctaattacttgtatgaatcataataattagcttcatcaatatataaataacgtttagtttctattcaaaagagataaatttggaaatctaaagatatgttatgattaaagtcaccattgagaggtccattttaatttcttgaagaatttggcataactagctatagctagctccattttgttggttaattagtccatctatttaatactatacatgtaaagaccgcatatgattaatactttgaattattaaataattagggtttatgtatgagattttattattattaataatattacgattatgggaatttatttgagtgcatatatatttattatgctatttatgtaatttctcaatttctgtgattgtgttcggaagctgtggaaagcgacgttgggcctatagagagtcgcattttatataatttagaatttattcggggtatctttgttaggttttagcggtattggtattttcgggatttagtaaatgaccattctacccttgtgatgttttaattgtttttattagtgaaaggggcaagaaggtctttttacaagacttcttttgtcttatgctagttaatttgttggctgagaataagttattaaaaaaaaaaaaaaaaataaataagaaaagaagaaaggagtgagtaagagaaaacttagcattgaagctttcatgttcatctctccctttccctctcattcgatccttcaagccagcaagaaggagagttttcttgctgaaatcttactaacctaattgagtttttgaagttccaatcaaggtatttcttcttgctattcttcttttagggtttctttagtttaagttaagttttgtattttaatatgagtttctgttgctgtatgaattgtaagagtttgagtgggtgttctggagtttgtttgttgttgtgtgagttgatttcagctaggattagaggttgatttaagcttggagcaaagtttgagtttatgaactcaaacttagctctctaatggtgaattgaaaatctgaacgaattgctgagatttgctcattgggattgatctaaaataatatatacaggtattctggaagttattgagaagtttgggataaatttgaattaaggggaagaatttttgggttcccagctcagaaccggaattccggttcctggggccctg

SEQ ID NO: 221157 - DNA, 3853 bp, Cannabis indica
ttttttttttttttagtttttttggttgttagttttttcagtgttcggacagtcggtgtactcggtttggtcagtttcttagatttttcgctcacccctagttcataggcgaaagatagtgtaggaaaccaaaagaaaatgcacagacagaaggtgttgtgaagctgttagaacaggaaaacgaaggccaaataaaggtgctagaagggtttcgaacaggcaagtttggaaggttattagttggctcggagattcatccttcagcaaggttcgcagaagtagacataatagtatttacactgacagcaatccaacaaactaaaattaaagagcccagaagctatgaagaggcaatttcaagtcaaaacaagtctaaatggctttaggccatggatgaggagatggattcactccgaaagaataagacttggatagttgtgccaaagccagagaataagaagattatggagtgcaaattgattctcaaggtgaaagagggaatcaataataatgaatcaatgaggttcaaaactaggctagtggctaagagttttactcaggtggaaggtataaactacacagaattcttctcacatgtggtaaagtacaagacaataaggttaatgttatctttggtagctcaattggagttcgaggttgaacagctagatgttaagactgcttttttaaatagattcttggatgaagagatctacatgaagcaaccacctggatttcaggtagaagggaaataagttaaattagtgtgcaagcttaacatatccctctatagtttgaaatagtccctaagacaatgaaataggagattcgatacatatatgcaacaaatcgagttgaaattatcagtatatatacgatcactgcttatatttcaagaatctggagcaatctacagcagtgttcttattgctctacgtggatgatatgatcatcatgagcaaagatagatctgtgatcaaaagtatcaaagccaagatcaaaagagaatttagtatgatagagcttggaccagttcaaaagatacttggtatcgaagtctcacagaaccagaaggaagggactattagcctaaagtagttcaagtacattaagaaagtttttcaaaagtttaacatggaagatacaaagagtacatccgtttcgttggggggttagtttgttttgtcaaaggaacaatatcctagtagtacgaaagagaaaaaagaaatgaaggatgtaccctatgttgtggttctaggatgtttaatgtacgtgatggtgagcacaagatcggatatagctcacgctctaagcatatgttgatatgttgatataatgtatttattaaaatttagatacaaatttatcaataaaacatatatttattatttatttttttatatatgtttatatgtttattatttaattttacaatatatagttcgtatataaaattaagaatatgtttctcataattaataaaatgtataataaattgtaaataaatttttatacacatatattgtaattaagtactataaaatatataaagttgtaaattttctatcttttttcaataatatttttacacaattataataaaaaaaataactataattattataatttgaatattattattattttaattaataagaaaatatttatcattgttattattattaaattattggactttttaatatatcatgctttcgagttaatctatttgtgcttatgtgtcgtgctttcatgcttgttgtgtcgtgtgacgcctcctatatttttcgtgttgtgtcgtgcttatatattttttcttgtcgtgctgtgtcatgcttaagtacatattttttttaccgagtcatagtcgtgcttctcgaggtcgtgtcggtttcgtgccgtgtcaaaaaactcgacccatattacaacaataattctaggtttagattaggtggtggtgtggcgatgattttgatcttctttgtgattttgggtttagatcaggtggtgtcgtgatggtcatgatttattttgttgttgatggtggttgtggttgtagtggtgatggtggtgcggtaagggatccatagaaagggagtgcaagctagggattaggattatgaaaagtagaggaaagaaaataaaataaaagaattaacattttttacatttaaaattttaaataatttttataataaaaaataatttaagctgttggaccatctgatgagcctaggaatgtgtaatctgcattttggtatgcatcatgggtcacatggataggagcaacttgttttgggcatttgttgccgaaaaagatatacatattgttttaataatcaagggctcgtttggaacgccttattaggtcgtattgtattgtattgtattatattaaattgtattttatacaatatttttatgtaaaacgttatatggtattaacttttatggacacctaaatatataatattttagtataacttaaagtttaacatagtattatataaaaatacaatgtataatccaattcattataatacaatacaatacaatacgatctaatacgacattccaaacgtggcctaagttcattaaattaaaaaaatcaacaatgaatgaatctcacacctcacaacaaaatacttgccaatccgtcagagccgaaattaactgaatggcttaatgttacgaaacaaacaaacaaacatttagaaaacctgcaatgaagatctttacatttagaaaaatacgccaaaaaaatgtatagaatcagatattttatcttacctgttttatattttagtgctctataatgtaaaatttgactaataatgtataaattgtatcatttttatttactattttctgactttattatttatttttttatgctttttatatatgagtaaaatttagataatacactaagaattttttaaaaattaatatggaaatttttttatttttactcttcgaaattttttatttataaaatatctctttagtaaaattaataagtcattttattaattattttatagtttatttatatttatattatcgttgttatgaggttgtttttagttattttatagtttatttatagttggtgaggtggatttctcattgattttagttgtttttttttatattttactgagtaaagtatatttttgtaattttaaaaccttacaagcatatttttataaataaaaattttagaccgtaaaattataaataaaacataaaaaaactagtatttttgaaaattacttctaaaaaattttacatgaaaaatacaaaactaactttattacacacttactttcacaccgtggtataaacatttataccctttttaatgttttatttatcaaaatatatttgcacacataatacatgtaatgcgaatgtcattgtagaacaatcacactcaactatttttccatctcttttttatatatcttcttctttttattttagttctcattttcaatttttcttttgaattaatttaacatgatcaaaacaaggtttctcacctaaaaattgatcccacgatctataactgccgttgatgttccaaccacgatttattattattttttaattgttttcttctatcaatttctatataaatggctatcactcgttcctcatcttctccgtctctttctgtgaaaaaattgggttcaagagggattatttcccctcctcgagtttgaccaaagtcaccttgattggatccaaccatccctcctgacagtgacgaagccagaactttatctgactgagggcttgaatattttatttttcaagggcttgaataaaaattaaatcaaatgatttt

SEQ ID NO: 221158 - DNA, 1404 bp, Cannabis indica
taccgcaccattttttgcggtgcggtttttgcggttttttagtttcgtgtgcgggtgcggtttgaaaaattagaaacactacatgtgcgggttggtttgaaaaaatgataaaaaaccgcaccacccgcaccgcgaagacccctactaaattctttttcgtgacaggccaattgttatatatattaataatctcgttattattatatataatataataatttatttgtatgggtccttagaaaatccttttttgcttcaattaattaaaaaatgatttgtatcgatcttaagagttgttaaatgtcatgattaggcttcatgattaatgctggccggctctcgggtgggccacccatattttaaaaactcacaaaagtacgtattttggtgagtaatttaataattagagtagcactaaaagcagaaacgagattattaattattaacgggagaaaaatctctaaaactgataaataaatatttaattttatttataacatgtaagtaagtttgcatgatatttgttctgttttaattaataaaataccctttttatagaaaaaaaaaaattaaatcatgccgatcgagtcagtcagcccatattatattttatcaaaaataaaactaatcaaattacaaatgaaacagtacaactgccaattacaatttcatactatttcagttcaaaaatagaaagatttctattaaggcaaatattatagaccacacctgcagctcgaacaataaatccgagatgaagtttctttgccatttctgaggaatcctatccaagagatggcttggccacacctaataatcactcagccacaagtcactactaattaagccaacccaaaattgcctctaacaatctaaagaagaaagggcactcgaaataataaaggagatgagagtaactttccttgtcaagatacaagaaaagtgcgtctttggtccaaattgtttcgagtaagaaaatgagtatgcacctcctcccaaaaaaataagggcattacaactttgagacaaaaagtaaaaatcttgaatctgccattcttctaaaatacgaattattaataataccccctcttcccacacaaaaagctacatagaaaggaattaagttaggcagcatgcatatgactatatatatatatattttatattatcagagatagatctagaagttaataataataataagctattattactagtatctcatctataagaattgtatagataaaaatgtttactaatcacactataaatcaataccttttatcactaaattgactgctatgtatacataattgtagagattaatatataaagagtatcggtcggggagagatgtggctggctggatcctatatatattagttatatatgggtggcagtggc

SEQ ID NO: 221159 - DNA, 2301 bp, Cannabis indica
cgaaaccaggtcttccaccagacccctgcaaatttgttccgaaacacgaatgagaatcaatactaaaaaaagacagaggaatgactaatgcatttttcatttcatctggaattaaaaaaacacagctgattaagaaagaaacaatgttggtttaataaagagcacatttttctaatcatatagctagacgaaagacaagcatcggttacttagaacagttgccgatagcaaactcattacttcaacacccaataaccaaacaataacaaaaatcttgaatctaaaaccttttagatcaaactttcattaattcaagtagtcagatttttcattgcacattgcctaggctatgtaatcaaatttccaccaattgaaaacatagaaaggcttaaatatttaaatgtacattgcccaattgaagtgaataactactcagtcacacaactataaaaaaagctaaacagaaacaacaagacaatgcaatgcaattttaaacttaccccaaatgaaggtctgtaatcagcgggagccccacttttgtcaccaccaaactcaccgggaggaccacgaggacctccacggtacccatctctgtcaccaccgaatttgcgttctccatcaaaccgaggtgggccactgattgacaacaacaacaaaaacaaaacttcaatcaaatttgagcccaacaacatccctattaggaaagtatgcaaatctaaaactaaaacctaatgatatcaaaaatatgcaggcccttttgtattcagtttctaattaatgttaatgaagttactcctggttttcaaaaacaaaaatctaaagatatcaaaaatataaatgcagctaaaaattttaacaaagcaaaactgaaaactaaaggaggcaaagattatttaccgtgggcggtcgccaccacccaaaggccttccagcgggcttggcctgcttcttcagagtagcagggacaatctcagaaggaagattaaggtagtttctaagaaactcgataccatcattggtcaagtaccagtagtagtgcatccaggcaaaggtctcccggacatactccttcgacttaaagctctgcatgagcttaataacttgtagatttggtacatcaatttctgggtgcttcgccaaattatagtctttcttagcgaagcaaacgccctcttcaagaatttattcaaacaaaataaacaacaaattaaaacaataataaccttactacaattgaaattgaaaccctaagaaaacaatcaaaaactcaaatttagctaccttgaaagaggtactttgagatttcacgtctgtttttctcagagataatctgaataaacaaaattgaaatgagattgaaaacagttatgagcacaaagaaagaacaatagaacgataatgcataccattttggagatttgagaaatggagtcgctcttcctcttcttcttcttcttcttcagtaaaaccctaatgagagagactgacttataaaaggtagcgtcccttttatagtcgcaaattaattcattaaaaaatatatatttttaactttttttatgtgttttttttttaaaaaaaaaatagggtatattttctatattgtattaaatttttactattgtcttcccggttgtgttattaaaatatactacttttataaaaaaatcgtgtcacagtaaaatttttactcaaaatctaatatttttataaaaattacattaaaaatagggatattaagttatagtagttgggtgattattaaaattatttttgcccttgaactttaacatatactaaatcatactttctaaactgttaatgtcgttaaaaatttcttgaactattgagattgttgaatttaaagatttttttttttcaattttggtaaaaaaagtctaacatgattaaaaattcaagggacataatttggtaatagatattaatagttgggagcataatttaatatatggataatcgtataattagtaaaactgaatgaaattagacaaaaaaaattaatggttagaaaagttcaaagatataatttggtaaatatcaaaatttaggtgataaaagcaattagtgtgttttaatttctaggtagtatttgattggaagtaataaaatagaatgaaattgaaagaaattaattttcatttcattcctttgtttgattgtattttatggcacgtttactaaactgtaattggaatcagaataatcaatgggaaaaatgtatcggtttaaaatagaaaataatcggaaacaatattttattatgatgtttactagactgtcc

SEQ ID NO: 221160 - DNA, 3560 bp, Cannabis indica
cccctgatattattcattcataatcaaaaagtgaaatgaagagatcagatcagatgatttcagcatttaagaaaaatgctgtattagagtgtaaactaggtacctcaggcataaatataacacatggattcttggtgttaggctcaaactcagtactgttagcatcatgcagaccaagaacagaccgagcaaactcaaccaccgcggtctgcattcctaggcagattccgaggtaaggaattcggttttctcttgcatactttgctgcaagaattttcccttgaactcctctgtctccaaaacctcctgggacaagaacaccatctgctccctgaatatatatacatacataaaacaagcatactcagatgatcagaagaaggctgagaaacttagatatgaagcaaaaaaccaaaggcaaaataaacacacaaacctttaataacttccatgcagccttataagcatcaggattctggttatgaatgacgaacataacattagtaataatgtaaacaaaaatacaagtgaacatgttttaattagtcacctctttagctgttgcatcctctaaatcagtggctgcaacccaatccacagaaagcttcttccctaggccaacagatgcatgtagaagagcctaaacatagcaaattgcatcatgaatttaaactcaaaataacatacatatatattgaaaaggggttgggttggtgtgcaccttcagtacagaaaggtaggcatctgatagacctgtatacttcccaaccatggcaatacgaacctgcagtagtaaataaagaagattatgtttattttgatttgatgaaatttgaagtgagatgagatgagacatactgggtcatgcagcaaatcagcaatttcagccctggaagtccattcctccaaatcaggctgtctagctatgctgcaaagttattcaacaacacatatatgtcttgtgtgagtgtaaggcaattattgctaaaatgaactaaaaaagatgatgctaaaacattgaaacaaacctttgaaggttgagaacttggaagatggcttcatgagccttctgatcctaattcatgagtagaacaaaataaaaccatcatttgaagttgcacatggtacatggtacataagaagaaagaaagaaagaaagaaaaaactcactaacccttaggagcagaggaatatgccaaatgtttgaaacgtcatacagagtgatgatgttatttttctgtaacaaaatcaaatacaaagtattaattaatatttcaactatttgaacaacagtattaaaaagttttcttttttttctttttttttttgtttgacttactgggacatggcagaactgagatagcttcatcttgacattctcatcaagtgcctgaagtgaagaagaaacctggtttagccaacatgagaaagcaaagcaaatgaatatattatagagtaaagagagagggaaaccgttgtgcttcgacaagcgaggaggtgtggggtcaaaccaaggcatctcagccctctaacgctgtgttgagtaggctttgttttctgaacattaatgaactttttatcaacacactgtgaagtaaaagaattagaacaaaacaagcaaaaagagaggagaaattacctgttcaccaaccacattcaaaacaggaacaagactaacatgaatcaagcaaaaattaccaggtcctgaagaaaacaacaacttaatggttacaagtaattaattagttatgatgatgatgatgatgttagattgttaagttaattagttaccaacacggtatgagaattggcctaatgcctcaatgaagggcatggactcaatgtctccaatggtaccacccagttctatcacacaaacatcagctggggttccattatcatcctcatcatcatcatcatcagctactggaatctgtgcagctctctcaatccaatcttggattgcatctgtgatatgaggaacaacctgtacagtttttcccaggtaatctccctttctctctctatcaataactgactggtaaatcttcccagttgtgatgttattatcacgggtcagttttatatctaagaaccgttcgtagtttccaaggtctaagtccacctgaacaaaatcaaatcatagtaattaattgatcaatcaaatgatgatgatgaacatatatatgtagagttggttattttcttacctcaccaccatcgtctaacacaaacacttctccgtgttcaaaaggggacatggttccagcatctgtgtttaagtaaggatctgatcatatcaaacaaacaaacaaacaactcattttcatttccattttcattttcattttcatattcaaaacaaaaaagaaaaaaagaaaaagaagaagatggtgatgatgatattgaataccaattttaatggaagttacacgaagtccacaggccttgagaaggagaccaatgctgctagcagtgactcctttgccaagaccactcaccactccacccgttaccaaaacatacttcattattattccttaatttcttctcttttgtgttttaacaaatatttaacaacaagaagaaacagagtaaatggaatggaatatgaaatattatgagatttggttaagcattagcttagcttagcttggtttatatatataagtaacaccaacaaacactgagagatgagatcactcaacacttactcactcccaccccgtacatattggtagtgggtcccaaaatcccaacccaaccaaaccaaaccaaaccaaaccaaagaaagaaaaaaggaaaaaagaaaaaagagaaaagtgaaaatgtttatgtcctcacacacaccacaccagtacgcattagacacacacacacacacatagagaacagacccatttattaccatccctttcctttgataacactattcactcactcatacaattcaatattcttcaaatcaaaaataaatatttttcataaaataattggtagctaggtaggtgtgtcctaacaaaccattctaatattccattccatttcttttctattttatttattttaaattttactctactttagataaataaataattaattaactacattatccatatataattaattcataatattaattaagagtgagagtgaaatatatatatatagtctaattttacggccatatatataatatgatcaagtaaaggaaaggatattccaatttatatatctatctatacaaacataaaaagtgttaacactttccgaaaggcaacattacaaatcaaattgatcatccaaccatattatattattattattattattattattattattattttattaaccaacaacaaattacactttttcttttccttttttttctttttctttttatttttttaataaatattcaatttgttaattgtatctcaagaaaagcacctaacgatcaaattaatattaaccagactctctcccacttccactccaacaaataaacaatcatctttatatttctacttataattatataatacttcttcttt

SEQ ID NO: 221161 - DNA, 6054 bp, Cannabis indica
ttctttatctaacaatcttctttttgttgaaccggtaggaaattaggatcaatattcaaggggtatgaaattataaaaggatcgattctgaccatgtccttatgtgaccatgcaaaaatgtccaagtttgctcttagaaattttatcaatgctgatttcacttcgagcagcaaaccttttccaattttgagtttcctagtcggaacatttaggtcgatccactagccccacattggtattcgattccctaagtcggggatccacatcttcgtccccgccttaggcagttccctattcgacaatgtcttttcccttgtccaaactctgactagaggatacttcctttttagccttggttagggcaaggttgtaacattccagtgcaacttctttatttcctctcaggcacctgacccatttctttgtttgaaacttgaggcacgaatgaaatatcgatgtaacaacttttaggtcatataaggctagtcggcctaacatgacattaaaagtttatgggacatcgaatacctaaaattgtgtcgttacagttatactcttcgaagcttgcccaacagtgagcggtaggaaaattttccctaaaggtgcaacactcttgccaaaaaaattgtctacggactggaggcaaggggttaaatctttaagttggagccccattttctcatatggagtattgaactaaatatctgctgaagctccattgtctaccatggtttgggccactactttgtttgtcatctgtacttccacgaccaacggatcattgtgtggaaagtttactttgacagtatcttcttcactgaacgttatagtgggttcccctacccgtggtttttttggttttctttcctctacagtaggaccacttattttttctcgtgttgtaaggtttgggcatacctttcccgagctttgcctgaatctccagctatgtgtgggcctccgatgaggacatgcaaatgcccgtccactggtagcgacaataaatcttggttatcatctgtctgggtggccctctaattctagtcagtcttaacatatttttgcacgtgtgggttattatttcttagaaaaaattcaatttcccacttcaaattcttgcattcattggtgtcgtggccatagtaccatgaaattggcaaaacttggacatgtctctcttacttatatcctttttcatgggagcgggttccttgtatggagctacggactgagtagccatgtagatggtctctaaatcgtcaaccaggagagagaaagcagtgaatttggaaggattttctctagggccctattcgactttgccagcgaactttcccttttcccattgccctagatgttgttgttgttagaccttttaccaacagagcttaaattgcttgggtactgggggtgttgaacggatgttccagtagagggagcttgtgattggtttggtttgagcttgacttttgctcattgaatggcttcttcgagcttgatcaaaccatttgcgcgatggaggaagtcattcatagaatctactggtccatctctattgatgtccttccaaatctctccgagaactttgatagcccccagtattgggattaatttcccttcttcggtttaccgtgccatttttgttgcctccgtcatgaatctgctgatgtaagctcagagaggctctcttgctgtttgcttcactttgaccaggtcttctaaatgcaatgggagttggcgtgaagaacagaattgtgcatgaaattctaaagagaaagccttccaagaattgaactttcttgatgtcaacttgaagtaccattattgagcgacttttgagagtgtggccagaaagactcagcaatgcacatatcctcgtaccccctgcaattccatttgaatttcaaaatacttgagatgcctatgggatcctctttccctgtatacatcttccaggttggcatcttgaacttgtgaggtagctctagaacattgatttttggagaaaaggggtatccacgtgctcggtccaactcgaggtcattgtggttttaaccggccagacctcagaacatgtttttcagttcatccatctgtgcctacacggatggatgaacttgttcagcctcttggctgatcaatgtcacgccaggatctctttgagatggatcttgagcgcgggccccaggcttagttgctagtggaacatattgtttgtctaaccctctctttctatttagatcatctttaagatcatgagctgttcctagtctattaaatatagatgcaccaggttgcctcaacgactggttggttggaccgagcactttgcaagaactgctagtctgggtggagttattaggtataacccctcctgatgaattaccagatacggtttggccgcctactgcttgacccacaggtgaaacctatgaccgggggttggacagctggccgttcacagtttgggaagtgttctcagatagattttcattcaagccgcccaacggaatgctggatgcaggttactgattagaaacttaataggctcttcgtatgagaaaaatagcttgtcttgttcggtcgtcgatggctgcttgctgagccttcaacgtttccatctctttatccctccattcgacaaacttacgcctttgctcctcaaacgcaaggttcactgcaacgtaaagctcttcttgatcatgatgtagagtattagaatgaccttgcatgagcccaagagcattacaaaggttctggatctcggtgtcatttccaatggttgtctggacatttgccgcttaaggaatcccagagtttgggatattcagatcggctgatgaactggtgtttccagtctcttgcacaccaggtgtaactccacccaaaggagatgtcacaccttgacccactgttggtggttgcgtgattggttgttcaggattcgtggctggtgggacccttacactccctggagtctgcagtgcgggatctgccgctactgggtccactgatcaactacatctctacgagtttgtaccaccatcacgtttatgattaaacttgaagtaaagagaaaatttatgatccttgctctcaatgaaagtaccaaaatattgaccttgcttttagccaacgataatgagtcttaataataaagcgataaaggatatacttaaaatatgatatgaaaagataaataaagattacagggtttttaaagaggttcggcctgagcagttcggtaatagcctattccccttgatttgtattgacttaacaacaaagaatatagtgattcctttcttaaagctcttacaatgaaatctctaagtgctctcttagatctttccctatagtaattctttcaacccctcttctagtgagactgagtcactatttatagggctacatgtttgagggaaggtttccctttttcttacaatacctataattggtaaggatacatattacatatttagaatacactaattgtgggatttggacaacttgccatatctctgtgatacgatcccaaatttatagggattgctccactgctcggctagaaggacctcacccgtgcaggcatatacgatgttctgcttggcacatctcatatgggtaggtatgcagaatcaaatccacgtgtcaccagcatgtgatgccacgtcagagtgcgaaaattgagataacactaagatcatctaaccattatcaaatatgctcacaatatgtttttaatattccattcatcttcttagattacctacctttcaagaataaaacatcatactattttttctttaatctccatggttcctaatatccttctttaattcttaacatcatagccaacgatatcaacctttgaatttaacaagattagattattccttcgtatgaattccatatccttatttattgtataatttttttatacttatagatagcatattaactcggtatgtccaatcgttactattcgatcgaaatcataagatcccacaatacataattcaaaattatgtctttccattccttatatgggatctcctaagctgacctactaacttagcttaataacaagttaaatattcatttttgataggtattcaattagagcatgtcttatttcctcccactaacatgaactccacttaataccttgtaaatccttacttgttaacacattctttccttttagaaatctctggaacgactatcgattttgcaacctaatataaatctttctatcataatttgtcctcactcatacgtttttttcgggatgactccccgaaagatttcccatcttgagattacccaagttaagtatgcttaactacaaggtaatcccatgctgggttatcagaaagtagatgcttctttatcgtccctaattgtatttctcgctttcattttttcgtaaaaaaaatcaagtcccatcacacccttgattcacttcttataatttctcatcaatttttttcacttaaacttgaggaattaccatcttacagtcaacttgaatctattgatttctacttatcttaacttgcatcaacttctcttgaactgacacaattttaaaatttccaaacacttacagttaactaccgttataaagttaattgatgtaacctgcacggtagaggaaacattgctcatactaggttctcataactaaactagaaatacccatttcccaaattctcaactaataataattaatcaaagatctttccttgatcctgaagtttcttttctgtgtttggtaaaaatcttgataaacttatcaaacacaatatacatacctcaagtatattctacgtttcattggcaatcccttggcattaactactatgccaacttatagtgagtcccccattgacgatgctaattcatcaacatcgaagaccctcgtatactttttttttccgtcattactactaaggtttgtctccctagttcatacgccaccattgctcccttgcaatcatcaccatcttcatacttagttaaccactctacaacttattttacaatcaattatattgtttttgtttaataaaaaacctaatttgtgatccaacattcactagtcgctcaaatacgtgtccattaaatttcatctcaattcataagcttttccctattctgggtaagtatgcctttctataattggttaatggtctccttacataccacattgactattcagccaattataaagtactctccatcattacctaatcaccttaagtaatttaggtaatcttctttaccttagtgataccactactcttcctggcgttcttttatatgttaccccagtaacgtccccgctttaagcctctattgggcccttattcccacagaatgatggctcttatacatgagtgcatcactctagctacttcccagactgacgactggcccccatggacaaatccaagtattttcaacgtgccttgctccgactcgcacgtgtcatggggaaatttcctaaataaaatcaccccaagtcaaggacactcaaccatggagttccctcatggtaagctaccaaaacaagatgcttgttgctaacataggtagtcccatgcctacgtaatctcaaaattagtacacaatcatcaccatcaattcacttaggattccagacaatactcataaattgtccaacatttgctaatgctagatcactcctacacaaaagatttgtgatttgaatcaattagatcgatgcttccattaagtactcatgtcctatattccacttaggaatactacgaaatttaactcatattgtaatttctcttatttgtgtatcccgtcaaatggattaccactaaataacatacatgcatagtccattcggaattcttgatgtctctaactaattatataatgtttcatatcgatatcaattgaaatgataattgtaatatttcccataaatttctaatttgactttctcgaaggaccaatacccgagtccgcccctccgagtcataaccagcactgtgtcagaccatacactttctcctt

SEQ ID NO: 221162 - DNA, 1529 bp, Cannabis indica
aaaaaaatataataagcatcaacagtcccttttaactattcttatcaataaataacaaaattagtaaaagacaccattactatctaagtactcacctcagtataatgagtttaactaaatatcatatcctttatataactagggaaattaatttttaaaaaatataattaattagtacttatagaaggtattgaacatctcactagtagccaatattaaataaaatatgtaaagagaggattaggttggacaaaagggggattatagagtcacttccataataggggtaggggtataggggtaggggagagtggctctataaacgaggtcaaaacccccaatcaaaaaagtcttcttcaaagttcaaaccaaatcccgctcttaccccactacccgacaacttttttccctcttcacatgccaacaaaacaacaaaacaaactttcaaacccccccaacaaaacaaaatctaaactaaacacagtttatcaaacataaaaatacattatcatcattacatatatacataaaagaatatgttcaaaatttgttttgaatttatttatcacataaataaaatattagtgtccaaataaaaggggtatggtccaaaagttagagagagttttgcccaaaaccatcgaatatatagagagagaagaagtagactttcttttccttttttttccctttattatacacaaatgctcatctttatatctaatgcctcttttgcccctcttctctcatatcatgaaatgccattttgccacctatcaccattgcttaactctccctcaagccttttccacagaaagggcattgttggaaaatcaaagaagaaatgggaatgaaaggtggagaaaaaagcatgcctaaataataggctaataaatcccatgcattgaaatgagatattaattaccataaattaaatatggagtcttttttgtttctttcttttctccttctctttttttttcttcaatcatagattcaaaatgagaaaacgacgacgttctttctttactttttcttttacttttttcttaaggagggcttccaacaatgtcgacaaagactcggctaagcgccgaaggcattctcatcttctgattatcgtcctcactggttctgatcttcttgaacaaattctgtcgaccctttggagaagaagatactgaagattcagctgaccacgaatcatttgagttatctgagctgaaaatggcgtcgataatgccacttgggctacctggaactacctcgttcttgcgtttaagtgggttgttataggcgttggatagctcgattatgagattgtagcagtcgtttactttttcctgttaaaattatgtaaaaaaacccataataaataccaaattaatgaaaacggttttgacttgaaaagatttgtaaaccattaacgaaccttgtttattttaagaacacccagaagctggtttttggtaatcaatggctttacatggctcaacatggtcaatgactctcatcatagttgcagtaag

SEQ ID NO: 221163 - DNA, 3130 bp, Cannabis indica
tattttctaaggatttttgaagcagtcatcccagatcctctatcgtgcccccccaaacctttcctagatttgaggagcatgtcatccacatatacttccatattttgtccaatctagtatttgaacattttttcactaacctttggtaggtagatctaacattttttagaccaaatggcattactttatagcagtatagacccatatatgttcgaaagattgtatgctctttgttaggtggatgcattctaatctgattatatctcgaataggcgtccataaagcttaggatttcatgcccagctgttgcatccacaagttgatcgatttttgggagaggaaaacagtccttgggacacgtcttattaaggttgatgtagtcgatacatactcgccattttttgtttggcttggttacaagcacaggattggccacccaagccgggtagaaagcctcaataatgaacttgtttgtgcatagcctttctacctcttcttttagcgcttgtgcacgttctttgtccaaaaatcttctcttctgctggatgggatcaaagtttggatcaatatttagggcgtgagaaatgatagtgggtcaataccaaccatattctcatgtgaccaggcaaaaacgtcaaagtttgctcttagaaattttattaaggctaattttattttgagcagcaaacctttaccgattttgagcttcatggctaggatagcttgatcgatctccacttcttctaactattcgattagcccaacatttttattcgttttcccatgttagggatccatgtcttcgtccctaccttggatgaattcctattgggcaatcttttccctttctttaagctttggccagaagtattttccgttttgaccttagatagagcaaggttatagcattcttgtgcaatcatttaatttccccttagaaagcctaccccactattagttgggacttaacgaacaggtggaatactaatgtgacagcttttaagtcatataaggttagttgccctaacatgacattaaaatttgagggtacatcgatcaccaggaattgtgccattgcagttatgctctttggagcttgtccaactataagtggtaggtgaatttgtccaagtggtgctacactctagccggagaacccgtagaccagttgggtgcaaggaattaagtctttaagcttgagctccattttctcataggttgtcttgaatagaatatttgaggaagctccattgtccaccatagtccgtgccaccatcttgtttgtaatctgtacctcaacgactaaagggtcattatgtggaaaaataacatggctaattaaaacataaaacaatttaaacagtatagtccttccaagagacattgcttaagagcaaagatttttgaacatactatactttacgagtaatcatttgacctgagtatcagttgttttttccaaacctttgagcaaggtcctctcaaaaggccaccaatttaagaatgggtgttcgagcattgtgtactttgtgggggtcatcagaccttgtacacttattggtagtattttctcaaatgtttactgttccattaccttggtattaggaccagttccatgttttcatcatactgaccaagtttgtatgctccagaatctgtaacttttgttacttggttggcccttcccaattgggtccaagcacacttgttgtcctatcttttgtatttaagaatactcttctaagaaccatatcttccacaaagaactttcttgccctcacttacttattgaagtatcgagctaccttttgctaatgatccactagctttaggtttgttgaagatcttttttcttcaatttcatccagtgattatgtcaggagggcatgattggtggtatcttgatcataagttagtcttctgtgggatgggggttctattactacaggcaacattgcttcataatcataagccatggcaaatagtgtctgtctaccaaattgtcgtcctttctattattctgtatgaccacaatacctctagtagttcctctaaccagtttcttttagcttcttcgagccattttttcatggtatctttgagtgtcttgttgactgctttgacttgcctatttatttgagggtatgctactgtcgagaaactcttgatgattccatgtgtcatacagaagtctgtgaacatctagcaatcaaactgtttaccattgtttgagacaatcttgtgtggaagtctgtaccgacatatgatgtttttttactacaaaatctagtaccttcttagatgttatcgttgctagaggctcggcctttgtccatttggtgaagtaatctaccgcgaccattacatactgtactccacctttgcctttgggcaactatccgatcagatctattccccatatggcaaaaggccatggactttgtatctgtattaactcatttgggggtactcggggaatctttaaaaatatctagcacttgacgcacttctttacatgggcttttgaatcttccatcatagtaggccaaaaatatccttgccttagaattttctttgataagtttttcccccagcgtgattaccaaacaatccttcatgtacttcagatgggagtcgtgcagcttcttattttgtcacatatcttaacaatagcatggaaaagcctcctctgtacactacacattctactatgatgtaccgtacaacttttctcatgatcttttgagcctcatttcttttgcttggaagttctcaagtattgagataagctgctatgggagtcatcccatttggtgcagtatctaccattttgatttcttctatgcaggtgatactaggtttttctaagaattaaattggaactagattagccttatctatcaccgtgctgctcgcaagtcgtgctaaggcattagtagttgtgttttcttcccttagaatttgcttgagggtgtaacccatgattttgaatcaaaccaatcgttcttaattggattagtttagtttgactatttaattggtttggtttgtatttgaattttttgaaaggggaattatcctatataccattttttattttttttaatattacggcttgtattgttgcggt

SEQ ID NO: 221164 - DNA, 3987 bp, Cannabis indica
tcacttgcatttcacaagttcaatttttgtctattcagcttttgggttagagcaaaccctttgcacacattttaatggtaaattcataacttggtataaaagtaattgacacaattagaatgataattaatatctttattcatttattggtcaaaacaattttgttactatagtaacttacatttattaaattatgaaggtctattacagtatctaactgatctttagctaatttaaacataaaacatttgcacttttaaaaccatactttaaagatagtcatccaacttgagacctagttattttatctaaacctttgagcgggatctgcccagaaggcgatcttcttaagagtaaatgctctagcattctgtacttgaagtggtccacttactggtattttctcaaatgttccccattctaataacttggcactagaacgtgccccatattttttcataccgccccagcttatatactgcagagtctgtgactttaaccacctgatatggtccttccagttaggtccgagcacaccaaccgtgttgtcttttatgtttaggaatactcttttgaggagcatatctcccacaaaaaattttcttgccctcacttccttgttgaagtactgagctacgttttactgatgagctacgagctttaggtttgctgaggctcgtttttcttcaatctcatcaagtgattctacaaggagggcatgattaactgcttcatcttaggttaatcttctgtgggatgaaggttctaattctacgggaatcatggcttcataaccataggccatagcaaatggtgttttcccgatagttgttttctctgttatttgatatgacaacaatacttctggtagttcctccagctagttccctttagcctcttcaagtcgttttttatggtgtctttgagtgtcttgttgagtgcctcaacctgaccatttgattgagggtgtgatactgcagagaaactttttatgattccatgtgtcacatagaaatctgtaaacatctagttgtcaaaatgtttgccatttttcaaaatgatcttgtccggaagtctgaatcaacatattctgttcttcaccacaatgtccaatacttttttagatgtgattattgctaaaggctcggcctatgtccactttgtaaaataatccactgcaaccactgcttattgtactaggcccttgcccttgggcaatttttcgatcaaatctctcccccaaatggcaaaaggccaaggaaattgcatttgcattagcttattgggcagtgcagggggatcttagaaaatctcagtcacttgtcacatttctttacgtagacctttgaatcttccatcattgtcgcctagaaatatccttgtcttagtattttctttgatagactttgtcctgctgcgtggttgccacaaaatctatcatgtacttcagacaagagtcgtgcagcttcttattttgttacatatctaagtaatggcatggagaaacctcttctatacatcacaccttctactatgatgtattgtgcagctttcctcatcatcttcagagcttcattcctgtcattgcgctgttctccagtgttgaggtaagctactatgggcatcatccaatttggcattgtgtttattattttgatttcttccgcacaattgatgctaggttcttctaagaattggatcgagactaggttggccttatccattactgtgttgctcgcaacccgggctaaggcatcaactgtattttcttctcttggaatctgccttacggtgtaactcttgaattttgcgagtaggtcttgtatcttgcttagataggccatcattttctctcctcgagcctcgtactctcctgaaacatgattcagtaccaactacaaatcactacagacctcaatgtatgtggcatggacttcctgagcgaccttcagtccaactatgagggcttcatattctgcttcgttattggaagccttgaactcaaatttgattgctccgtgcaagtggtgcacccgaggtgtgacaagggcaattcctgcaccagaaagcttgtctgtggctgatccgtccacgtgtaatttctaggtaggatggtctttgttgttatctagcaggggttcttgttttggctccgggttgtcccttatgttgctttattctttgcccatgcactcaaccacaaagtctactaaggcttgttccttactattgtttggggttgaaagattattttgtactgacaaaactctatcgcccatttaagtaaccgcctagaggcatcaggcttttgtaattcttgatgtaatggttggttggtatatacccggataggatgagcttggaaatggagccttaacttcctcattgctaagattaggcagtaagtgagcttttcaattaaaggattgcatccttcagcttcaacgagtcttttttttaataaaatagactggatgctagacgttcttttcttctcttatcagcacgacgcttaccccatattcggtgacagccaggtatattcctaattcttctcgaactaggggtattgagagtacggaaggcttttcaagttgtcttttcaattcttggaaagtgttctcacattcctctatccattcaaactatttattaccttgtaggatgtcgaaaaaatgaacacacttatctgttgattttgaaatgaatctactgagtgcggctatccaaccactcaagctttggacctcctttgttttgttggaaatttcacgtccaggagttcttgtatttttgctggactagcctctattccctgagcattgacaataaaaccaagaaacttacccaagctgaccccaaaggaacactttaaggaattgagcttcatgttgtatttcttgaggattttgaagcattcatcgagatcctctatgtgccccctagccttcctaggtttgacgagcatatcatccacatatacctccatatttcgtttgatctggtctttaaacattttatttatgaatctctggtaggtagctcctgcattctttagacaaaacatcataaccttgtgacagtagaaacccatatttgtttagaaacttttatgttcttggtctggtggatgcattctgatttgattataccccaaataggcatccatacagcttaggatttcatgcctggctgttgcatccacaagctgatcgattcttggaagtggaaaatagtttgttgggtacaccttgttgaggtcgatgaaatcaatacatactcgccattttttattcaacttgggtactagtatggggttagctacccaagccgagtagaaggctttataaatgaacttgttttcacgtagtcttttttacctcttctttcagtgcttaggcctattctttgtccagtagtcttctcttttactagacaggacaaaagtttaggtcaatgtttagggcgtgagacattacagtgggaccaatgccgaccatatcctcatgtgaccaagcaaaaacgtccaggtttgctctccaaaattttattaaagctaattttactttgagcaacaaacccttaccaattttgagtttcctagtcgtgatatttgggtctgttgcccctgattttgcccaatatacgtggaccaaccagacaaggacacgtggatcaaacagcttagcattcaaattatttgctaagtctttatgtaataaggcagcatccgggacatgcctcccggagaagacatagggagccccatacgctcccggaagcccaagtaacactaaggcatctccgcgaggtgtcaggcttcccctgagcaatcaagtcgcatttaatgccgcatgggaggaagcgtgttgggactgctacacgcaataaagtctgacggcacaacccccaatctgcagctacaaagtaatgatcatttaagtctatcgacggctacactgtgaagagtcacatcagtcaaaagac

SEQ ID NO: 221165 - DNA, 4512 bp, Cannabis indica
agaagaagaaaaacacaaagcttttttatgtggttttgcagttaaagttctgcatagtccacgagtctatcttattagatttctctggtacaaaactagggttctttctcttaaggattttccgtccctttttcagtacactctgcccctatttatagttacatagggaggcagttaattacaattaggttaatatcccacaacaatatttttcctaaaattatgggatttgattatatcccacgtaaaataaatgcagttattatttgaaaatcacacagctgttatttatccgattttactgggtcaaggctaacatgggtttagacaagctgtaaagtttatctttttggggcatctcgctgagaacatagcaacaataaccctggcaatgagctgtagcttttctcatgtctttccgaggttggtaatgtaaatctcgtcgtttttgctaatgaagacataatgctccatctgacaatcacagttcttggtgataaggtgaacttcagtagtcaacatcatttgaatgtcagcttctttctgagagagctgcctcaacggaacagtggatctcattgaaagatgtctaaagctgattagtgaaggtaccacgagtatgccttcctatagcgagaaggatgcctcactattcgttgttcagattcattcaattgtaatgcttagtttgtattatgtatattatacgctaagtttttaaacagtcaacatgtctcgtctacatctctttatatgtagcgaggttgatggctcgctttgtaccacaaatgtcatccttatgtctgtgtcttttaccgcggaatggtttctcgtcaacgcatgaggaaatagtttgtatatccttatctcgcttaagactttacaattagcgagttatagatatagtctatcagctatgcatttaatgagttattccattttaatatcttttaatataattatcattatattcattgattagtattctcctaggttgacacgtgtcctcttcgaagtaccagccaaatttttggtataacaattgcccctcaaaaagttctttttaatgaaaagtgctttataaatgattacaaagggtattttgtcacaatcaaaattcatgtcctctgattttggcgattttgtggtttcatggtgcatcagcatttaatgacaatcttttccacttctttttcaaattctacccgttggatcgattgtctccctgatccgacggagattaacccaagagtataaaacaaaaaaaggaaccattcttttcaatacctttgccatttcaaaaaatctgaaaatttttcaatcttttctgcagaaaaccatacccagatcatttcaaaaccttgcatgccatccttgtcattgacatcttttctgcgagtttcatccgatttaatttttgatttcaagcactcagaggaatcttcacaccgttcgttgtttcgtcgagtacagaatcgctcatcgttccaaaaaccaaattcaaacaataagtgtattttctctattttcttatatgctcttaattctgcatttccaggtttgatcactaatttaatagttagcccctttgttaccttatttggttttaacaatttttagggttgaattgtctatgaataaatgttagggtttaggcagatcatagttttttttttttgaatttctccaatttaccaacttttggtttgataaatttcatccaagaattgggattgctatctccttgcagcaatgtcccaatctagttccgaagtttatcgtcgagaatatttagaaatagagtgtcctactgaacttgccatcccatacaaatctatagtttcagaacccaaatccaaattagagataaatgatgcaaaaattagggaacacttagtgaaaacccaccaagaaaatattgctagtcgccacggacgcttcttgtaagaaattacaaaaggcaggcaccgtttcttacgagacgctccttggcctgaacctcctagtttttcatctattcctttggctaaggctttgtttttacccaaggtcacgattactttttcactaggtgacctggactttgaaattatgtttaccaagccatgtaaatcaaagactctccagaaccctaatgtcactttcgaggctgagttaatagagtcaaaggtgcgagccatgagaggctatgtaggtgataccctaaggacttgtggtattgaatacaagcgagactgttgggttagattagtggttgctggcgagttctgttgttatccaccagtgcgacttactcgcaaaacatttgagggggccagtggcaagcccagtacaagtgggtcgatcgggataggcgcttagagcctcaaacacatcagggctgaagcaacaatccccctgcaagactatttcaaggacttcgtaaaccatctcgggcttgccccattttaactaactctaatttcatacagaatcctcgcgagcttgaaggttctgtacaaaattttgaaatgggagtaccccacccccttggaaatagaatatctctactctgtcaaggctattccagggaggaaaaatgcagcagggggttttcattatctcgggattcacacaggtgatcgtaagatcattgtggattcaccaaataaaacttcctataaggataaattcttctggaggacaggcctctccccaattaggacaaccactttccgtataatacataagtgattatttgcacaagacttggttaaattagtccatgtcttttattctggtttaactgactgtaattttgctttgtttttgacagttgtctcgaaaagtcctgctcctacccctgagatggtcgagcgacgcaggctcttgttaggtctcccatacggtcttaggtcgtctgagttccttttgaataaagtcaacctgaggtttgtgggtgtccttaccgacaaggagttacgattataaatatcccaagtattcttcttggcagcaggttctgcgtcccaactgaggaaaaagctcaggacaatgtggctcgggcacaatacctccagaatactgcccctcgggaagctgaagaaggagcatcccaaggtaatcaatgtggttgatcacccacagtgcttagggccaagtgtaacactctagtttcattttgagatagctactataacttttatacttggcatcccctccttgtagattgccttacgcataggtttgatagttggtatccaagattccatgtccaaattagttgtactgactcgtactacgggatagccgagcagtacgggaccatgatggatagggtaagtcacttagatgcgagctgggatttagaaccaattaatccctatgatatattcaggatcacaagttgtagggattttagtggatattatagtccttctacctcgtcttctagtgaatatgataaattccttaggcaggaaattatgccccaatctccccttttatttgtctttcaataaatgtttaacactttatcttatctcacataaatgaattttgagggtctcgttcacagaatgggaaagaagaggtcgaccaacccagaggctccatcagacgtcaacatggaaccaccaaaaaggcacaagaagactactgttatcaagaagcgagcctcccagactgctaatcttgtggtccctgaaactgaaactcacgatctgattcttcctccagcccctgcacgtaccgacaagccaacatctaagacgactcaagtttctgcctcctcgagccaggcccccaaaactctgcctatcgaggctgagaaagctggcccagaatacacctctgagtttggagcatcatgttggcgtcatttcaagggtctcctcccccatgaatgggatttaataaataatggggatcttggggagatgctcataaagagtgtatcccatagcctctcggtatattcctttgcccttatctggtcattatttttttacacctttcagaatacttatacattttagtttgttgtttcccagatatctttcttttcctttgtcgcccaacggcgaggcctagaaaaaatgaaatatttggaaggcgagatccaaaacctgataggccagctcgacgttataaccaagcaatggaatgatgccaaactggagaacactcgccttactaatgaagtcgagaaggtgaagaggaatctggaggccgagcttgaagctactaagaaagaggtaaaggacaaggacgatgcatgttgaaaactccaaaaggaacttgatgattccagggtaatgctcgaggggaaggaagctaaaagtactgagcgatgcattgttgttggccgtcgtaccatctaccaagcctggatggggaatccagagatagatacaagtttcttgggagagtctgaagaggaaatccttgccttctgcgagaagactaaggaggaagaagatgccgaggcagcagaagaagaagaattgtccaagtcttctactaagtaggctt

SEQ ID NO: 221166 - DNA, 2528 bp, Cannabis indica
ccgcccgatgttcagccctaaactattgtcagggtgagttcataccttctaaatcatccatgctaaacatgtatatatgtgtatattttataataatcttatctcactttcgtaatcaggtgtgccaaccaacccgagtgaaaatactgctcaacgattctaaggccctaaagtacaatcatgcaaaataggtaagtgactcgctaactcacgttttggggacttaaacttaaaataaaaaatttctatatcgataaatagtgtggcaataccctaaatatcgagaaaacacgaaagtcatggtacctaaaaatatctcatcaattgaaccagatccccgaatagtgaaccttttattggggtcatgcatggggaaatggtgagaaatagtggaccgttttgtagtagaaaataccaaaactcgattttcttactcaattctaccccaaatatcacaagattttctaaagcacctactaacaccataaagaacataattcaaatagaaaccacatcatcaaacccctgaaatcaaaagcaccattattgagaaagctttgagttttaaaactcaaacttacttaacaccaactacaatagctactactcatcaacaacaatcataaccaacttaatttaagcttccaaaatagtttctaaataaactaaaaactaacacaactaatcttattaaataataccttaaaaccaaactttaaccttacaatacaaagagtaaagagagctaagattaccttaagtcttaaggatcacttcttccaaaatcttgaggaatttcagctgcaagggtgagattaaggtctaaacttgttgggttttctttgagttcttttggagttttacaactgagaaagagaggtgaggtgagtggatttttttagtctatgtgatgtttatctctaatttctaacttgactttatataataatcaacttaaataaccaataaattctagaaatgctattagaagcattaatataaattttaagattaaaagaccaaaataaccttactttcttgctaagtaaccataacaactagggtaaaatggtcaaaaaccattaacttgcacaaccccgacattctaaatgtccatatcttttgccctgctaaaacttagatacttaaccatatcactgtgacattaatggtcaaatcatcgcattccactatcaccagcataaaatatgaaacattatcaaaattcattattaacttgcatggcacacacttagaatacaataaaattttcagaactgataaatgatttcacaaatgcctatttatgacaatatggtctttttttttttttttagtaaaagaacaacttgttcattaagcaatggaaagataattgggaatcacaggggggatttcctccccttgcacaacgctagcatcctgactagacaatctagcactctttgctagtgcatcaacaaaccgattacaactaataaagaaaaacttacaacaactaaaacacttaacatattcaataacctccaacgagatatttaagaacttctaatctagtggacaattgcctgctgcaaaggcatcgaccaccacttttgcatcagacagaacatgtatctcattctaatagcattgactagctctttgcaagaccatcaaaattgcaatcgtttctgcttccaaaatcgaccctgccttactttttgaagatgaaagaaaccatttgcttgtgactgtatcgataagcactgcccctagaccagctacaccatttgaccaggaggcatcagtcatagtcacgaacctgtagggagttcccacattctgcagcaaaggagagatcctcacctattcctccaaagggtcccataactcaccaaagtatgattttagtttatgcacaatagtgaagaatgggttagttttcccatagatcctaagggtgttcctttgctgccagatcacggtcaaaacacacccaatatacactaaggctttggatctagaagtacctgaattgctgatccaattttcaagcacctgatgcaaactcccctgggtataaagtgaatgtaacaaggtttgcaaccagtaaaccacaccaccctcgcaaagtcacattctttgaacaagtgtaaaccggtttcctcgtgattatgataaaataggtaggatgtatcactaaggaaagggaggttacacttaagaggaagtgcattgtttaaaactcgccagagcatcaaagcaattctagggtgcaccttcgagtcccaaattcacttccaagatcaactttaactccaaaacaagattttttgtcctctacataagctgacttaacagagaataccgcattcttcttcggcttccaaataatcttattcgatgttgaggttggtaatcttggaatctccagtattctgcatcccaaattccctccaaaaatagagattaccagtccctcattccaccaattgcccaaggataaatctgccactgaattcaggtgagggaaaaggttcaaatgc

SEQ ID NO: 221167 - DNA, 1750 bp, Cannabis indica
tctcaactatcatttcacttgcaactaaccctctaagctaaaaattggcagtaaacaaaatcgttagcaaatttaaggtgtcatccatttactacaattaactgccaacatgaacagcttagatgtacattcttgtaaacgtgatacatttatattggtacacttaatactatattttaaaattacaaaaaaaattaagattaaaaaatggattaaaaattaaataaaaaacattaatattcctcaaacaaaataatttttaaaatcttttggaaccgctgcctcaaatctagaacttgaacccaaacaaccctgaaccgccttagatctagaacttgaaccccatcaaccacgaccctagctgaaccaccatcaaccatgaacccaagagcagtctttaactgccaaacctggaacgacttcgagcttcaacgtgcatcgccgacccctaaaataagaatttacaagatgaatctgagtactgccaactctattactcaccagtaaaagaatacttgaccagcattgactttacaccattctttgtagtacagatgtaagatatgaccatacatatgcatcggatcaatctacataaattaatacaaattcaaagttatagtagagtaataatatagtcaaaaatttcaaaataatggcaaatcccagatcatttgaaacatctaaaaagccaaaactaaaacaaagcctcctagccaacgaactcaaagatttcataaatatatttttttttataaatcagatgaattgtattgcaccaacaatctttatacaacatatatgcaccccaatgagggccaaaatctatatacaagcagtgtgtattcggctaaatctatacaaacaactatattttcattacaaagttaggaaccactctctatcaatgcttttaacttttctaggcatgagcatagtcactcgggttttaattgtccattttacttcttcaatgattctgctacattctgccaatttcttttgccatatcaaagcatttctagccttccacaagtggtaaaccaaggctgcaattgcaacagaaaacatctgctttcggaattttgagaatctgctcttcccgatccatctaactagtttctgcaagtcacatgcttgagcatggatcttcagccagtccttcactccctgaagacaaacatttgtttacaaacaaagaagaggtgctggcaggtttcgggtagctgatcacataggcagcaagtgccattaacctgaagccaaatctgagcagcctatcttaagttttgagtttattgagcatgggcaaccagattattacactgtgttttggggtatttagtctagcccaaacttcactactccattttaccctatcggttgaggttgagaacatgttgtaggcagcatctatggtatatttttgcctctgaaaagttgcagcatcagttagcatttggatttgatccttgaggtctattatctttttccaataccaactagcatgtattgaagctaagcaactccaccactcttgatccctgatatacacactatgaacccaccttagccacaaactttcttacttgttggagatggcccatatgtacttgcccatggctgctttgttccaatgctctaggttcttgattcccaaacctccagcagatttaggttgacatatgttgctccaagcaatggatcctgtcccatgaaaaatagtctggcctttccaaagaaaagccct

SEQ ID NO: 221168 - DNA, 1057 bp, Cannabis indica
agaataatataaggacaatataataattttataacgaacatttttgtttcttaggttggtctaatgttctacatttgcatattttggacatcttcatcgattttcggtgcagtttatgtctttccattcgaaaagatctacttagtgaaagaaaggaaagcagacatgtatagattgagtgtgtactatgtttgtagcacattgtgtgacatggtagctcatgtttgttaccctacattcttcatgatcatactctacttcatggcgggttttagaagaacagttccttgcttttttctcacattatttgcaatattgttggtagttgtcacaagtcaagtaagtttcaaaaattctactattgattttttcttcttcttttgaatcgttctttttgagcaaaaatcatatatatgcctgattgtttgagctatctttctcgagtgtgaatgcttgtgttatgtttgatcgattttagtgttggtataaatttgttcatgtaatcattagggagctggagaactctttggagctgctgttttgagcattaaaagagctggaatgtttgcatctttggtactaatgttgtttcttcttaccggaggttactatgttcaggtaatttttcgtatcatatttataagaattacgatattaatttataagaacatatgttactttattcacgataaatcttaacaagacatcgaaaccaatagatatcaaacatattcgagtcacaaacacaatatttattttagagtatcataattcattacataaaatattatattttattatgagtattgttattagctattagtagtgcttatatcattgtccaacactattataagataatgttttacgagtagttagcaatttttcataacatttattaaaataaaaatatgtgagatttgatatgaatttacaccagtaacaatatgaaacctcacggcaaggctgatctaaattagacgggctaggcccgcaccctaaggcccatttagtccaggagccaaaaaagatatttttcttttaataaaaatacata

SEQ ID NO: 221169 - DNA, 1050 bp, Cannabis indica
agaagcaaccatcatagccatcagagctaacataaccatcagagttaacagaggaagaaggtcgtcaatatcattgtaatgtcgatgacaatgtgtactcaaaagattgggaacccaacatagataaagttctttctactccaacggatgccattattgttgtcatcgatgaggttagaggcatttgtgagggggaggaaaaaacagaagccagttttcttgaaggattacacaaaggggaagaagaaataacaaactaggctagttgaggtagatactttgaagtcaacagacccacgactttacaaatttttccaaaggtggattacttactcgagggacaacgatcgttctagagatgttcacaattgcagtgttgatcggagttggtttgtcaagttaatggtggaaaaagaatggcttgatgatgttgtaagtagttgattcttaactgtttaaatttagtatttttagacttttgagtaacatatatcaatgtttatgcgatatttttgtgatattggtgtgtctttatgattcatatgaatgacttttttgcgagattaaacctatgtctttgcgataaacaacctatatgtggtttgtaaattgcaaatgcatcgcttgaactcgcaaaaagtcgctaaatacggtttataaaattctaatgttgcgtgtgacgtgtttgcaatttttgcgagttttatgtgatttgaatgccaattttttactttgtgtgacttatgtgtggattttgtgcgaacttattctaactttttcatttgaaatccagaaaattgatgccatctttcacttgtttagaaggaggaagctctttccttaagtgtacactcagaaatgtatggttctggacacatctattccacaaatattttaaatgtactagaattttcatgatggtgacaggatcatgttcaattgggatgagtcggttcttgattatgcgagggggatggagcataggcacttgccttgatgggaaaaccatgaaatacatctacttcgtgttgaaccttccttttgagcacc

SEQ ID NO: 221170 - DNA, 1641 bp, Cannabis indica
attattatctcatttaattggttaccgaaaatctcagtcaatattttagtgctttcattaagagctgagggaaacgttgttcgagaaacaacagtcaagaatctaagcttcaatggttgaaactcagaaccacacaggccaacctcgtcttcccaggatccttagaacccaaaagtgaagaggcgacctcaggagtaaatgtgggctttgaggaacaagacgagtcaaacgatgaggagtatgaagaaaatcccgaagggtacgatgcttatgacgatagtagctacactgagttattagtcctaatgcaaaaagcggctgatcatgaggccgaactggctgcccaaaaagagaaaagtagaaggatataagaaataatggttgccatgcaaaaggccatggatatagctggaattcatgtgaatcccaaagtcgtgcctgcaggactagaagaaacacaagaagagtccttgccaagaacccaaaggcccaaaactagggagccaagtcctatacggtacccttttgaggaaaatcctaggaaaaatcccacttcaatccctaggagaaataaaaaggcccaagatcctagaaaggtgcgctctgatttcccgaaaggaaaaggtccgcagaggggcaagctcccttgagagagtcttggccctcaggaccgagaggatcaaaagagcgtgtctgtgcactaggagcccagggaaaggggaggaaaggtcgaaggcaccccccgttgatataagataaaaaattaacgaaaaacatggtgacttgagaaaccacctcgaaaagaaaaggtatgcggtaccggtgtcaagggacgccttgaatgagggaatctttgccgagttggtgatcctccgcaaagacattgctagagtcgcccggagataaaagggggatgactcagattttgattgcgaggaccgggagccttgcgtctgaaacatcctagaggcggaactccccaaaaattttaaaatgcctgaaatggcaacctacataggagactcagaccccagtgaccatttgtcccgattcaatagggtaattaccatcatgagggttagtaatgatgcaaagcgtctatgctttccactgacactgagcgggtctgccaaagaatggttcaagaaactgcagccaagatcagtagactgttggaacaagttgcaagtgagttttctgcagcagttcgtggcggcacgaaagatcaaccttgaggtcagtgccctacccaatataaaacaactacctgcgaaaaccctgaagaagttcataaagagattcaaggaggaggcctcaaaaaccaaaaaggtggatgatggacaatagttggccctgcttcaagctggaatctgtacaggaacccttttttggaatgagttgcaataggaaggagcggctagcctccaggacttttagaagagagtccagaaatacattaatatggaagaggcccagattgtggcttacggaggatattacccgatgggagtgtcacgatacaccaggagcacaacttcttagagctccacctcctgccactccccaaacaagcagaaaatagttctctgctactccaagatactgttgggaatattttatcaagatctagatttactaaca

SEQ ID NO: 221171 - DNA, 2108 bp, Cannabis indica
gtcgaattcatcttgcttgatatggtcaaaatcttttacttggggagcatgaaccaagtagaatgaagtattaccttgtctagaggtactagctcctcattcgtccatctctaactgggtccttcggagctcgaccaaccaaactttatcttgctccatggcttattttacttcctctgccactatatccattatgccttcccaaatctcttcgctcaaataaaaaaccaatccacaaaagcttggagcatcaattgattgatgactagctatcagaccaaccttccaaagttcggtcatggtcactagtcgattgatgtccaattattcattggtgcatgtcttgtacgccagccggtgcacctcaatccacaaagtcttttgagttcgcgaataaggaactatagtcggaaaaaaccagaataagatgtggttcggagaatggaacaatgagttaaggaagcaaggaaaaatgaaaggtatgcagagagattaggacttaccaactctttaaaaaaataatagcaaatttggatgcctacgtagagggaaaccggaagtgaagaaccattattcctgcatatctgggggattcttccaagtgctggaaggacatgtacacttctttcgcttctacattatggaacctgagaatgagaagaccaagaagttagtacgctgaccaaacaaaaatggtaaaggtacgagaaaactctccttgatcactgcttggagaagttctctccggaccctatatccaggaacgtcaagcccccaggtaaacaaatgaggaacttaaaaagaaatagaaacaaaatcctaaattaagccctaagtccgtgaaccataagggttccatatattagatcataattttggcaagacctccgaggagccccatcgagatctacagaattaacagtcaagaaagtaggaaagtcttagttttctacgcatggcatatattcaaaatcagcaaaactcttaaaggtctccatgtcatcgcctaaataagttaaatagacgccccacatgacgatgtttcctattctgatcaatagaaaacccgagtttctcatgattcatggcattcaaacgaaacctattactccaaagaatgatacaaacaattaaaaataaaatactaaaagactaaggagtagtatacttacttgtattaatcaagactacgggtaggggttgtgagctttgaactgtcggcgaagttctcatctaaaaaatatgaagtctccttgtaagttcctaggaatccgtttgaaaatttgatgacagggttggcgaagtgatagtcacaagaccggagttcaggaataaatgaatgcgaagttttaaaagtcaattgatgagtttggaactgggatcggacatccatcggacatgccaggctttatatcctaggatccaggtgtatgtcgcccaaggggtctctgtgcccctgtaatagtgttatgtcatactttatttccttgcgaggcattgtcttattctttgaataaacaccccgcgcaagagttttcatgtggagatgaatgtacaattagaatacttatctcccatgtatgggcgacatgccgctcaggtttatgcctgggggaactcttcatgtcgatgaactacttgtccagtaaccatgcttgatcttctcttaagaggtcttggttctttagctgtgagggataaatttatactaaaatcacaatctactttctcctaggcagcatatgctatgccgcctaagtaccgtgcctcgagcatgcgaggcttcaatcctttatttcttactcacttgcggggtaggaaccccacaaacttccttcatatgataacgtgtcttctctttaaatatatgtcgcatcacttagttaaaatattaggaaaaaaaaaagagagaaatttatgaagatgatgaatatgaatatgattattggagatgaggttttaagaaaattaagaattaaataatagatttgagtaaaataataaattcataagtaattaattaagtgggtccattgaagagtttaataaataatttttagttatgcacgcttcttaagagtattattattattattattattgggtat

SEQ ID NO: 221172 - DNA, 1838 bp, Cannabis indica
ccagatcaagctgtggaggtcttgattcgttggaagggtctacctttgcttgaggctacttaggagaagtttgatgtcatttgagagcaattcctaacattcaaccctgaggacaaggttaaaaattattgggaggggggtaatgatagagcctaatataagatttacgtatactagaagggggccaaccaaacacatgggtcaagggtagtattgatcattggtggttgagctgaaggagttggttaagggtagtttgggtattatttaggccatatagtgccttgagaagctattgttggattatgcaagaattagagtaaattctctatttcatggagagctccttctccctttgtatgagactttgtctccaattctgattcaataaagcttctgtgattacttccatttttgctactgttccattggttttcttgttcttcttttctgttattgcttaatattattgctgctattaaattcttatttcagagcttatcaagatcccactcttggtaaaagcaaaagtggattagtgatacttctgatgagcacatctatacgagtacactaatggcttgtcaatttagcaaagaaatcaaatatgtgctaataattacgctgtttatagactgtattatactgagtaacaaaagttaatatatttattttacatgttctttcatttggttggaggttactttgttattagcaaaagcacattaaacttgtaagtagtacagtgtacatagctaattaattctaatttatttatctatgtcttgacacattggtaacaaataaatgcacgtataatagtttttactaagatgctttggaatgaagcttggtgtggttaatatgtctatgcaatgaaatatactactttaagtctaatactctgtacttgaactctagagaattcaggtgaaaatttcaatatttaattccatggatgatacattttcttataatgaaattaattatcacatgctttgctatgaaatggagaggaactcagtcatattgctttgcttgaaataaagagaacagttaaggtaagcaaatggttctttgggatataataattccttttttttttaggatattgctttatgaatttacttaatcttattttgtttagcagtaatgcttaacaagtgaatgacattctccaaaggtgaactgttatttggtattctttgtataatttcttatctgtgatgtgggtcatgaaaattatttattcacttttattttatgtttatttttaagaggacaacagcttgagcaatcatgtattatatggatgaaacttgtcttatctctgtctctcttcataggtctaaattttactcttcaaatttttgtgcaggacataaagtgcatacttactgctggaaagaaaaattggcacattttttctatctctgaatttgggatcttttatgattttattagagtgatggctaataattttcaatatgattaacagtacaaatcattggatctaaaagttataaattggcatatttttcattctcttctcagtctagatttatagtttttttctaatttcttgaagctcatgttaaaacagaacatagtgctttatagatattcttctgactattttttagaaaaccaaaatataggatggctttgttctgttttttgtgtcctctgtcaagtattgtccccaaaatgttttgacttttttattcaatcattttttgctttctttaatttggaaacaacctaagattgttgatgttgtttggacattatggacatgagtaatatgtgtatataaattatgtttgtaacttaggcat

SEQ ID NO: 221173 - DNA, 2366 bp, Cannabis indica
tatagttgatagaaatattcaaaatcgctgccacataagcataaacgagataagaataataactattaacaggtatgcatgacaagatagtatatctatttcgggatagacagagtatataatagaagtgttcaagacgagaaaacaaagagcttgcaacttattgacccatatgcttgggagtatgagcttgcaacttattaacccacatgcttgggagaaagagcttgcaacttgttgatccacatatttgcacgtagaaagaataattacattcatctatcttaccctctatacattgaagtaatcaactcgctaataccaccatggtacatgaagactggaaggagaagtatatttatacttagcatttttttcctataaagacgataaagaaggacaactcgtattttgcaagaaacaacttttcatagtcagcataatcgtttaaggataaagataaaagagcggttaggtgattgttaaatattattttatgtgcatagaaataaaacgtggagaatgtccacgtttcataagcactcataaatgattagatcccattgaagataactgctaccctatacacctattataaattgggacatccagggaaaaagggacgaaaaattagagaaaaaaaaaactatcttttacattgattgagaaaattgtactctgtatccagataatcatccctaataataaagactcgtgcagtatgtaaattttaactacaaaaccacaaaatatatttggtttttatttattgttatcattaattctgtagtatatttattacgtaaaaaaaattatatttagttaacaaaaagttacattaacacttaaaattattggatatagtccaataatcacccctaattaagtgaattgtattttaattttatataatttgcatcacaattagaaatgctcttaaaatctacttacttggtcaatgaaacgtgccctaatatttgcacgcacatagagactaataagttctccttattttgaatactattttttttagacttatttttgactactttaatccaaaatgaaaaagtatcccacatcgaaggacaactacgttaccgaagtataaaagcgccacgccaaccatgggaccacatagccgcttcttccacctctcgtacaaaactatagacgtggattcataatccaccaccgcactctatcaattttcccatcagtgatcccaaaaccttatgaatccgtaacttcatgcacttttgatttttgaaatagtctttctcatccagtgatggctgcagcggcgcgtgctattcgctgtgaactgaagagtactccaaagttgacatcgggtggagggtcggaactcgtcgatgttccagcgaggatctcggtcgccaaacctaatccagcggcgatggaatcggagaacacgaagatcgttttacaaccccggctttgtactctcaggtcctacggatccgatccgattggagtggtgatgaagactcggtcggaggaggttggcgatgagatttctccgttctttgcaaccttatcggagtacatcgagagcttgaagaagagccaagactttgagatcatttctggtagactagctatggtgagtgaaatccttacaaacaaaaaaaaaatagtaataataaaaatttagtaattattattatatatatggtagactagctgagctgaatttgaactgatttcttcaacgatatgaaacttgtataaatcttttggggtctgagtcgtgttgttaatttaaaatattttttagttcaaggtgattcttaagatagaacttgtagacagaatctttctaattagttttgtttaatctaaaatcaaaacgaactttatttttcttagaggaatatcttaaagcttagctggaattataataatatttaaaacaagaaaagggtagttttatattgctttttgttgtaggaccctctttgattctagcagaacttgcaaattcaaaagattcattgactgattataattattagggaattggatggaattttataaaaaaaaaagtaaataatgttgattaattaataataatttgtcagataatatttgcggtaactgtggggacgagaagtggtgacaggaaattcattgtttagaaaggttgatgtggttgggagtagaggaagcagcaggggtttgcttggcagccgtggcattcgcagctactttcgcgtggttttccgagtgctcgaacaaggtcggacggatgttcagcctcacttgcaacaccttctttgatactctcatcgacaaaatcgttgatggcttgttctcgaaaaccgacctcactgactggtccgatgaca

SEQ ID NO: 221174 - DNA, 2314 bp, Cannabis indica
gatgtagaaatgataaaacaataaaattgcaaaagtggggcccattatcctataccttgaccggccacttatgtaggtatttatcatttacctttttcattattttaatgccaaataaatctaacctaaccctaggtggttgactacaaataagtagtgatggcttcaggaaaaagatgatgcatcttattccttcagagaaaactgagtgccttcttcctaaacctagccgccactctcccatcttcttcttcacttctgaaaaccgaacccttgagtgatagagtgagtgcccacacacatcaagtggtacctcaatcatagtgtggaagattgtgaagaatccagattaaagagaaggacattcgggctcagatcatggtgatactctgcgacagagaggatacaagggttagagatctaagtggaaggagacattaaattccgctacaaccactataaggtttctcatactttatatgtgtttatttcatatctttttagaagttcatatttaggatgttaaacaaatacttgttagtaaatctaagatcctggtaaaatattttcaacaggaagatcatgaatgctagataaagagatccttgtacggattgaaacaatcaccaaggcaatggtacaagaagtttgatgagattgtattcagaaatggtttcaagaggagctcttatgacagttgtgtttatgtcaaaaacaacaaagctactgtttatctcttattgtatgctgatgacatgcttattgcatgcaaagacatacaagagataaacaaaataaaagttatgctgaacaaggaatttgaaatgaaagaccttggttaagcataaaggctttcagacattgatatcattagagacagatccaagagaattcttaaactgtctcaaaatggttacatatctaaaatcattgacagatttggtttcaatcaagctaaacctgtcaaaaatccctgcccaccactgttcaaattgtccaaatcacaggcccctatagatgatgaagatgcaaattacatgaacagggtgccgtactctagtgtggtggggagtctcatgtatctcatgatttgcaccatacctaatatcagttatggtgtcagcatggtgagcaagtttatgggacaacttggcaaggagcactgaaatgtagtaaaatggatcatgaggtatctacaaggcacaaaacaacttggactggtctatgggataaattcagaaacagtcaacatagcagggtttgtggattctgactatgcaggtgaccttgaaaatagaagatcacaattagggtatgtattttagtcaagtggatgctcaatttgctggaaatcgaatctataatccattcttgccctgtctacaacagaagcagagtacattgcatgtattgaagcagtgaaagaagccttgtggcttaagggcatctccatggaatttggcttagaccagagatgcataattgtacaatgtgacagtcaaagtgctttgcacttgagcaagaaccaagtattccatgagagaacaaaacatatagatgtgaggcttcattttcagagatgttttaattggaggaaaggtgaaactggagaaggtgtccactgagaacattgtagtagagattttaactaaagccctacctacatccaagttctaccattgtttaaagctactgaatgtaatggatgtttagcaatcaaattgcaatactgctgttatgtttatatgtgtatattacttgtcaaggtggagaattgttagatttggtgtgactatgtaatatgccacataagcaactattttaactaactaatcaagttagttaaaaccaatacacatttcgatttagttagttgtaacacgtgtagattaagtctataaatagcaatgtacttgtatatgaaaggttaaaccttttacttgtaaattcagattcatatcaataaagaaagtgttattacatttctgtctaagttcttaagtgtggttctttggctttcctgttggtttcggttaggtgctttagtggagtgttcttgaatgtgtattgaactcccatggtgtgtgagattgagtcttgaatctccaacataaactatcatagttttatttttcctctccaaacttattagtcatagcctcattcttcttcatggttgctctgttgggttttatgccctaaataaaactccatttcaatgtaatccaatttattcaatatcaataaaaaaaaacaacagaagtatttttcattcatttgtatgttttggttcatgttatcaattgcttgtcta

SEQ ID NO: 221175 - DNA, 2454 bp, Cannabis indica
gcaggttcaaggcggataagggaattttttaacaccggcgcttatttattgccggcgttattcctcgccggtaaaaggacgttttaccggcgcagttaatgtacgcgccggtaaaaagtcctttaccgaccaagcttcccagataagctttgccggcgcacaactgcgccggcaaagctttaccggcgcattcagtgtacttttgccggcgcaacaatgcgccggcaaaaagcctttttcttgtagtgatttggtacaagttccatgggcttctaaatcacccaagaaatcctaaccctagttgccatgcagaaacaagggaattcattatggctatgattctctatatttatcttcatgttacacaaacaaggttttccatgttcatgcggttcttctctttggcttcatgtttgcatgaacaaggtgatccttggtaccttgttcacgtatctcactttcaccctttagggattttcattttatcactcgaacaaggttaaaccaaataccttgttcgagattccctcttttcaaatatttaagagtacacgaaaaaggtataacctagtaccgtcttcaaattgaacacctttaaacttcatgacatactcgaataaggtaaaccctatagtaccttattttggtattttatttgttcttaaacttgctatttatttttgtggtccatatcagagttataaagcggaagcgagatttaataaaaataggttttatctaatatgaaccataagctcaaagatctcaacataatatatatagactatgttacatcatactagattaggcgtgtcgttgtgatttcatactagctgtgcaatctgttgctattcaacgggtttgttggaaaatgagtttaattaaaactttacttttaattaaaaacaaataacctttatataaattgggatcccgttatttaaaagttacaactaaaatacaaagtattaattataaaagttgtcacctagcgactaatcaaaatacagcctactgttgtgaaaatcaaacactccaggtctaaccgctttgatatgtataatcatcctttactcgcactcacttctgctcagtcttagctttgcacttatctacacatgtaaacagtaactgtgagtcggcaaactcattaagaaaagcataaatcaagcataaacttaaaatgaattaaaactaggcacccatacacccattcataaccatatcttgcgtcccacgcgtactgagtctcgaatgtttgtacgataacactattgaccattatatcagcctatacttggtactcaagtcataccgatgtgatagcattaatcagtacttaagccaaatatacattcatcggtatccaatataactctatgtatactgatactgccatttcaatataatctaataggcttcataaacatgcacgctaaatatgcaatcatatatgaatatcattatactaatcttatctcgatcccaaattcaggtgtgctggtcaacttgagtagaactactgctcgaagatttataggcccctaagtcacaacattcataaagttgataagtgacacgttaaatcactttttgagaacttaaaatcataactaaaagtttccatatcgatggataatatggaaataacctaagtatcactaaaacataaaaaactaggattccaaaactgctagaaccggtaaacagaatttccaaaatagaaaactggttcttagggttctgtctggggaatcggttaaccgtttctacagggtaagcttgaaagagtcaacctgttctttgtagaaaccctaaaaacttcaccaacaaattaattctaccccaaaatgtttcaaaccttctagaacacctatacaagccataataaacttaattcaaacaataaacataagtacaaccctccaaaacagagatcaccatgaaagggaaaagtttaagcttgaaagctcaaaccttgctcaagctccataaaaagctacaacctcaacttaaaatcacttaaactaacaaacaagcaccacagaaaaaaaaaaattctagctaaccaatttgaacatcaaccctatctcaaaattcaagcttgaaaacttaattttttttgaacaaatttagaagaaatggagggaagatcttacctcaactcccataagaactacattagctaacaaaatccaaaaattgatctaaattgaaggcaaaaagttggttcttccttgggttcttggtgttcgactcaaaggagagagaggaatatagttttttattttgttgattttctttaatttatccttaatcaattaactaatgttcaacataatactaactcaaaaaagacaaaatagggattacttactaaaatccaactaattcaaaaaatacgaattaaaacaaaaatgacctaaataatctttacttcactaagaagtaacc

SEQ ID NO: 221176 - DNA, 5290 bp, Cannabis indica
tgattctggacctaggtatttccatctccagtctcatcctagtaaatatgagatcagacaaaatctcatagggagccatcactatggtactctaatattattgttgtatgataattctgccagtggtaggtacttgctttaggagccatggaaatccatcacaaaggtatgtaacatatatttaagtatttgaattgtcctctcggattgtccatcagtctgaagatggaaagttgtactaaacttcactttggtacccatggcttgctggtggctctgccaaaattttgaagtaaactctggatccctatctgatataatggacttcagagccccatgtaacctcacaatttctttcacgtataggtctgcatattgatccactgtaaagattattttcaccggtaaaaaatgtgcagacttagtaaatcgatccaccacaacccaaagagagttgtacatccctgtggatctaggtaacccaaccaaaaaatccatggtgacatcttcccacttccactcgggaatagtcagaggttgtaacaacttgacaagtgtctgtttttcagccttaatcttctgagaagtcaagcatcgggatacaaattctatcacatctttcttcatcctgcaccgctagtagaagggttttaaatcttggtacattttggtagtgctaggatgcagtgaataaggagtagtttgaggttccttgagaatttcaatcctaagttttgcattgtttggaacacaaactctagttctatacaacaacatcccattacctgacatagtaaaatctttagcttgactagttaaaacctcttcatggatcttcacagattctggatcagttaactgagcaactttaatttttctaacaaatcattttataatgtcaaattattaagttttcctacaacaaatttaatacctgatttgaccatatcatcttccagctggggtgaaattttaatcatactagttacttgctcggaaccctttctactcagggcatctgctgcaacattggccttctcgggatggtaaagaattttacagtcgtcgtccttaaccgattccaaccatcgcctctatctcatattcaaatcattatgggtaaagaaatatttgaggttcttgtgataaatgtaaatctcacacttttctctgtataaataatgctgccaaattttcaaagtaaaaactattgcgacaagttctaaatcatgagttgcatatcgctattgatactcctttaactaatgggaggcataagcgatgacccgatcggcttacatcaacacacaccccagaccttgtttggatgcatcacagtaaaccacgaacttctcttaataagatggtggggctaacaccggagctgcaatcaacaactacttaagctcttaaaagcttgtttcacacttatctgtccacaaatactgccgattctttctactgaattcaattaaaggtgttgagatcttagaaaatccctcaacaaaccaaccataataaccagccaaaccaaaaaagcttctgacttttgtaactatctttggtattgtccaatccttgacatattcaacctttcgaggatcggccttgatcccatccttacttccaatgtgtccaaggaaagacacctgggataacctaaattcacacttttgaaacttggcatatagtttatgctcttgtaatcgctgcagaaccaaccagagatgttgctcatgctccacttctgatttacagttcacaaggatgttgtcgatagatactataacacatacattgaggaaatccttgaataccctattcattatatccataaaatctaccagagcattagttagtccaaaagacataacaagaaattcatatacctagtgcggaaagcagtctttggaatgtcgtcgtcttggattctcaactgatgatagcctgattagagatcaatcttagaaaaaaccgttttcccctaaagttgattgaacaagtcatcgatcctaggtaaaggatacttattcttcatagtcaatttgtttacttcccggtaatcaatgcacatgtgtagggatccctctttcttcttaataaacaatgcaggagctcccagggtgacacacaaggttgtgaaaaccctaggtcaaggagcccctgcagttttttttttttttttgataaatcaatgagttgtgcacaaactaaatttacaagctaagagcaccccaaaacgaaagaggtctcaatctatacaattctttgttgctgcttttttttttccaatttgcttacagcagatttctatgatgactatagagcaaaaaaccactctctatctatacttgaaagtttctttggcaagaaactttgagcccgagtccttagactccatttcacctcttcaatcaaacggttggtgtcaacttgcaccccctgccacaacacggcatttctcattttccaggcagcatacaccatggctgcaatcgcagcactacatacagccctcttgaatcttgagacttttgccctcccaatccacttaactagctgctgaatattgcaagtgacagctttccaattcagccatgacttgatctgtaccaagcaatggttggttatcctgcattcaaagaaaagatggtgtatattctcattacattcagcacacaagttacatttctcttgaacctttaaacccattttgagtagtcaatctttggtctttagcttattcaacatcacaagccaaagtatcatagagtgcttgggcgtattcagtcttgaccatacttctttgctcccatggatttttggttttggggtgttgaatagcttatagccttccttaatagcatatttatccctgtgaaaatcagcattaacattcaaagataagatctggttttttagagctacaagcctcttccaataccaacttgagtggatagaggcattgtaactccaccagctttgtcctttgatgtatacactattcacccacctcaaccataatctctcttgtttgttcgaaatttcccaaatatacttggacatagcaaccttgttccaagtttcaagcttagtgatgcctaaacccccagtagctttagattgacatacattgtcccaggccacagcacctgctccatgaaacattgcttgacctttccataagaaagctctacatatagcttctatggaattcaggattcttttcggcatgattatgatttgactccagtactcctgaatggtaatcaaaactgagttgataagtattgttctcccagcaaatgataggttccttgagctccaagatctaattctagctgtcattttctccacttgaatctcactttctttcctagatatcttcttagcacaaattgggactcccaagtatgtgaaaggaagctcatgtctctgaaagcctgaaagttgtaaagttatatgcaactaaaaataggaacccctgaagttgaatcttctattcttaaagctatgccgaagccattctgcaaggtgcttcagaaactgattcttctctaattgctaagttaataaaaaaaatctatttcccgctgcagtggtaaatcgaaagttcattaggaaatacatctaaaaattcctgaacaaccatgatgccttctggccaaattgactcaggctgtgtggtatcccataccactaccaaaaaccctacgcatctctcttataataaatctctaactattaatattgagattactataatttgggatccctgaatagatcccacaaaaaataatggttcctcgtcctcgagttggaagatcaccatcttttgcttacgatcaatactagctgagtacttggacaagaaattcattccaagtatgatatttaaatccaccaaccccaattccactaaatcaattgaaaaattaattttatttattttaaaaattaattatcttgctaatatatttgaaaaaggttaaactattataattagccgaatacaattatttaaataaggtaaataggttttcacagttggggtgattcatgtgagggaaggttggatttagtgtgttgtacccactactatgcccccgtaactctcatagaagacccaaaagagtagaatttaatctttaattaaataattgttacaaattgaataagcccaatactaattgagtctaaataaaataatcaaagtgattattttattttagcaacctagtccattttaatatccaaaagtaaatgggcttcctatatgcatctaggcccaattacaaactgttatctcgatttttgcccacctgacttggcatgtctacgtagccaatattagcgccatgtggcagcatagttgacgaacaagaatgccaagtcatctactcaatgcttcaaccaatggggagtcccagcactcaaacatgacaataaatgacgaacctgccacctcaaggagaatggccagccacccatggctggccctatggccagcatcagtcgatgaacttctaaattgaataaggctaggaaacctacatgttgcagatgcatgttgcagatgcatgttgcagatgcatgggcaaccaaacattcatgtgtggtcagcaagctaaactgtaaattgggcttaaaagcccaggaaaatagagagaaaatatctatttttaagagacattttagtcatttgtattttactaatttaatatgtaaatatctgcttattttaccgataaaagagtttaagctctcctagataaagagcctttactaaaccctaaaattctaagtgaattgaacctaagctgaattctaagtcataagtggtaagccctaagctctaagtctgaactctctctctcacacacacacccaccattgcttctctcttaacttaagatttgccatcctcgattcctatattgtgaccttaatagagctacttcagatctcacctatagtgatatcagtggtattatctgtctggataaatacaactaaaaggatagtatgtcattacccgctaattaaaaaagctgaacctctataaaatcctgtattctattaccttcttgttcttattgtgtaatgttgacctcacttttagccaacgacaatgagtctaatttgtaagcgagaagtagtttaatacgagtgttatatagtaaaacaaataaagacgcaataattttatagaggttaagccccaagtagttcggtaatagcctaatcctcgttatttgtattgacttaagaacaaggagaacggttcctt

SEQ ID NO: 221177 - DNA, 3461 bp, Cannabis indica
aaaaaatttaaaaacaaaagtattaccaaatgctgccttaacagaaaattttatctgtcatcaatacctacttcacaaaatgtaccaatacaataaattaaaaatccaaaaaagaatccaaagcttctccaacagcaaagatatataaaaaaaaaatgttccagcattaacaaatagagcgctctaaagcaaagtattcaaattcatttactaaaacatctcaataaaagtagcacttagcaaaggaaaaataaaatcaactaaaatatgacatttttgttaatagataatgattctaaggagggtgatatccacatcaaggtttctttcaagtctgactcgtacttcaatttaaaatgaatattaagtctgagatgcttccaattaaccaagggataacgaattaagttcttcaaatttttgggcaagttttctggccaaatgagctcctacaaatttatgaaaacatataaattatagtcttaacaatatgaatgaaaacaaatacacaatacaagtaaccaacataccttatcgtcaccaacatacaattccacaaaattccaagagtaactgagattcacaagaatattcatcagatcaataaacccttccatgtcatagtttcttttccaattccaaaacgtgtcaatcacaatttttccatttaaaatcgaactatgtgactttattgatatgttaaaactgggaattccttcataacaaatgtatgttaattttggagcagattcaattgtgacactcttcaagtgacaattattaaagtttctttcttcaaaatgttcaaaatgttcaaaatggaaaaacttcaagtgttggctcgagattttaaggtgctctatctttaaagtatcgcagaatttcagagtaaaattctcaattggaggaatatttgaagtgagagcctcaaatatgtgattccttctaaagtaaattttgtccaataaaacaccttctagtaccaaagattcaagatttatggcatcaacttgaatttgtaaataatcatgatcatattcctgcttgcaatatagaagtaccaagaacttgaggctcaaactctccaagcaaacattcatgttattacctaagaaacaatatcttgttaactccaatttctcaatagatgggcaacccaacaagaatttaaccaccacttcttcctctgcattctccgaattccaaacgtcctccaatatcaaagtttttaagcatggaaaattaaatgaacaagaaaaatccaaccctacagaattcaactccaaaatagtcaaatatcttgcattatctataactttaggtaagcagtaattagactcaaagatacctttaccaaaattctctgggcctatatgaagtcttatttccttaaccttattattatcaattacaaaggctagccatttatcaatgatgacagccttctttaatttataataccaacatgtttcaagcttaaaactagttatggtgagtgaagaattgtcaacaataagatcatgcatagctttcttgcgttgttctaaataattattgacatcattgcaaaactttttatcatgatcatcatcataataagtataatggttatcattaaaaaagagtgtggggatcgaatacggaatggatttccaacgctttgaaagaatgcatgtcgaaaccacatctttagttgggagaaacgagagaatgtgatggattagttcatcgggaagttccgaaattctgtcattatcacaaccatccaccaccattgtttttgtcatgatcttaaaagatttaggagttgggatcgattgaggaaggaagagacccttgtaattgttgtataagtaaatatattttttttgaaggtttatgtatgtggcagataatgagcaatggagaatacaagagcatggagcacagagttgtggtgaacccaatgaagcaacgtctttctattgctgcatttcaatttaggtttctaattttgatttagttagggatatacttcatttatagggtttattttttgaactgattatgatttgtttattattattattatctttttttttaggaaattattattattattattatctaatttacttctataatttaaatttctgactttgtgatatttgttttttaaatttaaaaattatttatgttttcaaataattactgtccaaaatatgagaggagccattattactgtccgattcatttgaagcctcactctttatatcttcatctatatcattattactgtaaataaatttaagttgaaacaaaccaataaatacccgattaagtttcttcaattgcaaccaaccaaaatttaaattcaaaatctttataccaagaacatgtacacagattgaaaaaagaaacgagagagagcaatcgggagagcaagagctgatcgtcatcgtcatcttcgaagatttctttgatttgtctctgctcctccttgagcttctggatggcgacattgacgagctctaagttgggatcttctgaatccatggctctggttggttctcaataaatctttggatggtttttggtggccgattgacaacaacggggctggagtggggttagggctggccggagttagcagtcgggatgtggttgtggttggggttgtggtggtgctccggttgtggctggttggggttgggtttatggcatgagaaggagaagaaaaagaagaagaagaaaaagaaaagaaaaaaaagaaaaaaaagaaaaaaagaaaagaaaagaaaaagtaaaaaaaaaaaaaatctaatttttactttttttaatatttataatatttttttaaaacaatattacgtggaccactaaaaatttgccatgtgtacaagtgtgtacaactggacagttcattgtggcacttaagtgtgatttttagacggaggtgtgcagagtaaaatggaaccagggtttaggtagtttagccgccaaaaattcggtgtttgtggttaagtgttacaaaccgtaaagttcaagtggtttagccggcaatattccttttctcatgtgaaagtttatcctttttattaaataatctttacagggtgagtgaagaagtttacctggagttaacctcaattttattgttgcattagagaaaatttgttgtcgtgaaaatttgtagagttggctatgtgaaaaataagagaaatttgataatatgtaataatatattcattgttaaatttatgactttttttgtcaaaaaaaaaattatgggatttaaaagagaagttgttgtagatatgttaaattaatgatgtgatattgaatttatttttgactggaattgttttgttttaattttttttaatgtttttgcgtcagttcataactgaagcaaaaaacaattagcgtcgatgcactagttttttgcttcagttatgacctgaagtaaaaatcttttttct

SEQ ID NO: 221178 - DNA, 5348 bp, Cannabis indica
gcttgggtagggcagataatcttcggtaaaagtggtttaatccgattggcaatgatcttagaaataaccttatacaccacattgcagagagatattgggcgaaaatgattaggtctcttcggattttgaaccttggggatcaagacaatgttagtagtattgactcctttatgcatacgccctgtttgaaaaaaatccacaaccgcttcgcagaagtcagacccaacagaatcccagtagtgtttaaagaaaagaacagacataccatcaggacccggggctttattactactcatagcaaacagagtagatcgaatttcctcatgagagggtcttctagtaagatcggcttggtcttccgcagacaaacaatcccggactaaatcgttgcaattaagggcaatgccattgtccgttccagtgaagatgccttggaagaactccatgaattcattcccaataagctcccttttggaaatccacacattgtctctattgaggatgcactcgatggcattcctcctaccttttatggaagctgagaggaagaaaatttttgaacatttgtccccttccttcagccaagagaccctggctctttgtttccaatacacctctttcctcattcgggcttcattaagggtagcgcgcaaattccgttcagtctcccactgtctagatcccactggcaaactctgaatgagatcaagtcttctttccaggtcacgaatgagggtatccagattaccaaactgggacctattccaatgcataagagcgacccgagtagccccaattttcttgaagaccctagcaggggcccaagggaaatccaccgatttccacgcagaatcaaccaccaaattgctacgcacatccctagtccaggcttcctcaaacttaaagcttcttcgggtcttctcccccagaccatcagagaacagacacaacggtcggtgatccgagttggatgtttggaaggagcagagaacagccttcggaaaaagacgcatccaatcaccattaattagacccttgtctagcgcagacttaacatggttggacccagaacgatggttgtcccaagtcaacctctcaccctggataggcatattaatgagacccctggcattaaccaaacttgagataaccgggacaaactgatctctgcctttagacccttcacgctcagagtcgcttagaacaaagtttgtgtcacccaagataagccacgggcctccaaacctatccccagtttccattaaggtttcccagaaagttctcttagcatgaaagtacgggggaccatagacacaagaaagaagccaaggatgcgaaggaggatccgaatacacaataccagatatgtggttttgggagtaagcaatacactcaaactcaaaaccaattttccaagccaaaataatacctcccgcagtacccacagccggaacaataatatgaaaataaaaatggatagagtgaagagtacgtaccaaagccgtagcatcgactttaagctcggtcagaaagatgaaatcaggggatcgcgaccgaatcagggacttcaactcacgaactgtagaggtctgccctaaccctctacagttccaagcaattcctctcatggctcctgtggaggagattcgaccttctcctccacaggggtatgggagcgaacagaaacactcgagctagcatcctcgatcaagaaagagccaataagcggattcttgaacacatcatcagaccgactcacgaattccgaattgtcttccgatggtttttcaaaagcctccctaggctcctggtccttctcatgagagtcccaggggaaatcacgtataactccagggtgcatccgtataaatttctgcgatcttgcactaagagaagaagaggcatcatttaacttcctcttcttaaaaggggtagttctagcaatagtctcggaagtaggcttgccaccaatatctcctcccaaggccctgatctcatacaaatccaaattcctgaatcgtttcagctcttgaaaaagagtttcttgagcttggacttggacttgagcttggaagaaactcgataaagctctatcctcatcctgaagtaaatttgcatcttgcccataagtagaattgtctaattgattattgacaatagacccattggtcggccccttataataattagtggcattatagtaaataaaaaagtagcatttattataagccaaatttcacacaatgctatatcttattttgtgctaaatttaacataatttttagcatgtgccaaatttagcacactttttaaaactattagaataatattttttttaattaattgtgctaaaatatagcaatacaccacttttttagcactttattagagatgttcatattgtctatatattatgtggtgctcaagtccacaattgattagaaatagaattaggagagaaattcattcaaaaacaaggagaaagctagattttctttaggggagttttgtattgagttcactcaactgtttgaataagtttgaaagtcggtgttttacaaaaaaatatttgatttctataacaataattattgaatcgttgctgataatttccagtaacaacttggttacttgcgaacacagaatcagtacttgcaacagctaataattgcagaaaataaaagattataagtggtatcggtatttcaaatactactagtctacgagatcatactcagagagtaaaatcaattagtaaagtatcaaagattacaaattcaattgacttatacaaagtttgaatccctccaaacttttgtcgcaaccttttgtaatccaccttgctaatctttatttctgaaacacaccaagtagtaaaatctcttcagcccttgatgtgagctcacttccttccaaaatgagtcttagaaaaatattctcccgaagatatgtgttcatttcctcgtgaaatgagacttagaaaagtttgcacccaaacaccatgcttgttcaaagcttctcttgaacctattctatgaacaacaagataacaaataacaaagacacaaaaacttagtagaaaactttaggtttttacaaaagaagcactcttttcacaaaacttaagatatgaaaataagatactaggagagataagagaaaaaaggtgctctaggttctatttatacattatagaaaccctagagataacttgtacacgtttatacaacagtataaaatcttttctaaaataaaatattctttgacttaaatgttaattgatccgcaacaacaaattcaccatttgatgttgcaactcaatcagtatcctcccatgataccatctaagttcatgcacacaagaatgagtgtgtatacaaccaaaactgaatcaagtaacgaggagaaattaatgtcaaattaaccataatttatatcctttaatctaaaaaaggaatatttcctttctatgagaataatacaataaattaagattagccatataaaattaaatcaagtcatttaaacatttacaataaatattcaaattaaattaaaatatattgtgacaactattttgttaaaaaggtctaacaaagttgaactcagggattataagtgtgaaacacttgtgattgagtgttgtttctcttagacttgctcggagtgtgatattgtacttgaagattgtttgaacgaagaaagagaagggaaattgtggttctaaaattggagtaggagcacggctgacacaactttgtgtttgttttgatttcttgcattcaatttatcttaattttatgccctaaataaaacttaattttatgtttatcttaatttttttttatcaataagagaatataaattatttaattactatttcgtgtattagttggttcatatattactttcatgatcattatatataaattatattaactccctatcacattattattatttatgattatagtgttgtctatacaatggaaagtagttatgactctataatataaaccatattagttccgtgattaatcagtgcactggatttacactgacatgataaccagcgatgtaatttacttacatttctaataaaatatcaccctaagtgaattacctgtctacaaatcttatctagaaggcaaaatgaccaaatattctttatctacaaagggagagcgtgccctagggatggttcatttagatgtctatggacctctaaatgtatgagcctggggtggatacgagtatttgaaaactttcattgatgatttctctagatatggtattgtttacctaatgcataaaaataaaaaaacatttgaaaagattcgagaatttctagtgttgactcaaaaccaattaggtaaaactttaaagatcttgcgaacttgtaggggtggagaataattatatatgcagttcaaagatcaattaattgagcttggaattaaatctcaacttattgccccatctacttcacaacaaaatggtgttgcgaagtgtcaaaatcgcacacttatggaaatagtgaggtctatgctcagttattcaactctgccagtatctttctggagatattctttaacaatggcgaacgatattctaattgaagtcccatcaaaatctgttcccaatacacctgtataattatggagtggtcgcatgcctagcttgggccattacagaatctgtgggtgcaccgctcatgtcttacgaaataaagaagggaagctagaaagacgaactaaattttgcacattttttggtaattgtaatgagactaggggtggatactattatagttataaagataataaagtgtttgtttccacaaatgacatatttctacaaaatgactatatcaaggacatcaagcctcacatcaaggtagtactagaggaaatgctttcataattaactccaaccaatattctttcatcttccacacctgtagaagatgatcacactcccatggttgaaccaatgcaaattgagataaccgagaaaactttcactgaggttcctattcagagagtcacagtaacatatcgtagtgggatggtttctaggaacccaattctctatggcttggatggtaaaatcaaactaaaactattaaaaattcaataattaatttaaacaaattaagattttttcaagaaaaaatcaaacttatttatatttataaattcatatcttaaaaaataaaaaaaaataattaaagattcaataaaaatataaaattattttgaaaagagttagaaattaaactagaaaaaagttatgtttacttaaaaaatttagattttcagagaaaaaaaatagactcaagcttgttc

SEQ ID NO: 221179 - DNA, 3963 bp, Cannabis indica
aaacaattttttagttatgatgccaaactatgtcacttaatttctaaagttaagaaaacaactaaaattagcttctgaatttgttttcgagctaaaagttactgagtatctaactagaatatttttgaactaaaagtaactaaaattagtttctgaatatttttgaaaatgacctataaacaaaatttaaattctaaccaactacaacctatatatgttattcaaaagacaattgttgctatataaacaataattgtgatatattaatttgaagatgtaagagctaataacgtgtttgaccattttgtcaatacaagattagactgaataatttgtaagtctaatgattgaacatacaggaggtcttgataggaggacctaacatttataccgggtttggctcgaacctagccaacctaccagagcccaacccacgaaactcaaaacttgaagactgtctgtttattaacaggtgagtcgagttgaaccacctgttgtacacactgtagcctaagagttgaactcttaggctactagagtcgctccaccaccagtcgaagctctcattagtcacgactggtcgaagcttccctactcctagtctcactctttctcttcttgctcaaccttctctctgccactccctctctcccagctcactcccccactctcagcctctcactttgcaccactgttggagtctcacagccacctcgtcatcccattgtcgcagaagcaagcaaagagaagccccgagcctccattaagtttctttcatatctctttctctctttcactttcttagggcttataaacccatgtgacccgcttgtttaacctgcgacccgcagccgttaaattctttacaattgttcatgctaaaagtgggctttaggtttgttatgttaaaaaaaattaacaaaaattgaattcagtgtctattttgtactattttaaaaaacacaaattttgaattattatttaataaaaagtccaatcaataacttttgtaaaattttatgattaatattttgatattcgttgagtattattacttaaaaattgcaacgtcttacaataaaataaaagcactcttgggtttttaaaagttacgaagctattttgttgaattcgatatatgtttgtacaaatgtgtaacttttcaaatcattaaaaataattttgccactgttgagtttagaaccttgaacaaactacatatgatcaaccagatgaaagtgaggatgatgtcaagtcatcatgccccttatgccctgggtgagacatacgtactacaatagacgggataaaaactcacattcctgcgagtgtgctaactccaaaaagccgtcctcattttaccactccttgaagcttttcagtaaagagcttttgtaaagctcaaagtaaaaaacatggccaaccatgctcgaagtaagattgcacccaattgaccatcactacgttacgagtaagttactagaagtatctttacagtgcaaggattaaagatcacctcataccaaaaatagactagattttgataaaattcttaaatgcggctgaaatttgaaacactaagaatcaactgctatcgaataaaatatatccaagacaagagagatagctcaaatggttaggtccgtagtttgctccaacaactcaaggtctaaggtttgagtctctcccgagtacctacaaagtaattgctatatttttctagtcgccaaatagagttaggtagggataccactttagaccttgtattttgcaaaagttactaattgaattcccagttttgtttaattaaaaaatagaccttgtattttccaaaatagtacaaatagaactctaaactaattttttgtcaaaataaaatttaataataatccgatttagaagtgttatgataaaactgtttacattttttgtataggtttgtgttaggaattgtctccaagttgattatattaaaaaaattgtcgaaaattaaactcagagtcctatttttaccattttgaaaaatacatagtccattttgtcatttagcaaaacagagggtccaatcattttttttgcaaaacacaggatccaaaatagtatttacctttaaaaaaagaaaaatctgccatcaaatatcaaaaaataaattctactatatatctggtatgatcacacaatcaatttgtaaatattagaaaaatagttcaaataacaaaagggaaaaaggaaagaagaaaaaatagtttctgtgcattcttcactgatcaaatcaagtgtttcccatcagagtaccctcaaaattctgttttaaaacaacaaatgaaaaagtgaatattatgaactcaagaatgggaacgtaaaagagacattggcattggtaagaaatgaatgacttaccagctattgtttaattttcaaagtattttcgattcgttggactaactgttcaacaggcatagcaccctcctgaaaaatgagaaaactggtatgaaaatcgtttctctgtttcgctcttgaagaatcaaatgaaaatctcattaaattttataatgagtttaaacttcgtgtttaaagttagaccgaccgacacacttgcatctttaatgttcgaaacattaagctgcctgactgatcatatctaaatgcattgaaattgattcttaacaaaaatgaatataaaaacaaaacagatttgacttacaaagcgatcgaaaggctccccgtccttgaatatgatgaaagtaggtaatgcctctatcttgtatttgttagctatgcttgggtacttctcagtgtcaattttaaccacttggattttatctttcagctcagcgctgacttcgttgagaacgggaaccataaattgacaagggccgcacctgttaaaaaaaccattttgattagtacatcattttaaatttagaataaataaaatttgtccccccgaactatgactcgtgtagagctttgcccctttaactttttcttttgttgcgagattgcccctaaactaaaagaattagtgcaaatatcttcttccagttacattctgcttatttttttaaacaatttgttgatgaagcactaatatgaaattaatctaacctagttcaagagaccaaacgaaaaataaatgcataaataacaatctaatagtgaattatagaaatatgtatatgcattcttagacgtaacgtttgtatgtctaatgcaaataaattagatttgggatagcttaaaattgttaaatagaccctcattctgcactatagctgtaactcacggtcacataagcaaaagattataaaaaatgaccaaaatgtaattgaaagggaatatttgcaacatttgtaaagtttatattttcgcaacaacaaaaaaaaaattagggacaaaactctacgagggtcatcgactcatagttcaaggaaaaaattctatttattcttaaatttattacatttgttctaatttctaaatatttgcgtctgataaagatcctattcgcctaccagcttaatattttaatttacaagaaaaaaccaagacagatgaaactgccataggccagcaaactaagttaaacaaaaaatgttcttagttttgtcctgtcctaaaatgaacatcttgtccctatgtctaggtgattccccaatctttttcccttctccacttgggaatggaattgtatgatcatatgcacatttttataatgtcatttataagaaattagaaaaaaaattctcatatcctctattagatgaaggattaatgtagtaattagtaatatataaaatgtattctataataaattagatggaaagagcttaccaggttgcatagaagtctaccagcacaggtttgtctgagttaacgagcaaatcatcgaatgaggaaaatgtttgtttcttggctctaacctataaaattaagtttaacacaaaatacataagtaattat

SEQ ID NO: 221180 - DNA, 2996 bp, Cannabis indica
ttctaagtgatcttaatctaaaataatttgaaagtctcaactctaaaccaatgtaagatttactatttatagatgtcggtttaggttgttaggaagctaacaaagttagttagggaagttgatgatgtggcagtccaaagatccataatgtgtcttaattataacaatttccaccttaattgagacacattgaggattttggacttaagcttcttcaatgtttagtaagtttaaacagtgtttaaacttgtcaagggtgacacattttgtgagcatatctgctgggttgtgatcagtgctgatctttctaacttgaacttggttgctggagataatgtctctgatgaagtggagccttatatctatgtgtttagatctctcatgatgcataggattcttcatgagatgcagtgcactttggttgtcacagtgcactgttgtgtcttcagcatttaaccccagttcagtagtgattccctttagccacagagcttctttaatggcttcagttgcagccatatactctgcctcagttgaggacagagcaaccaccttttacaatgtggccttccaactaacacagccaccaaggacagtgaatacatagccagtaagagacctccttgtatctaaacacccagcatagttagagtcaacacaacctgtgacaatttcctttgtaaaagactcatttccaaacttgattcccaagtctagagtgccttttatgtatctgagtatccatttgagggcacaccagtgttgctgtccaggatcggataagtacctactcaccatgctcatggcatacccaatgtcaagccttgagcaaaccatggcatacattaaacttcctaccacattggcatatggtatgttgtccatttcagatctctctttctcagttttgggagattgatctttagagagtctaaaatggtgagctaagggagtagatattggttttgcattttgcattccaaacttatttaacaccttttcaagatatcccttttgagacagaaagatggtgtgaggtctctttctcttaatgtcaatccctagaatctttttggctaattctaggtccttcatttcaaactcattattgagtttgtctatctcaggtctacttttgccaatcaaaagcatgtcatcaatatataataatagatatatatgctgattaaagtagacacatggatcatacttgctttgactaaacccaatgtttttcataaactcatcaaaccttaggttccattgcctaggtgcttgttttaaaccatagagagatttgagtaggagacatacttgattaggatttccattgtcaaatccttcaggttgagtcatgtagatcttctcatcaagtgtgccatgtaggaaggatgtcctaacatccatttggtcaatttcaagatcatactttgctacctttgccatcatgaccctaatagatgtttgtttaacaacaggtgcaaaaatttcagtgaaatcagtgccttccttttgtgtaaagcctttggcaacaagccttgctttgtacctgacttcacttgtaccaatttcatcctctttgtgtctaaatagccatttgcacccaacaagcttttggcccttaggtttgttaaccacaatccatgttctatttttcttgagtgacagcatttcttcatcaatggccttgttccatttcttgctgtctttgcaagtaatttcctcttgaaatgtttctggttcagagttgtctaactcttctgcataagcaagagcaaacgttgtgaagtcagcaaaaccaaacctgaaaggtgccttgtgcactcttcttcctctatctctagtgagatgataatcatcagcttcaatacctgcatctgcaccagttggctcatcttcttgagtctaatcagtgccttattttgtttgatctgcagtgtcaggctccacctcaactggtttgtcactagagttttcttctggttttgtctcatccttagacttcatagccatttcatcttctctgaaaataacatctctacttaataggcatttcttgtatcctggttctaagcaccatagcttgtaacgtttcactccttcaggatatccaaggtaatagtacattttagagcccttggttagagtttatcttgcttaatgtgggcatatgtagtgcatccaaacaccctgaggtgatcatagctaggtggatgccctatccatttttcgtgtggggttttgaaaccaattgcagcagagggacatctattaatgagatagcttgctgtcttgactgcttctcctcagaatggtctctcaaggccaacactatgcaacatctatctaaccctttcagtaagagttctgttcattctttcagccaatccattctattgtgggttcttgggaactgttttgtgtctgtcaatgctctctttcctgcagaaatcactaaattggttagagcaaaactcaagaccattgttagtcctgagtttcttgattgtttttctagtttggttttcaacaagctttctccaagtgacaaaggtgttgaaagcttgatccttagattttagtaagaaaacccaaactttccttgaaaaatcatcaatgatgcttagaaaatagctggcacctcctaaagttttgatctttcatggcccccacaagtctgaatggatgtaactcaaaggttctttgttggtgtgtaaaccagttgtgaattttgctttgcaacatttcccatagacacaatcttcacagaaacctagttttccttcaagttttctctttaataatccttgtttctcaagctcttgaagacccctttcactcacatgccctagtttcaaatgccatagcctagtttgatcaattccttgaactgttatagcaggacttgcatttcccgtaacagtttttccaattaaagaatacaaaccattcttcaattcccctttcaccaaggtggagttctttgaaattttcaa

SEQ ID NO: 221181 - DNA, 3035 bp, Cannabis indica
ataaaacccaacataaagatcctatgggtccagatggagaagaaatggcttcactggtagatgtggtagagtaagatgaaattgaagatcccatgtacgaggaaaactaagaagagtatgaggtgtatgatgatcgtagctatactgaattgatggtgttaagaaagaaagttgctgactatgaggctgagttggcaaagcaaaaggagcaaaatagaaggatgcaagagatagtgatcgccatgcaaacaacgatggaagttgtaggcattcacgttcatttgaatgtgggacctcttggataagacaagatgagagaaggatctttgcagccattggggaatcaaaggcacaagaattgggagctaagccctatctgatatccttccgaatgtcccccgaaggaaaaccctacagccattctagaaaggaataaaaaagctcaagatccacgtaatgtttgctccaatctccctaagtaaaaggtccacagagggacagattttcgaagggaaagattagtcctcaagaccgggcagatcggaagagcatatccttgcatcaagagttggaggagagaaaggaaaatagcaaaatggaccctccagtcaatttaaggcaaaaagtcaacgccaaacacggtgatcttaaggatcgcttagagaaaaaaacaaaaaaaaaaaagaaaaccataccagtctcagataacaccctaaataaaggaatcatggccgaacttactattctctaaaaggacatatctaaattctcccgaagacaaaggggagatgattcagaatctaacttgaaggattggggaccttgtgctagaaacatttgaagagctcccaaagaattttaaaatgcttgaaatgaccctgtacaccaaagacacagatcctagtgatcacatgtcaaaagcttctctgcaatggaaaggccacaaacaaatgggcaagcagaagccgtcaataaaatcctcaaggtcaccctaaagaaaaagctgttggcctgcaaaaataattggcccgaagaatttccaagagtgttatgggcctaccggaccaccccaagaaccacaaccggccactcgccgttctcaatggcatacgattgtgaagcaatggtcccaatggaaacattattctcatcccataggaggacaacttacgatccagcagcaaacaagactttattacaagaagcgctggggacgggccttaagtgtctccccttaaaaaaaagataagggcctaaggacgggccttaagtgtctccccttaaaatatatatatatgtatgtatacaagtaaattgtcttaaagaggggagaaggattaaatatgtaaggagaaaaagaaaaataataataatgatagtggtagtggtagtgaaaaaaccagtttaatcaatccgaggcagaagacgaagacccctgcgctcctccatcaaggcatcaagtctcttcttcttctcccagaagcggacgaggacctcctcagtcttgggatagaagtcaagcttaaggttcttactgttagtctgtcaggccatgaagacaccgtcgtcaaaacgtttgttgcagtgctggcaggtaacgggggccaggagctcatctctttttgctttcttttgagcttgctccctaaagtcacgcagctccttcgcctcaactgtcaggttggctgtcttggtccagctcctctaaggactttagcctggcagtcagttccttaactgcctctttggcctctctaagctcacgccttgccttggtcacagcctcatcaatgtccttcaaggcgtcgtcctttgccttcaactccaccttggcctttaacgtctcctggtgactccgctccatctgagcctccctttgctgagcctcctcccggatagctttcctctcggtcgccaagtctctcagactcttcatggcctcatccatgcccccgaattcggacatgatgtacccatggtcaattaaagtttttgagaggcgaccagtctctgtagcaagtcaaggtcacaatcttttccagctggtgggcacaagtcaaggtcgagcgaagttcgtccgcctcccaaccattcgatcgacaggtgtagttcttctgaacaacagggcccttcatcacttcctctagggtagcaagagtaactgcccccttacgggaagatttggttccggacgcagaagcaaacatttagttctgtaaaaggaaaaatccagcacttagccctcaaaccaaaccctagtgttaaaagtgggaatgggggtcccctaaccgatggaatgaggccccctccggatgcttgccaaagatggaaattctaggaattttcctaggcaaacatcaggtgcaaatatctcaaaggcagcgaaagcagaggaaaaatgaaagacagaacgtgggaacgaaaactgtctcatatcttaaacaatcttccaacagaggggtctatcgcaaaaatagaagaaagagaagtagtaaaacacaaattagaagagggtatatgcaacaggcgactgttttcgccaaagttatttcccaaaaatcaagcacttaaccaaaagttctaccctgacatgcaaatgaacaacaaaaacataaagtacccagaagatttacatgaaggttgaaaactggggattggtgttgatcgatggtagaacgcagactgacagcgacggaggaatattagtaagaaatctatggtttctggaattttctctcgaaagtgttcttgggatgaaatggcgaagtggtgaaagtaacccagtgaaggaaaaaggctggcttttatagaccagaacgaatgcaaggcagctgtgatcaggcgccatcgtacggtcagaatcgtaatagattcgcatttcgctgatccaacggttgggataaacgctcatcagggcgattaaaaacgcttgagtaccttttctgacaccgattaaatgcgtcggatcattaatggatgagaagcgaatcgttgcctgcaaaaggaaataaatattaatgatgactgccataaat

SEQ ID NO: 221182 - DNA, 1965 bp, Cannabis indica
tatatatatatatatacagtagaacctctatccaagaatacacttgggaccaagtaaattatattctaattgggaggttataactaaatagagttacactagaaaaaaaaaattaaaaaaccaaaaaatatcaatgtaacaataataacaataaataatcattaatactatatcataatagaaatattttagagtaaatataatttcatacatgtattataatttaaaataaaattattaattttacataaataaatttacaaaatacatgtatatattttattaagatgtaattattcttatatagaggtatactttgttaatacgggacttaaaaaatgtataactaattacaatttagaggttattcttatttataactggcccaaatcgggacttgatttttttataacaaattagaggttattcttgaatagagtattcttaaatagaggttctactgtaattatatatcactatatataccaaacctatcactatttttctcatattatataagagatcacatattatactagtgtttattgtgtgccaccacaattaatatccacagcactggtttgagtagataagtttagttgacatgtgaaagtttttttatttctttatttataaatagaatagtttacatatacttcttaaatagttcttgagagacatataaaatttattcctaaactatgtggtatcatcttatacttaaattttattttataaaaataagaatgagagttttaaaaatatatttattttattaattaattgtcacattttaattaagcaaaagaagtttttttattaaacataaataaaagtaagtttaatatttgtaacacttaattattaaaaagtagcaaatagtttggtaatattggtattagtattagagtaggtctaaattgaaaacatttcaaagtaataaagggttttgggtaaatagtaaaagagatctgaccgattacaattttattttttttgaaacaactcaaccatggttgtcgtcgcgttgccacctccacctttgccggaaacaaaaaaataatgagaccagtagcatctttgataaaccggattgagccgagcaacgtgaccaaacacatgattcatcttcctaagcttagctttacatttcctgaagtaaattaatgaccaatttttcttatttggctctactcttagctttacaaaaggtgaatttacaataaaaacataataattaagaaacaaaagaagctcactttcttacttctttaattcttattacattttaatagctacttttaattgtgcataatagacatagaagcattaactattacacaaatatataaatatatatatatattgctagctagaataaatttgttatacataatcctcaagataacattataacatagtgtagtttactatggattcagttcaatacaatatatagctttcaataaattgtaaatgtgttgttgactcaccaaaaaagaagaccaatacgtctcaaaacaacatcttggattacaatgggcggtcaagacgaactggtcttcggtcaccattctctcggactgtctggtagcagtaactgctctgaaggggagaagcttgccggattggaagctcgcgggtgacttcttcaaggttcttgaactggcagatctattaagttcctgtacttttttacatgttaagcgtgattgtatttttggtgtgaatgatctagctgtccaagctagaatgttgagaattgttgactctatctgtttaggggatggattgccccctgtcaatcctattttctttgcttaatctaatgaactgaggttctctttcaaaaaaaaaaaaaggcaacattggcgcaaaaaaaataaagaggagaggtataataataaggtggatctatctatatcccagaattattattatgtttaagaaaaatttacaaaaata

SEQ ID NO: 221183 - DNA, 2195 bp, Cannabis indica
ttaaaattatacacatataatttcataattaaaattttgaaaaaaatttagtacacccttaaaaaacaaatttgatataccacctatttatttccgtatatagaagaattttttattttttttcggtacttaaatgtatattgagaagatattagttttaattgtatgtttttagaaatttttagtttaaagtttaaatataaattaaatatatatctttattaatagcttttacaatcaattgtggggacttcactttcccaaaagatcttgtttctagcttttcaaacatactacactgatgcatttcgagaaatgatcaacattcctctttcggcttatatttttcctttggatccaaaccattactcccattaagttctgctaatgtgttccacagttcaggctgttcagccatctaaaagtttcattgaggcaacaagcactaaaatgacattggaagaagagatgatcatggctttcatcatgcattccttataccaagaagcttttatccacaaagagattaaacttagataacctatttttagtttggaatcatttccacacaacaatccaaacaatgaatttatattttggtatactaaacctgtgccaaatttcatcatgccactttgtactattattaaaagatgttaactttgttaatgtgctgctattattttttttttcggttactgctctattgttttgggtcattttctaatgtggttcgatcttaggtggtggtggtacttttctacattatgtgttatggtttttttaagaaaaacatcaagataaaatataaataaatatcaaaagtgtaggaaataaagcagtacccaaaatgcccctacactaacaccacaaagtacaaaaacaaaggtcaatcttgacctttctctcttgtgcggatcaagagagtttccttctcaaaactctgccgtttaaggcagtataaagccacctttatgcagcagaaaaccctagctgcataaacagtccttcctctaaccctagcaagctgaagccccctttctcttcttctcttcttctagcttgaaaccctagcagccactcctcatcatctccttctcttcttctttccaagcttagatttaagagcttccaaaactaatccactactgcatttttcttcctcattaagcccttctaatcttcttcttcaagctctatgagagctttctaacccgagcctactgctgctccttcgtacctgcaagacacacaacaagcaacccgaaactagagaaaaactaaagaaaaaccagcagaaaaataaaataaataacacaagaattgatttcggagttccctctaaattagaggtacgtctccgtcaacaaccctcaaagttacttgaatcttctctatcaaaatgaataccaggttacaaggaatttggagattccaagctacaaagttagctagtaatctctatggctctttctctcttttcttccttttatgttctggtttgtattacaatatatatctctaaccctctttctatttttctctcttgaatgaggttatttcttcatgacaaaggggctggtacgactctccttggctgggccaaaaaacacactgtcaaaatgggcaggttgctcccttatatattgttgttgattgcgatttttgttgtgttgtgagctgagaaaaacagttagaaaactgttattgtttattccttgtgttgctgaaagttttttggaatcttgaaagttgttatttattttcttgtatagtagagagctaaaagattttagcttatgaaacagaaccgactactccaagagttataattgtgtgttgaggcttgtaaaaaaaatcttattttattttccttgtaacttgtttaaggtattttcccatgtgacagtaagtatggagatttatccaacaatttctacctaaatttccatactaacagtccaaaaaagtctttgcctttgttgtatttatttgttgctgtctttgagggtcatagcttgattaagtttccattcaccatcatgtgtcaactcccagcaggtttatgcaatgcttgaacttgttgagagtcaccaccttagttcccatatctgctagattctcctcagtaggaactttttccacttgtatctcaccttgtgttaccttattccttataaagtgatacttaatct

SEQ ID NO: 221184 - DNA, 2132 bp, Cannabis indica
tttttaaagatgctagtacgttttgtgaaggcatgtgatcgttgtcagcgcacaggtaatatctcaaggagaaacgaaatgcctttgacaggaatcttggaagtggaattgtttgatgtgtgggggatagacttcatgggtccttttccttcatcttttagcaatctatacatctcattggctgtggattatgtgtcgaaatgggttaaagctgcagcaacaccagccaatgatggtaaaacagttcttcgcttccttcaaaagaacatattcactcggtttggtactctccgagcaatcataagcgatgaagggagtcacttctgcaacaaatagtttgaagcactcctctcaagatatggtgtacgtcatagaactactctaaagtatcatccgcaaagtaatggccaagctgaaatttctaaccgggagataaagatgattttggagaaaacagtgcagagatcaaggaaagactggtcaagaaagttagatgacgcactgtgggcctatagaacagcattcaagacgccaatcgggatgtcaccatatcggttggtgtttggaaaggcttgtcatttaccggtggaattagaacacaaggcgtattgggctatgaagactctcaacatggatttaaaggttgcaggagagaaaagattactgcaattggatgaattggaggagtttcggaatgaggcttatgagaacgctaagatctacaaggaaagaaccaaaaagtggcatgaccgaagcttagtcaggaaggagtttcaacctgggcagcaagttttacttttcaattcaaggttgaagttgtttcctggtaagctaaagtcaaggtggtcagggccatttacagtggtcaaagtgtttccctatggagcggtggaactgaaaggtgaaagccccgacactttcaaagttaacgggcagcggttaaagctctacttgggaggtcaatttgatcaagccaagtccgccatgattctggcgccactatgaagaactcggtcaacgtctagctgtgcgacgataaagacagcgctaattgggaggcaacccaaattttctttatgttttagttgaactttcttatgttttagttgttatttttatttttgttctttttagttatgttcatagaactggtaaaacaattttggttttctttaaatttttgtactgtatataaaaaaaaaagaaaagaattttattttcaaggtttggcccagtggccgtggctagatacagcctggccgcaaccatatgggacttacagagaggccatttttcgagaagtatctggccacggccagattgatggcgtcgcggccagatatcctgggcagagagaggtttatttcgaaggcatctcgctgcgatgatgaggaggcccaccgcggccatataacctgggcagagagaggtttttttcgagctatctggccgcggcgagatatagtctagccgtggcgagagtgtcaaatgggtctttaagaggtaataaatcacacaatttcaaaatcaattctttctcaaccctaacaacaaacaccaccgaaaaaacctctcttctaaccattttttctccatctcatcttattctaacccttctctctttaactctaaccataatctctcatcccaaatcattctaaaaccttattcctctcatcaaacactcttttcctttcaaaatcaaccccaaatctctaaaacctcaccaaaagttcaaaaaccactattcatcttcttccttctcaagaacttcaaggtttccttcaatggaggttgaataaaggtggattctcattgaggtaacaattctaagactctctatacaatttttggtggataaatttgaattgttggaggattttggaattttagtgtgattttttgggatttttgctcaatacattgttcaatagagttgtttgtgattaggaattagtttgtttgtgattgggttaatactcgggaagtggaattttaaggggaagtgctgccaaaatttttacaaatcttaagtgttagaatatttggtgagatgggtcctaaaagagctagagtgggtgagagaggggagctttatcatccaacccacctaggggtcgctctaatgttga

SEQ ID NO: 221185 - DNA, 2104 bp, Cannabis indica
ctctccaagtcattaaactttgtccaaaaagataatcttaagctctcaagtcccgagctctaattatttagtcaaatcttagatattgctcttacctataccattaaatggcaaaataattatcatcattttattctatattcaaaaccgagtccaacgacatataacatgactatatttaaaatttaaagtttcaaaaccttacctaagcggtgcacattaactatcggtggcaatagaaattggtgtactagaaacatcactgaaaatagaggtagtatatatatcaaaatgacaacctcaacaagtagatcacacccatgccaaccatttattaaaattgtgcatgatatcgctgaaaagttgccagaagagggcagagctacaaaatcgtcgctgaaaaaagtagcggtctaggtgaaatggcttagtgcagattgttctcctcaagaagctaactctagtggtgaagacaactcatcaaacagacactagaggttgccaaaaaatctattcaaagtttgaacctccaaactttggctagtgatcctgggctaacgacgttaaaaggggtaccgccacttgggggttgaggtcgtcggcgccgtgggatttgaatggtttggcacatggggtcggatgatgggcgaagagtggtcaccaaaaagtggtggtggtggtggttatggcttctttgaagctttgaagagaaagagaaagagaagtgggaaagggagagagagattgtctggtgggaaaatagggggaaaggggtttattaactaaaataagggtcccaccatatttatgaaatcttttttttttcttttgtctttttgtttactcggtcaaaatcgagccttcacagatcataaggccttctgatagaaaaataataggttgtaaatgggtctatagatacaaagaggagatcccaagagttgagagagcaaggtacaaagctagattggttgccaagggcattacacaaaaagaaggggtgaactttcatgaaatttttgcaccatttgtgaaggatagatcaataagaatgatcttggcaatagtagcaatctaggacctggaacttgaataaatagatgttaagactgctttcttacatggggaatcagatgaggagattctaatgaagcaactagagggatttgaggttgagggaaaagagaatcatttgtgcttgctcaagaagctactatatggactcaagcaatcaccaaggcaatggtacagaaaatttgatgagtatatgatcaaatcaggtttcaaaaggtgtgcatatgatagttgtgtctacatcaagagttctaaggtaaagtcaacattttacttattactctatgttgatgatatgttgattgcaagaaagtatatggaagatatcaagaaggtgaaacagatgctttgtacagaatttaaaatgaaaaatcttggaccaaccaagaaaattcttggaattgagatatgtagagacagaagtcaaaagaattggttctatctcgagcatggtacatctcaaagctgctcaacagatttggttttcaagatgccaaacctattaccacagtattagctcaacatttcaaactgtccaacatgcaagcaccctcaacagaagattaatccaagtacatggagaaggttccatacacaagtttggtaggtagtattatgtatgtcatgatttatactcagtcagacatgttatgcaatgagtatggtcagtaagtttatgcgaatcaaatctaggaattgagcattggaaggctgtcaaatagatgatgaggtatctaaagggaacatctactttgggtctaaagtatcattcagaatctaaaacaccaaaaatcacaagatatgtcgactcagattatgctggtgatttagacaccataaggtcacaaattggctatattttttgcctaaaaaattgtacaattagttggaaagacaacttacaaattatagtggctctatcaacaacagaggcagaacacatagcctatactaaagcagtaaaagaagctttgtggctaaaaggaatggcaactgactttggcgtaaaatagacacaaatgcaagtgtt

SEQ ID NO: 221186 - DNA, 1437 bp, Cannabis indica
tcatgtttaatttttttctttttgatttggtagattattttcttcttcgtgactatttcccatataagttcgtccctttttagattaaaaaaaatccagccagtccagcccaactctcttcttcatcttcttcattcaccattgtttctgcttttcttttcaaaaattttatagtctctcaattgggtctgactgaattaaatctcacttttcctttttcttaggtatatctacatcttcaattgagtgcttcatcaaatcaaatcaaatcaccattaaataagagataagaattccaatttacacttgatctttgtatggattatttaaatttttaatttgatttgccttgcttccttgttctgtttaaatgggacattattaaaactatgattgtttggttttcaaaaatacggaatagatggtagttttttactaattatttagttacttttactacttacatatttaattcaattttgggatcatttgctgattgaagacgaggttgagaatcatgagaatcatattggtaatcctcattaattggacttttatgaagtagaaaacatcagccttatatcataaattatattttattggcaacacttgcagaagataagtttcatgacaaggttaagtcattccaagtttgtatcatcctatacaaagatgtaaatttggaatattactggtgtataaataagactgcaatgcaatgcttcttttttttactggttcatatgatactcattctattccattaatatttttttgctgctattttaattggtttataatcatgtattgttcactactttatataaaaaaaaagtttatactgatggtgtttttattattacttatagcagatataaaaatttatgaagcctcttcaagtgcggtatttctactcttggcaatttcttttcttatcatcatttcattcattcaatctattcaatccatttttcattttcattcatcaatgtcttttaaagattctgtttgttagggcgaaagggtgttagaaattcattctcattcgtgtggttttctcttatgtgctttcaatgtaggaatctgatgtaggatagaggaaggcaagtaaaagaaagttgaggcatggtgtttctacatgcccatcaattctttctccagaattacaatcccaaaaactcaagaaacgacccaaaatacaatcttccattgacaaagtatttacttgtggttgctattgcgattgttgaatgaaattcgtgtggatctttttgagctcaaggtgtttctttgtatttctcctattacattgctactgatatctctacttctgttaagtcacatttcagtgagttgtaacttgagtgttattgtgtgtttagtagggaaatatggtctacatttcctaggcaggaggaagcgatgaagttttccaag

SEQ ID NO: 221187 - DNA, 1510 bp, Cannabis indica
gacaaatttgcgaagttgaatggtcaactttgcttttttaatgccgcatacttttaagtttaaacatcaacatgtggatgttttcttgcgtttcatgcataaagtttactagaggtttccattgctcgtatttctttctgacgctaagtagctaatgacctattttacttgcaagcatcttatctgccctaccctcgatctgcgagcagtcattgattttgccttgcgatgatcttatttgaagaaaactcaaatatatttttaatgactttgtcactttgtatatatctttatttttcacatgggtagttagatcttctacccacgtgttaggtttaagtatttttcaagatactttgatgtctcgtttaatactttcctttagcgcgagccgttagtattcagctttatgcgggttatgagttatatctcatttatgacttttgattttcctttctcggcagataggttgtaaaccaaaaattatagttgtttgatccctttctcgtcagaaaggtttgatcaaggcgttataacgattcgacccctctctcgtcaaaaaggtttggtcagggagttataacaattcgacccctctttcgtcaaaaaggtttggtcgaggaccttttaaaaagtttcaaaatttttttatgtttgaagtgatgggtttgcattgtactatgtatttccagattaattccagttgaacatacatatatggccctcaagtaattttaaagggtttatgctttacaattacatgttgaaagaaatatttattttattcacaaccgaagttcaaaatattacatcagcgaggtgatttacaatcattaatctcatcataacttcgccagttcaattgtttattttatcaatcttctagaagcatctagttttgatagaccgggttttgatgtccagggtcaatccctgacatactcccacaattgttcaaatatctagggtcaatccttgtcatatctcggggttccaagtaatctacccctagttttatcagtttgtctttaaatgcttctggttcacgaccatagcgagccagtatttacttactttacaatacttttatgtaattgctttaccgaattaactaccccttatcttcttgtgagacattccctctcgatataaccgagttatctcttcctccttcaaaggaaggttatgatccctgatcacttgagttactaggcatatcgggctgatcatgggcattgttctgcccctttacatattgttggacgtgtcctcgcgctatgagaccttctatctcatctttcaacttacgacactcttctgtggtatgtccaatatctccatggtactcacaccattttgttgggtcccttttacttctcgcgtgtctcataagttttggctcactaaaagcaacttctgctatatgtgcgaggtagatattttctcgagtttcattaagctcggtatattcaacataaaggggtatatatatatttgttgtgtttcttct

SEQ ID NO: 221188 - DNA, 3132 bp, Cannabis indica
aaactcaagactactcttcttgcctggggattcacagcctctcgagcagattcaacattgtttatatatggttcgggtaagagtttaataatttttctagtatatgtggatgatatacttattactggccccaatactaccttaatcaccaagttaatagctgatctaaatcagtgttttgaactcaaagaccttggtgctattcactattttcttggtgttgaagtctgtagaaccaaagaaggcttttatttgtctcaaagcaaatacatctcagattttcttgttaaggttaatctagatgaggctaagccatgttctaatctcactagtactgctcacaagctttctctttatgaaggtactgctcttgaagatcagactttatacagaagcacattgggtgctttgcaatacctgacccttactcgaccggatgtggcttttatcatcaataaattgtctcaatttattcatgcaccaactactgtgcactgggatgcatgtaaaaggctactcagatatttgaaagggaccattaatgagggattaattctgctaccagcatctcggctatctctgcaagtatactccgatgctgactgggcaagttccattgatgacaggcgctccacaggtggttatgcaacttttcttggaccaaatttgatctcttggtcagccaaaaagtaacaagtagttgcccgatcctctactaaatctgaattcagagcattggctaatgcagtagcagaaattaaatggctatgttccttgctgtctgagctacatatttcctcacctgatgttcccataatctgggtggataatcagggtgcagctgctcttgcagccaatcctattttccatgctagatgcaaaaagcatatagagatcgatttacattttgttagagagcaaattctgagaaaagaaatatcagttcgccatgtccctagtgttgatcaaatagctgatatccttacaaagtctctacctaaagaaagatttctttatcttaaaagcaaactcaaagttctttgtacaccttttcgtttgaggggggatgataaccaataaacacacgtgtttgttggtttagttttgtctgttattttctatttcattggtaacagaatctgttattaacagattactgatcttgtaaaatctttggtgtataaataaaaggtgttctcctcagttttaaccaaggttcttttctcttggttctgaggcttttttctctctgtttgttactctgctttaaagctttcacagactaactgaatactcaactttttatttcttatgtagacataaaaacttagttccattaacacttgagaaagcttataatttgtttgtaagaattgatgtattattaaattttttatcgcagtccgtcacaaaataaaataaaataattatcagtcttgggttaatttgagttattttcctacatcatgtttagctttgaataataattaaacaaataatatgcactactttactaatcaacattttcatgactattatagataaaagacttggtcaacaatcatttattaaattattagaacaaaatcatatataaactttcaattacaagtgtacgtacatgatcaaaatatagataatacctcatcatttctattaattaactatttgctccgctcatctttatatatgtaattatttgtttcctcggaatatatataatatatgtatattaactaacctccaccaattttagctcacaattcgaatgcaagtaattgtaaactctatccctctctcttttcaaacattcctcagcctaaaattttcactataatttttataattatgcaatcaacaaaaaagaatatacatattgtacatatgacatgatgagtagtgcgatagaacacctttaaaatgaaatgtaattaggataagaatcctccaaaatccaataagaggctttaaaagaataataccactgtccagtagcattagtccctcaaaatcatgttcaatacgattccatttgtctcattccaatttcaactatccctcacactctttgtccataacaagaataggaaagtaggatttattatttagttattagactgttaatttctgtttggcactaccgttatttcagttggtagttataacaactttctgttgttatctgctactggtttttacgctgctttcttgtatctctgttcattaatcaataaaatctttccttttgctttctttcatttccgcaacatggtatcagagcaaggaagttatgcttcctttcggtcttgattacctctgttcctccttctcgccgtgtcaattttcttcttctccggcgacggtctgtgtctgcattgaagaattcatctcttcaccgacacaggtttcctttcgacatttctcttcctatcatggctacaaatgatcaagaaataaggtcaatcgatggagattcatctcaaatcaacaatggtggtaatcaaaatcaagctacagacgctggttttaatgttcagatggtcagatcaagaagaccgatcgaggatcccccgatccatactacttgcatcacggagacaaccctggtaatgtttttgtgtctcaattattgactggacaggacaactacattgcttggtgcagagctatggagcttgctatatctatcaagaacaagttggaattcttgaatgggtctatttctaaactccctatcactgatcatattctttacaatgcttggattcgtaataacaacattgttatttcctggattattaactctgtttcaaaagaaatttcatctagcatattgtatgatgagtctgctgtagcaatctggaacgatttgagggttcgtttccagaagaaaaatggagcacacatctacaatctaaggaaggacttaatgaatctcagactagaaaaccaaacagtgagtatgtattttaccaagctgaaaactgtttgggaacaattgtccaatttcaggccaaactgtacttgcaatgggtgttcttgtggaggagtcaagaaattgcaagaacatcacaacatggagtacatcatgtcctttctcatgggactatccgatctttatgctcaagtgcg

SEQ ID NO: 221189 - DNA, 5285 bp, Cannabis indica
gacaaaagtccttaaatttaacaatttcaataattcaggggtaatttttaacggccaaaaaaattcaaaagcacgattcggtacatgtgaaagaaaaataactaattagccttaaaactacatatctttaattgtttaatatatatacatattaaaaataattattattattagagaagacaaccggagcttttttacatggttcgaaccttgcacgcggtaaacagtcacacacaaaacaactgatcatccaaagagaagaagaagaagaacaacaacaaacctttctctcttctctctctctctctctctctttccccatattcaagtcttgatccattattattattattattattattattattattacaatcaatggctccagtctcagctctcgccaagtacaagctcgtcttcctgggagaccagtcagtcggcaagaccagcatcatcacccgcttcatgtacgataaatttgacaacacttatcaggtaccccagatctcaattcctttacttcacattccttctttctaattcccctttttttcctcgctgcttcaaatcggttcgattcttttaagatttgatcttgttttgttattccttggtgattttgtgatctttctatgtctttttggtttactatagaagttagaaagaaaggtaaggatggcgctattagatcaacaaaaaaaacgtcgaaaattttattgggatgatttcacagactttgcataatttcataaatgaaatggatcgtgtcaattcttttgttttgattaaggagagttctagtttgggttgttcttttatctaccaaaacgatctattgttttaacaaagttgttgtattcgtcaacacatttaaattgaagaaatgaaagtttatgagcttaattacgcgtagatgtatgctgatttacttgttcaaatacagtgatgatgtagtttatgtgaattgtttggcaataacatgcttttgggataaagttgctgattcataatggatgaaagtgaagaaaggaaaatttagatgaaatatggttgagctgataataacagatttgacagatttgtagcactcgttgtttttgtgttctaactaacattattacctaaatatatctaaagagaaggaagtgtagtatgcatttcttgtgtaagaggcatactttagggtcagggggctctgttgccatttgagagggaaattactcaaactattcttgccattcattcattctggaatggaaatggaatctttgtagtacaatatcagtgggaccttacagttttagttagaaagtacttttccattggtgatttgggacatgtactacgtcttctacagtttagattatataaagaagaagtaattctaggtgtcttgtagaagacgctgatagaatttcaggttacctaattgtatattctttccttgggtttccacaaactcttaagtatgtacaagatctaattttagagacagtgaaatagaacctatttgcttacttgaatgattttgtattctgtatcctaaagggtaaaggttatatgttctgtattgatgatcctatcggaaattctgtaactgtagtgctatgtcaatttctaacttggaacgctttcctttgctctccacttgtagaaaaacaaatgatggttccccatttctttgcctctttcattttgttctgttgcccctcacctgactcttatgttcacaaatgaatttctgagttgcaaatagtgttcttagtatataatgaatgaattactttgctattctattggtaatgattcttctgttttgttgaccaggctacaattggcattgattttctttcaaaaaccatgtatcttgaagatcgaactgttcgactgcaattgtggtaatattctcattcatttcactaagctgtagacagtcctttttttgctagtaatgtggtttcacctttataatagtatgaacataacattttggcactagttgcttttatattttccttctattccttgagcttgaaaaatgtttgtttaagttttttaccccttcatttttatgtaataatcttctgttctctgtttaattaaaaattgaattgaattaagtgtactaagttcttgactttattcatttggtggtagggatacagctggacaggaaagattcagaagtctcattccaagctacatcagagattcatctgttgcagtcattgtttatgatgttgcaagtaagaaagtttggatttttctattaataccttatataatttcttcggcttgcatgaatagtttggaatgtctggcttcttttatagtttcttacagtgctagcatcatgagttataaacttctcgtttttgcttttttattgtaatctgaactcactttcagcccaaaattaaaaatgataaaaaaatctgtactatttaaagtttttttacttttcagctaccgtcctaatccatgatgcacatttttttcttcctggtggttttatgatgtaggtcgacaatcattcctgaacactctgaagtggatagaagaggtgcgcagcgagaggggcagtgatgttattatcgtacttgttggaaacaagacagatcttgttgaaaagaggtattgatattgaatatagttgaccaacttcttcgttccatttctggtttattgtgattttagcactagctttggttttcagaaaagtaggtatcaaccttcagaggaaaatgttactattgagttaaataaacatgattaaaacatcataacataaagtaagaaaaagagggtcattagttactcttgtacaacataaaaagactatggagtcatcagtaacccaagagctattcttaacagtaacccttaagactgttattctgataaattagaaatctgggctttcaatagaatctttcctgttattaccctttgttcccacctgccagattaagtagttccttcttgttgtgaataagtgtagactttgtgtgagccattcaaatatgaaatgattatatttgcctcaacatatcctaaacgcttcaatacatgctctaaagacaaaatgctaatacagtaaacatcaaaggaaaagaaactaaatgtaagaagcatattacgacctatagatctttctactttgatatgctttcatgtttgcatcattgctatggatcatgcatggcctaaatcttctttttttgcttctcaataaaaaggcgctagtactacacactaatacttataattttactgttcctgatttcacagacaagtgtctatagaagaaggagaagccaaagctcgcgatcttaatgtcatgtttattgaaaccagtgctaaggctggctttaatataaaggtaaaccatttctgaaaattattatgtactattgttttctaattttccttttcgggggagtatcggggtgggaaatttattatgaattagttaaacattttcagtaaatgttttggaaagggatatggaaaatagcccagggttggcatataagataatatgaaaatcttctcaaatactatttttcatattgatattactaacttggtaaataattgagtgatgtgaacctcacgttgggaatttcctctttccattttgatttgctcatgagagtatatggattacgttacaatacttgaataatttttcaggcactctttcggaaaattgctgctgctttaccaggaatggaaacactttcctcaacgaagcaagaagacatggttgatgtgaatctgaagtcaatgagtgcatcaaatcaatcccaacctcaatccagtggatgtgcctgttgatgcatcctcttgagcattctttgtacacccaatgtttcatcgctgtgccagttgggtatctctatttttctttgcatcagatctggaaagggttttcgtctgcattttctttcggttgagtggttttctcttctgtaggtatattctgctttgtttggaaacttatttcaggacaaaaaaactaactgaggagatagaaatagatgagttatgatcaggggggtaatctggtggtgaatcaagaaaccaatagtctgtctcatattttgtcctctcgaatagattttggtcttaatgcattttttgtgatattgaacaatgttgatattttacttttctagcattgttatgggaaaacatctatttgtttaatctctcatctttatggaatccataacaagatttgtttcatagtttctgtttcataacaagatcatagatagacaggaatttgaaagttgcaccctactattaaatttatttgaaaatgaagaaaaaacattttgatgtaccctgaactgaagctctaaaattctgagcttttttttcagtaatcaattcaatactggagaaaactgttggcttgtacccttttgcagcttgaaactcatcaaccagccatccaaaaattccaagtttgccatttttcgagtttttagcttcctttcgatcccgatcctgctccatattctactgtgacctctcgaacttgaattaacatgaagcaaagtgtaaattcacacaatatgactcaaaatattacattagaacacttcataaattggcttactaaaatgaggcttaaatgcctacatatttaactttatcaatagaaatattatttgttcatttttcttttgcatctagatacctgtcactagttgttgctattttatcataaatatttagaatagtagcagtgatttttattaattaaaataattattgttaaactataaatagatagcaagtgaaatatttgtaatgatagaattcattgaaataaaagataaaactaagaaggataatagagaagagaatcattaagtaattacaatggagatcttcatctatttttagataaggaattcaactacacaaacataaaaaggagaaatttataagtctttaatctgtggcggggctgatcagaatacatgttcatgttctcggtgtacttcaatttgcttgtctcactcttttttcttatattttttgagctcaaagagctttcaactgtataagataaatagaaaattgtagattaaacatgaagctattatagaaaggtgacaattcaaatgtgaaatagtctcttatgggcccgtttggtacgcaggattggaatggatttgattgaaaaggattggactagactggacaagattggattatgctgaaagtaatcctgtgtttggtttaagaatggactggactattttatt

SEQ ID NO: 221190 - DNA, 1792 bp, Cannabis indica
tttaattagtaatcccgattaggggattaggatttcataagctttttgggtagcgtgcctaattatttagggcgttacagattcaaaaccaaagaataatcttaaagtaaaaaattattaataattgcaaaaataattaagctagtatgaaaattaaagtgaaaataaaaggtaaccgaagggcaggctctcttcggtttatggttttggactgctaaatcgtcaatagtaaaaagtcacatttcataccataccagtcatatgtctatttgaaaaaatcttggttaatgaaccaattcttattcataaaaatattccaaaagctacaagttaaacaattgtttaatgaatttttctaagttcctagcactttattaaaaatagagatattattcgtaaaattatttgaattttattttttagtaatttgacggtaaaatctactaaattcacatttcgttttacattttatatttttgtccaaacataagtgacacagtaaaaaaattatttaaattttaaaaaataaatttttcttttattttttttttgttccttttctttttttttttttatttttttccttttgcttttgcttttgcttttcttcctctctcgacaacttcacccacaccttcttctctaaatccacaccttctaaacccatagtacattctgagctgatacgtgtctcaacaaaaacgttggcttgcatagaatgtgcaaaaaatttgaggaggagggagtattggtagagcctttattaagcaacactaaaatgtatcaggtaccataagtcaagcatagcacatatcagttttttggttccaataaatatcatcacataatgaggtagtatctcttcttggatatcattaattcaattgaaagctttgatcaacccatattgactaatatattatactaagataaaaatatggtttattatttatatttatatatgataagagatatataggagcaaatttcagaccacacatcacatgagtgtgcttggagttgggagccaaaatagtagatgcacgactcacataagactagaggtttgaaacatgtgtcgagcctagatgaagaggaaggttcagaatggggagagtatatccaagcacagattcgagcccaagaggaaagcataagggctcgatttcaggagcaaatttttgagcatttttttgactctaaaggagtttgcggtcgagcatgtatgagcggctagaagtgtttggaattggatgatcgcttccgagcaaatgtggagaactatagggctcgaaaatggggggttttgtttaggtgagccccgagcccaataaagagagatattgcttagaattggaacatttggtccgagtagtttcgagccctttagaagtttagcgggaacgggtatgtaagccacacaaagaaaaaagggaattcgagcaccaaaagtagatgaagagctcaaatttggggcaaatttttcatgtgtattctgagccaaagagaggaaggagggcttgagtaatgtggtattattccttataccccccaactaactttctgttggttagttgtgcatcaactaacttaacttttaaatgtgacagtaaatttattgggtcttttgacctatataaagaggactactcctcccattttaagtgaataataagaagaagactcaacccaatagagagagaagttagagtgagaaagtgagagatatctgagagggggttaagtttggaaaattgtattgagcaacgttgttgattatgttggctcaggt

SEQ ID NO: 221191 - DNA, 5526 bp, Cannabis indica
ctctctctctctctcctctttcgactcaagtgaaccagctgaaccttaggaagacttcagcccatttcaagcaatttttgttagaattccatagcactaggtgctagctagattgaggtaagtttgtggtgtcttttccttaatttatcataaggtttgaaatgattttggttagagttttaaggtttctgaacggtggtgttaagctgtgtttagaggatgttttttagggtttgattaggttcttttagatgtattgtgtggctgttagaattggagtttgcaaatttaggtttaaaagcttattcttggcttttgtataatgatttgtataatttgatgagttgtggtgaactgatgatttgaaaatattatttctatgatattgagttcttctagagttgtttatcacttttgggaaggtattggttcgagtttgcgggagaaaaccgttgaatttttggtctgccagaaccggtcaaccggttgccctgtaggggaaattcccgagttttcttcaatatctattttggctcggggtggtgcgtagtatctatttaaggttgtttatgtgttgatgacctattttggagttgttagaagttaggttctcgttcaactttgaattagggttttattccggagttttggtttaaggcatttattgagttttggttatcgtgacataggatcgggatcgcctaactttgttttcacttaggtcggcccgcacacataatttctggatagaggtaagaaaaatgttacgcatcacttaggattaagtgattagcgaatgtgtttgttataatctcaaatatgatcgagattctggttatgtgtttgttatgcctcagttatgaccgaaggttggaaacggtcattaccgttacaagtaattattcttgaaactgcagataggtttcttacttatcgttcgttgtatcgggcaacgatagtgacatacgtagctcatggttgacgagtggtattggtgcttaatgaagcaccaagattgtgtgattacgatgctgtgaaatagattaagcatgttattatgtgatatgttgtaattgagtatatttttgttagaatgtaactaaatggattttatactgcttatggaattaatcacttttcttgttaagtctgtgtgactcaccggtgttacatggtgtatgtaaaggaaagggcaaagttgggcaaccatgagtttgaggtcactgcagcaatgtacatattagccgcggtggcacgactcggtggaaaggatgtcccattttgattgtatttttatgtataaacttattttgtaaaagcacctttctttctgaatgtaaatattttggtaacaaggggtcctcgtgaatgttaatatttatcttttataaatctatgtgtttatttaattacaaaattttaattacccacacttttcatatacttatacaatttaatagaaaagtaattcttttgaaaagtacaaatgtggcgtccctgtagaatagggcgttacactaatactcttggactttctgatgaagtccagtccatggagaagaggatctactgactaggcagattggattgggattgatatggtcaacaccgtgtacactaattatgggcagttaatttgaattaattgcataatatttattataaaaagtttcccctttaatctttatacgatgctctgttgtaatatgacaactggagtttccttatttgtgtgcatgaataaaaagggaaactagaagggtcttctgcgaacgcgttatcttgtctcttcaaactcatggtaccaaacatgtattccgggcacggattactgaaggcgaaaggctttgcaagagcagaaccacgatacattattggaaggtaaaatccatatgggattggccctttttacctttactgagggtcccattgatgggtctcggatgctgagttggagtccacatgtccaatactggaaacacgtatgacatttacactccaagcttcaaaaatgttgcgtatggtggaagcttgcatcacactctcttaatttggacatgtggaaattaaaaaatgaaattgtgacattttaaatgccactcgaccgcagaagttggcttccgtttgtgatgatgatatgtctacatgtcagtcgcgcgtgagtgatagggcgtgaccatcgaggagtcatctttaaaaaatgagtatattttttaaggttgttcagtttttggcgcaaaaatcaaaaatagcattttcatcattattccacgccttggttttggggtgcattaaatgcaaggatacacatagattgttagactccccaactgttggatgagttttgtgtttctagaagtaagatcgtgagtcatccatctcctcttacgtggatcgcttttttgggtataaatacccttatgccttctagttaccacttttcctccttttttaaattttcaacccttcctagcacacgaatttctctgcaatccctaaaactacaaatcaaattcaaaacaaagctttcttcttcaacctggaaaattccgtggatttttcctctgtccgctattgaggattagggcacgagagttcccacaccttccatctccagtgatcaggacttttacagtagaagaaattgcgagcctggatttttacacagaaattgattcgatgatcgctctagcatctcccctttgtgaatggtgcaaataaattccctagccagatccagagacaattagcttaacatcccaattatcaatatcaggtatgttgttccttcatctacggattgtgttttctgaattcgtcgtttcaaattgtattttcatgctcttttctgtgatgcaattagggttttttgtttgtgtgttttccatcttaagtagatttaagtgttgtatgccatattgtcttttgaatttcctatttaaaaattcctagagttgatcaatttctggcaaaagtgttggcgaaatttccttttgcccaaaatcctctggttttgggttcgtcattaatctccgtcctctttcgctctgcattgttcctcacttcccatctagaatgagtaactactgtaagtttttgtttctggatagttagtctagttaggacctctccaagcactttatggggaaggacgtctagctccctttctatgctaggtagttagggtggctaattgcttaaattttcctccttttgtacagaaatgatgcctaagcgaactcgtcaagaaaaagctgattcagaggaggaagtaatggagtgagaagacgctccaaaattaatcttgaatgatagtccatgggagttggaccagcatgttaacatgttcaggaataattaaaataacctgaggaagtacgagaccttacgagtgcttgaaagtgttccaagactgttcaagaacaggctctccactcttagagagaggcccagtaagtgcgcggaatgaggcttcggcgtctggatctgggttggagtttgttaactctaaatttgacaagatgtgtcaagaatttggaattactaggcatagaaccgtagtgaagaccccagagcaaaatggtgttggtaaaaggatgaaccaaaccttgttaaaaaaagatggatgtttactattcagttctaggttagacaaaccattttgggtggaagccttagcaactacaacttaccttgttaataggagctctaatagagttatagaccttaagacaccttatgaaatgtggtataccagaatccccaacctaaagcttttaagaacatttgggtgtactgcatatgtacaccagtccattgacaaactagaacctagatgcgtgaaggaaactttcctaggttatgccttaggaaccaaggggtatagaatctacatttctaggaagggtaaaccaaaggttgtgattgctagaaatgttattttccatgtgttagaatatcctcagttgacctccaagaagggtagtgtgtctccgtgtcttactaaaaaaataggaaacaaagacactgcaactgtagaagtggagtaaggaacgaagctcccgaaagaaggttcacaggctgaagataatgtggaactaaaagacattgagcatagggaagctcttataaagccgaaaaacaagataatgaaggcaaaatagaagtgccagaagggtttggacagacaggtctagaaggttaaaagttggctcgtgatagaacctagagagagattcaacctccagctatagggtttggatagacataataacatttgtactggcggtggtttaacaatctgaaattgaagagcccagaagctatgaagaggcaatttcaggtggagacaagtctaaatggattacggccatggatgaggagatggactcactactaaagaacaagacttgggtagttgtgtcgaggctggagaacaagaaaattgtggagtgcaaatggattatcaaggtgaaagaaggaatcaatgagaatgaacctgtgatattcaaagccaggctagtggctaagcgttttactcaagtggaaggtatagactattctaaaatcttctcacctgtggtaaaatacaacacaataaggttgatgttgtctttagctgctcaaatggagtttgaagttgaacaacttgatgtcaagattgcttttccaaaaatgggttcctcgatgaagagatctatatgaagcaaccacttgggtttcagatggaagggaaaggagttaaattagtgtgcaagcttaatagatctttgtatggtttgagatagttcccaaaggcaatggaataagagattcaatgtatacatacatcaaattaggttcaaacaattcgaatacgatcactgcttatagtttaagaatctggagcaatctacggcagtgttctcattgctctatgtaaatgatattcttatcatgagcaaagataaatcggtgatcaaaagtattaaagccaagctcgagagagaatttgagatgaaagagcttgggccagtttaaaagatacttggtatcgaagtctcacgaaaccggaaggaagggactattagcttgaagcaatccgagttcatcaagaagataattcagaggttcaacatggaagatgcaaagagtacattcgttctattagggggacagtttattatgcaaaggaacaatgtcctaacattacgaaagacgaagaagtaatgaaagatgtaccctatgtagtggttcaaggatgtttaatgtacataatggtaagcacgagaccgaacatagctcacgccttaagtattttaagtcggttcatgtccaatctggggatagaacattggaaagcccttaaattgttattgagatatttgaatggcacatgagattattgtctgacatatgagaaaagaaaaagagaatcggagttaaaaggtttcgtggacgcggactacgcctcaaatagagatacgagaaaatcaactacttcctatgttttattgacaagcttgaactgtatatgttggaaggctc

SEQ ID NO: 221192 - DNA, 1703 bp, Cannabis indica
atttatatttatattatgattaattagattataagtaagattatgatcatactagtatatcttagcatacattttaagtctgctataagggagtaaataagtataatttattaattacggagatttatatagcatgtgtgaatgtaatatgagctatttgtgaaataaaaatatttttaagtttggcgaccttggagactcgatcgggggggccaaaaaatatcataacaggtttaattagtaaatttaacgggaatattatgataagttgatattgtaagtattagagtaattatgagtatgtagaatttgacttagcgtcccagaagtagagatatcttattgactaaaaaatgatagaataactattaataatttttttttattaatacgtattattattattactgttaagataattattattaatatattattatattattatattattaatttttttaaaaaaaagttatcagtacatatattatatgtttataacttacagtacgaaaatgaaacctttctcctcttttgacgaaactcgtatctcttcctatctattttctttgatttttaacctgaaacctagcgatctaagctccggtagtagcggaatagcaaatctttagagaaagatagcttaaggtatggtttgattttattttaagctaaaaacgattagttttatataggagtttcatgaattagaatagttatggaggttttgaagacagtgaacatcctacacatgtatgcaagttacaaaaagtgatctatggtctcaagcaagccccaagggcttggtaagagaaactaaaatctgctctactctcatggggatttgtcaacactgtctcagacaactccatgtttatgtccaataacaaaggacatgttctactggttcttgtgtatgttgatgacatactgatcaccggacacgattcatcagccatacaacatgtcctctcagctctggacacaaaatttgctttaaaaatattgggctcaatacactattttcttggtttccaagcttatagaacaaggtatctatatatcactcagaccaagtatgctcaagacatcctaaagaaagcaaacatggaagactctaaatcatgcagtaccccaacgtgccatgaaaataagttgttcaccaacaacaatgacttattccctaacccaaagatatacagaagcattataggctccttacaatatttcaccttaaccaggctagacttgccttttcccattaataggctaagtcagtatatgcaaaaccccacaacttcccattggaatgcctggaaaagggtactaagatacatcaaaggcactactcaccttggccttgtattcaaacgttcaacatctatgaatattgaagtatattcagatgcagattgggcctgcaatctagatgacagaaaatctactaaagggttttgtgtcatgctggagagaatgaagtaaattattcattgattgaatgaatgaaataatgtacaaagagctagctatatttatagtacaagctaataacaaccatgaagagaagtaaagacactacctgttttaactaattaagccaacaaaaaacagaaaactaacatgcttgttattgtagaattactatttgttacaatcaccataatgatcaagctactttaatttgtaactcttacatttttttt

SEQ ID NO: 221193 - DNA, 3210 bp, Cannabis indica
gtaacctcccctacgtcgaaacactcctccacaagatcaaaattctatctccaaaatcaattttgggtcactaaccctttgtaggtgcggcccacctgaaaagagtacgtccgaagtaatagatattactaatacttaataacattaatactcgtaacaatattatatatctttacctaaaaaaatactataatgataatgtaccatattttattagtttaatttgatatagagtttcacaaatatcaatttaataattactataaaaagatactaattaaggatttaccttatgatgatactggatattattattaggagtattcattaaactgctcaaactgttcacactgtaaaaaaaaatgcagtttgaaattctttgcagtgcggtcgcagtttaaatttttcttaaaccgtgcggtgcaatttgcggttttgaattgttaatatgcggttcaaatcgcactgcaccacatcacatattataaaaataccaatttttatatttatttaggttcaatatgtgaaggtcgaaactaagcccactaattattgtattgttgaaacttgaaacttttttttcatatttattttcaagtcttatggtatttttgacaagtgttgctcaaaatttattgtatttgtgatagtttaactatttagtgatagtctaaactacaaaaaccgcataaaatacatcgcacaatttttacagtgcggtttttgcagttttttagtttcacggtacggttgcggtttgtaaaattaaaaaaactacatgtgtatgtttgttttaaaaaatagtcaaaactgtaccaccgaccgccccacgaacacccctaattattataaaattattcttttagaacggaatttattattatttttatgattgcgagacacttaaattgcatacaatatctaaacataattattgtataaataatattatgtgttaatattattatgtgtaaatattttcacataataataattaattatctattattttttgaagaagaagaaaaatagtctcacttgatagaaacttgcgagaagatgcgattgagagaaagtttatttgcatattatgcccaatgttatgggctcaccttttcagacagcgaaatatccgtgcgacaccttgacttctctaagccaaggtcagccttcctagcatttgagtaacaatggactcattttttacgcgatcgtgtgcctcagatggttggaaggttgatcttggcttagagaagtcaaggtgtcgcacgggtgtttcgctgtctgaaaaaggtgagcccatgacagttgatattagagctaagttcatcttagtgggaggtaaacctggttggcctatcctagaggggatgtaggcgtgtgaaaggatcgagatggtctgaatgctggaataagatgttgttgagcctgttagtctcctaatgttgatcagtagacttagatggagttgagactgtgttgcttttcttcgtgggaatactggacaccctagagaggagacgatgacagttgctttgagttaagttcaaggattctagaaagacaactaccacgtgcaattataaagatgcgcaacaaaatgttaaaaactcgttggtatagtacaaggttgattggatagtccatactgtatgcttggtacactagggagagtttgcctgagtgacatcataagccgcaggaggcacttttgttgaaaaggaagcttgttggtagcggtgtggaagcattacaggagccctcaaactcttgttagtcacgacaatggtcgagagtttatgactaagatggtttaaattgggatagacatggaattcttcagttgctacatgggtgtgtcaagagggacacacatggagaccaagggggtggaggccgcaatcgtcaaaagatgatcatacttggaggaatttccatgtgacttttatttgatctatatgagaaatgtcgtgacagttgagtgggatgtgttggcttgtaaaagcgccagtaggtgtaagtcacacaaagacatcgatagaggtgtgaagttgtagaatgaatgtatcaaagaagccatcatggctaagaagaccgagtgcaagcattaagttggtgttagagtttgagtggaggccaaagggcagtgccagtgagagggctggatcattggaacttagtacattgagggagcctggaagggcgtgatgctagagcgaattagttggatggttgtgtggataacacatgcatatagaaatcaacaggggtgttgtatgagatagttgactcgagagtagatagttgactcgagagtcacatcctgtaggatgcacttttagatggcatggtgtgcataatgagttgggcggtcaggcattcacatgtgggcatgtgtcaaggatgccaatagatgaataggggagagaccctcatagttcacttagcagtactaggtattcattacaagcatcgagatgagtatcatagagatggattagtggtttagaaagtaaagtcaagaaggctcaagacacaagcagtgccggttatctagggtgaaagtctgcaggactgaagtagtaagataacatcgtggcaatgttggcctaaggcaaaagtcagcaggactaaggtactaaggcaacacaaaaatgtcgatgggtgaagagtcaaaatgactaaggcactagttcaatatcttcatcaaggtgacatttggaatagagggatcgtatgtgagtatgtcgttagcttgcaagctataccttgagaggtattcttctaagagagagaagttcttcccaagttaaagtgggggagcccactaattccatatgtttgaagaattagtgtacttgttcagttttggtgtgtgaatccagagggaaacactacaatagataggttgttcaaggtaaagacttgcatgatttttgcaagctacagatagataatatgcatgggtgtaggctgagatcaagactgagctagcttgcgccatgttatgggcgtgctttgtgtttatgggaacactagtgttgtatggaacactgtaagccgaatggttcagagagcatatgtcgatgggagatagcagattgggatgactttaagtcttaagagtaagactttgtattatcaagtttatcaaagtttagagagtcatcaagggatgaagggctggttttgagagatggacttgtgaca

SEQ ID NO: 221194 - DNA, 1406 bp, Cannabis indica
agtattaaactagtttataaaatcacacacttggcgtccttatagattagggcgttacagataccctagtgacctatagagattcttgggaatgatttttagacctaaataaggttagcttgcttggttagttgttattttgatgttatgagatagggcctaagatcgtcaattgttctccaagcaagtcggctaacatacctgaactaaaatttaaggtaagaaaagtataatgtaccacatggcatgatatatcttttaattgtcgattgtctaattatgcaatgtaaatgtgattcacaggctcgtttgattaagcaatgtgatacattggtgccagattatggcacatgctcacttgattaggtaatgcgatatattagtgccaggttagggcatgggctcgcctaataagacgatgcgatgcattagtgccaggttcttaaatgggctcacctgattaggtgatgcgatatattagtgccaagttagggtacaaactcgcctgattaggccatgcgatatattatttttaggttatggcacaggctcacttgattaggtgatgcggtgatatgatgtattctgctagattatggcatgggctcacctaattaggtgatgcagtgatacgatgtatggtgccatgttatggcatgggctcacctgattaagtgatgtggtgatgtgatgttggtgttaggctatagcacgagcttgcatgattagacagtgcaatatatggtttcttctttttttctatgctatgcgtaattatattatataatctttgaaatgttatgtttttgattattttatgataataaaatgaataatcaattattatatgtatttcctttgttacttttcttgtttaatccttctgactcacgggtgctctgtggtgcaggtgaggacaaaaaaaagttagagcagccatgaggcgacggtcttctccaaggaatgtacatattaaccctactgacgtgtgtgacaagttgccaagagttgttttgagctgtatccactaagtattttgatttgttattatacattgtccttttgtaaaaacttttataacagggatccccaaaacaaagttttagtgttattatattgtctgttactagagttttattttaataaatttttaatattaccacagagattaataataaaataatctgtcaacactaaactagtttataaaatcacacacatgacgtccttctagattagggcattacatctataccctgaaagctcgtgtgtttggaatataaatggataaatagtgatttattaagtcgcacacgttgttgcaattaagacaagaacgggcgaaactatcttgcattaattctttgaacgtttatattaatatatattgtgtaattattgtaata

SEQ ID NO: 221195 - DNA, 1325 bp, Cannabis indica
aaaaccgttgggcaaaatacgcccagtaatcctattttaatgaagtcaaatattgttggtgcttttctttgctattttacaggtttactttggaaagacaaaagaaatggtttgtaccttgcgaccaccatccgaagtggtgatgagactgcccgaggcttgacctggtatcatcatcagccaacaatgccaaatgaaacaggaaattcgtgcctatatctttggttctttgtgttcatttaacaatatgttttgtgttttcatatggctttacatgatattgtgttgtagacatgattaattactatttcagaacttatcttctgattcatcttcttcttctaatatgttcatttgattgattgaatattttcttaagaaatagattgacccacttggttgtttggtaggaaagtttaaaattgaaaagagaatataattgtgtgaaaacttaatacaattgtgttgttgttagtaagcttaattaagtataaaatcatgttgagtatataatgagatttgttcttaaacaagacaaagtcttaaccctacattagagtcctaaggattaaacatggatttacaaattttaaaggttagataaataatatgaataaatgtaaagcagctatgatttccaactagataatttgttttacctattctcatgctgatattatgatataacaaaccaaatagccttgacgaattatctcagtataaattatcactatagctttcttatgtactaatttcatcatttaagttttaagtaacttttgcattataggaagggttaacaccattttgaattctatattaaaccctttgttttattaaatgacaaattgaaattgtatttcttaaaatagtactatgaattgaatttttgttaaaataaaattaataataatctgatttagtggtgttatgacaaattttgttatgtttttatgcatctatttattttatgaattatcttcaagttgattatattaagaaaaaaattgttgaaaattaagttcatgttctatttaattcattttggaaaatacagagtttatttttccatttaataaaaaataggattcattcagtaatttttataaaacataagatccaaaatagtattaactcttataggaacctcacaaaatagaatattaatataattagactaatttagcatttgtttttgttaaatgagaatttggatgggacatttgaatttatatgcataaatttggtgtatattaaatttttgaacacaagcttactaaaattaaaaaaaaaataagacatactttatattcatacctattata

SEQ ID NO: 221196 - DNA, 1697 bp, Cannabis indica
tattgctaaccaatcgcaagacgacgttactttttcacgtgccttatagcaatggtgattaggttaactaacaaaaccctctaacaaatacccaatttcatcatcaaagaagctattaaaacaaaacagtgataagcaaccaatggaggaaattaaagtcaacacattttaatagcattaaaatgtattatttattcaattattttttttaaaaaaaaaaagataagaacactgtcaagtcaaatcattaaaaccccaaaaattcagctaaaataaattaatcacaaaaatgaaaaaaaatatatatatttttatattattattaataataataataatgattggggaaattaatgaaacctcattatgacactaaacatttcacaaactaaaccaaaaacatcattaagaatcacattaaaaccacaattaaatcattaattacagaatcaaaaacaaaataaaaaacacatttttatttttcaagacaaaaaaaataaaaaaataaataaaaacaaacaatacgtactatcaggtccaccgagctgggtcacagcatcaacgaatctctcatgaagctccgccgtccaccggagccggggctttggatcggttgttagaaccaaacaagcatcaccaggcaagtttgttccatctaaagatccttggaaatcgccatggctatggccaccaccactaccaagaacaccatccaacggtagagaatgaatagcagagtacattttactcaaaacccacagaaaaagattgtacctttaacagcgaaaaagacccgtttgaggaaatgggtatagaagaagaagaagaagacgatgatgatgatgatgatgatttgagtgggtttgtgagagagagaaagaggtaatgaaagaaggcatgcagcagaagcatagacagcgatgtcttgttctgtctctgtctatctctctctctctcaggtttctctctcctctttctctctctctagggtgactcagatgaagaagaagagtgtctcaagaaagaggcaacctgtactctttggttggcatgtgattgcttttgagtttgttttatttttttttaaagaaaaaaaaattagtttgttaaaagactattttttatctccaattataattggttagccattatttataatttttattagattaaaatagcaaaaataatttttatgtggattactatatagattttggttacgatttaagttatgttgtggattgctataatttttattaaattaaaataagtatattaaattgtattaatagtaatattgcacctcataagagtgctaagcaagtttattaatatttttatgttaaacttttgttatattatttagagtaagtcaatagtgtgacagtcagtagtcccgtgatccgtaaggagaaataccgggtaagttgtgcaatcccacatcgcttggggaaggtcaagtgggatgattctaagactgtgtaggtatgggactacagagttgaagagagcttaaatagattgattagtactatatcaacaaggtgtatcttgttttacggtagcccatcacgaaagaactccacagttaagcatacttgacctggagtaatttcaagataggtgacctcctgggaagttttctcaggaagcgtgcgagtgaggacaaagcatgctgaaaatactcgtgttggtct

SEQ ID NO: 221197 - DNA, 1019 bp, Cannabis indica
gctctttactgttggctatagcagcagtgttgtcacaaagaagcactagtggtttttctatacttagaacaataccaagctctgtaaagcactttcttagccagaccagttccttagcagcctcaacagcaactatgtatttggccttcatggtagagttagatattgaggattggttgacacttctcaaaacaactactccactcccaagggtaaataccatcctagatgtagtccttttgtcatcaagacaagcttggaaatctggattgatatagcctaatgcatttaaagtacaacccttgtagactaacacataatctcttgtcctctttaagtatttcagaatatgcttgactgctgtccaatgttctctttttgggtttgattgaaacctgctcacaattcccacttcatagcaaatgtctggtctactgcacaacatagcatacatcagacttccaactactgaagcataaggaaattttctcatatcttctatctcttggggatcagtgggatactgttccttagatagttgcaagctatgtctagaaggcataatatcccctttggcattactcattgagaaatgccttagaaccgtatcaatgtaagctacttgcaagagagaaagtgatctattctttcagtttctaataatttaaattctaagaacataattagcttcacccaagtctttcttttcgaattgggtaccgagccattcctttttgtcagccattttattaatattgttaccaatgactaagatgtcatcaacataaaggatcaggaatactaccacttgattatccttgagttggtaagcacaaggttcacctaatagtctagaattctatgtttaagtgataaattacttttaatgatattttgatgggtattattatttgtcatgaagaatataacctaagttaaatgaattatatgctaaattgatttgttgcttagattaacttgtctccatagaatttaatgtttttcctaagttaaataga

SEQ ID NO: 221198 - DNA, 1659 bp, Cannabis indica
tttttttttttggattgttttaatatcctaaattattcaaaaatttcaatcaaaatgtgaatatcagtcataacaacaatatataatatcatgtgaaaaataaatgagtggcactatagtgcacgccgcctaaaaaggatcctataaatataaatttattaacaaatgtcaattggttgtgtgtattaacaaatgttaaaacttccaatgaccaaatagtgttacacgtaaacttgtgtaagttatgataatacaaccgagattataataaaacaacaatgacatcaatgacggttgtaattaattgaattcaaagcctattgtatcttaactacgtgacattatattacttgaaagaaaaaactagtaatgtaatcaccaattagattattcctgtttattttgaatttaggcaaagaataagtcattagttagaagaatatatgtgtgtaagaattcaaaaattgattttctagccttagtagttgcacaaattttcacagtcaaactcattatttaatatagaaaatcttacttgaaatcccttgtagaaaaatgtagaaggtatgatgagcttcaccaaagtgtcttcttcctatgatcaattaaagacgacagccaagaattaaaaacaaagatattataattctctgttggaattcaaagtgaatatatctgaaagttgcatttttcaaatcttatgtactttgcaagagatacaataacatttatcaaaagtgtatgccaaagtatcttgtttgtgggatcattagattgaaaacccataagaaaggatctaatatgaagactgatttttgtctaaccagtgaaaatctgtactggtaatttagctgtgcatagcttgaaacaatttcatcatttaaatggccttagaattgacttaccagaaaacattcccagcaagtgtaggccaagatgaagctgagtagaaggtgaggtactttgataaatgagagatgatgagcaatgattgaaaatcgaggtaaaacatttgttaaagaaaaaaaaagccaaataatatatatgataaatatagcatttttacagaacatggttgttagcatgagcaatgcaaaatagacaaaaaaagaggaaaacaaagagagagagagcagcttttagttaaagttaaaaggtcaaattattaatcattatcatcattttcgccgtgattttgaagcagcccatttaaaataaccacaatttgcttcaggattagatgcaggtccctgtagaagaacaaagacagtcctctggttaattcatgtattagtcgagctcttcttaaattagttatataatggagacaaattcaattttgtgagtgtaatcagtaagaggaatacaatacctcagctcgtacgcaacaataaaatcggcgaccaaaatttggtccttgtttcttcacaattctagcaacacaaggttctttatgacccttgcaaagagggatgctattctgcatcctctgctgtatcctttgccactcaagtagggcagcactattcttctctgaagagcaagtaatcacttcaatctgatccaaagttggttcacttgactccaactcaatctgctgaggactatcactctgactgaggttctttgtctgacaatcccccaacagaggctcatttg

SEQ ID NO: 221199 - DNA, 3809 bp, Cannabis indica
caaaaatagagggaaaatatctaatactgaagggcattttagtcatttgtattttactaatttaatatgtaaattataacttgttttacttatttcttagggatttaaagctctcatatataaagagccttactcaaaacctaaaactctaagctctaagtcattaagggcaagtgcaaaccctaactctaagtttgataactcatctctctctttctctcacacgcccacttgttgtactcttactagagaattttcaactctgattcccacattgtaacctttagagagctacttcagatcccatctctatagtaatctaaatagtattatctctcggtatcaatacaactaaaaggagagtaggacattactggacaacaaagggggttgaacctctataaatcatgtgttcatttactttattgttttgattgtgtaacacgtggcaagcatcagtattacattcgacttcgctgttcgttagccacatctgaggtcaacaaattccaaattcaaataataactatcctagttattaattaataaataataacatagttttattatttttaataactaaaccaaaataatagagttttgttgggatatttatttttcaaattcatatttaaattaaataaatataattgattttatgtttgaaattcaaacttaaacttgaaactaaaagttttcctattgataaatagcatgactaatccctacgtatcgagaaagtgctgaaaaagcaatactacgagaaaactgcctgaaaacggcaggtcgtttctataaaaatagcaagttgttttttcaagttctttgccagaaaaatggtagaccgtttccacataaacaacctaccattttttcgctacagaaaacaacaaaaccccaaatcttggccaaaacaattctaaacataaaaccaatctccaaatcacctaatcacatcataagagacaagtttcaagcaatagaaccacaaaatacacaaaaattcaaaaatcacccttattgagccaattttgagttcttgaactcaaacttgctccaaactacaatctgaccttaaattcatcatagctacacttcaaacaacacaaaatcaacctagaaaatcaattccacacttatcaaactcagacagaaaaaatctcaaaattacatgtccaacctaaagaaaacttccaaataacttaagaaaaaggattaggatcttacctttgataatacccctaggatttcagctagaactcactaaaaaatgatggagaaatcctggtttcttctgctttccttggagccaaagtggagagagagagtttggatgaatttaagttttgttttctaatgatttttctaatttatccgtaaataaaatatgcctttattatagttaaaagggatcaacatagaattaattaattaattaattccaccaaagtccataaaggacaaaattaacctcttgggcaaatttccaaaaattaccctttcttcaagcttaagttgtctccaggcttaggagtaaaatgatcaaaaactataaccccgcctataacttacattttaaatttctaactatctagccccgctaattttaagatacttaaccatatctaagtaactccattggccaaatcatcacatttcactgttacagagcacaaaacatgaaaattgtaaaatccatacatagtatatataatacatctagaatttgaatatatctccgtaattgagaaatattttcctaagacctatttcttacaataagccataactttctatcaagaagcaaataaatcataaaatgattgattctcttatttatctactaattaccatgatttaactatgcagtcattacaattattcctctgttaaaggatttcgtcctcgaaatctaatttggatgacttcagacaatgagtccttatggtggcttttccaccctgctattctttcaagtacctagatcaatactataattttgttccaaagaactttatctttcttatcgagaatctcaaattgcttctctgcacaagataactcagcctgaagttctaaaatttcataactttttatatgagtaaattctcaatcattcttccttagcatataacatggaaatatcatgtgtgatagcaatgctaatcataaggctagacgagaaattattaatctaattttctcgagaagctctaaaagtcgtaggaacctagacatatttttacccttgtccccaaagtaattcattcctttcaccgataatattcacaaaaagacatgattttcccctacttggatttttatgtttctgagcttcaggcctgcatatcttctactatttatttttagaagctagcaccttggccataatcttctctaaagccttactagtcggctagcctgactctgaaactaagtattttctgccttaggttttgaaaataatacttcatattattcagcatcttatagggaaccatccctatcatactttgataactgcttgttgcatgaaatctttttcaaaaatagatagatgttctatgagttcttttaattcatcatgtaagcttgcaacatatcattcagtattaaattgtcccttcgggctggccatctgtctaagggtaaaaagttatactaaacttccactccgtactcatgaatctctatagactttgttaaaacctaaaggtgaacttcagtttcctatcagatttaatagactttaaagtcgcataaggtcatactatctcccttaaataatttacctactagctcttatacccaaaataatactctaattcatattcaatcatatgaaagcaaacatgcttgtgatctatttctagtaacctcttcctgtttcacttgagaaaatttagtaaatcataataaccttcccagttttttatggttaaacctaattcactgtcaaattaagcatctgaatacataatctaccacattactttgtattctacctcattagtaagtagaatttcaagtcttggtacatcttaatagtaccaagatataacgatttaaggaatggtataagcttttcctagagtctctcttatgagcttaacactgcttgggacactaacttgagtttaataatgtaacatcctgtgatttgacactaagaattctctgacttagctagcttaaaacttattgtcaagttttcactaaattgtatccaccaagtgagcacttctatttttgtctaataaatctggttgaagtgttaacttattgagtttacccatacaaactccaaacttaacctaaccatgacaatcattaattgaggataaatcatggtcaaacctgcctgagacatttcctacctagggttctcgccactagattggccttctctgggtaataaagagttttgcagtcttaatctttaactaactccaaccactgtctttgttttgtattcaatctcttctgggtaataaaatattctacatttttctccacagagatagtttttccaaatccaaaagtaaaatcattgtcgcaagttctaggtaataaattgggtaatgttatttatactccttcaattaacgacagaaataagcaataaccttatcagcttgcatcagaacacactccatattttttctggatgccttacaatagaccaaaattcttcttgattagaagtcaaagctaacactagaattgtaattaacacttgcttcagcccttgaaattaatttcacacccatctatccacgctaactgctgattcttcttggttaactttg

SEQ ID NO: 221200 - DNA, 2664 bp, Cannabis indica
atataatttaagaaattattttttttagcaatatcactaactaatcgtggggtgccatctatagaaaatgctagacaccactgcccaataacaatactcataagaaaaattcaaaaaaatatttttttgaatggaaagagaaaacttcattaagatagaacagccaaatcgaccattacaacattattaaagcattaagaacattgctatcaacaaaaagataatctgaccaataacaagcaccgtgtgcaagacaatgagcggcattgttagcagatcatttaacataacaaacttcgacatgcatcatagattttagtaaattaagacaataagtgatagttgaaccaaaaacagattgcataataacattactttgaagagcttgaaccaccacaagtgaatctgtttccacaatagcacgctcccatccttttttcttgatccaacttagctcctctttgacaccaatgacctcccccaaactaggatgaacacacccaactttgtgcaaacaaaacgcctcaagaagtcgaccatcatcacctcgagcaaggcagcccacaccaagagttgctgcaaaaacagcaccatccacattcactttaatgacaccagtcccaggcgcaatccaatgtttagtgctactgaaattattcaatattgcaggggctcgaagcgattcgaacaaacacacttccattgatttagaactgaatgtgaggagataatgacttcagcagcagtagagactttcttgttccaaagcaagtcattcctaacattccaaatagcctaagaaaccatcgacgcttcttcaaacgtagcaggttggccacggttcagaactttcagtaaccagtcaccaaattgagtgacagagattgagccaagagtcgcaccaaatctgttccaacaagagtgagcaaaatggcaggacaccagcacataaaaaattgactcttcttctctagaacagcagacacaactgagttgcacagacacatgttttgagtgaagctgtgttcgtgtaggcaggcaaccagtgatggctttccaagcaaaatggattactttaggagggactttagttttccccaacgaacgccaaagaaccgactccatatcaactaaccatatgcctttagaaacttgaagccattgatagcagctcttaacagagtagctacccgagttctcatgatgccaaaaccaaacatcatccatattagatggattaagggaaatattgagaataagatcacggtctctaagttcaagaagaacatttagtacctccacatcccattaagtattatcagctgtcatgagctgattaacatcaccccaacaagtcctagatgagagttgatcacacacggatttgttgtatctggaagccaaggagaatttaaaactaggacagacaaaccagcaccaatacaaataggtgcccctactgcaataatcggttgtgcttcaaaaatacttctccaaatgaagctaggattgttgccaatcacagctgaaagaaatgttccctgtggatagtacatgctcttgtaaattcgaccaataagagacgtctcattagttaacattcgccaagcttgttcgcccaagaaggataagttatagtcatgcaaattcctaaaatcgatcccacccgaactcttgtgtttgctcaaatgattccaactcatccagcttattcctcttgatttctttgagttaccccaccagtacttagacataagtttctctagttcactgcaagtttcaaggggaataagaaacacggacatggcatagctgggaagggcttgggccactgtttttaacaaaacttctcggccagcctttgatagaaatttaccctcccaactcaatattcttttctcattttttccttaaggaagcttaagatcgctatctttttacgactaataatgcaaggtaatccgagatagaaactgttttcatcagctgccaccatacccacacaagtacacagtctgccacgcaaattcaaaggagtattagcactaaaaaatattgatgatttggagaaatttaccctttgtccagaagcaatttcaaaaatatggagtaatctaagcacattatcggcctcgtcctcagtagcacgatagtatacatagctatcatcagcaaatagcatgtgtgaaatagtaggagctccatttccaatacaaaaagtgactaaaaaaaattataattaatactactcaaattatttttcatctcatccactttaaaaagaaaaagaaaaaatttattttaatatgaccaaaagtcaagaagtttagtggtcaaagagccatgaatatcctaagccacaaatgtgttatttatgtaaaacgatgactagtcctagtcatacatattagtcgctagcaaaccgtaatttaagttcgggagttttgacatttatcaaaatttatgaaaatttacatcaactcaattaattaggagctttagacactaacatatatttccatgtatttttaaattttagtttttaattttttagccaacaaaatagaattttcttttcattgtggatttcattttttaccaacgacctaactcaaaaaaaagaatatatatttttttaaaaataaaaaaaaaacaagactgaga

SEQ ID NO: 221201 - DNA, 3117 bp, Cannabis indica
agaacataactaagaagaaaactcaccaccccaaaaagtctctctctctctaagtttcagctcctctctctctagtagccatgactacaacacacacacacacacacattctctctctttctctctctgtgtcggtctgtttgtctgtttctctctcttatttttgccagagcctaggttgacatattattaatccggggtgcttccagccacaatattaaagaagtatctcgagaatttttttcgtcttcatccaaaacaagaaaaaaagttcttttggtacagaaacgggtcgacatagaggccgaaacagggacgcccagcgcccaggctttcactttgtgaaccagggccacttccatcagtagttcaaatgacgtcttccaagaatgttttctgttttcatcaataattaatatttgaggcttttgggaaacaaatggagccatctaggggtcagaactgggacctagcgctcaggttgaaactttgttaacttgggccatgtccaaggagtttctgagaagtcttccgggcatattttctatttttgccaaagattaagatacaagtattttcagaacaagatggctcagaggtcatatttggttggcctatcgatcatcacgttatacgaagacttggtgtccaccactatgaaaaattccataatggtattctgcttcgaggcagtactaaaagtcagtgacaatatgatcttaccatagggaacaactccatccccactaaagccatacatgagctggtcgcagtgctccaggtcttttaaggacaaacccatttgctccactgtttgtttgaacaagatgtttgacgatgctctatcatcaatcataactttagacatcatcatgtttcctatttgtacctcaacaataagaggatcgttgtgagaattataaaaatatagtttgagttggattctctgaatgtaattggatcacactcgaagcatagagatttcggaggcctctccgtagcatcgaacatttccatccttggcttatgtcacacagatcttgcatacatctccaatgccttcttgaattactaagaaggtgtggacctttaactaccacttcaagccgacctgccactgctataggttagaggggagagttacctcctattagcgtctctagccttacatactgctggaggacagcatgcttttgtcgaatcaagaattctatctcattttcgcaactgattacacttatttattgcagaagtgacataatttgttcatgtctctcttccctgactctttgaaggaaagaggcttgcggtatagaactatattgacaaagtcgccgcaaaataattcctctcttggggctataagaatagagtaggttgtaaatcaagacttacactccttttcgggcctattcccagttcaggctttcatttcaccagagaagttggcatgtataccaccattgttttgtctctttttcccgttctttcctccttttccactgccccttgcgtgtctgggttaggtgcagggcagtatgttgatttcttctttttgttttttgagtccttaactagagaaataactttttcatatttgataaacccatctgctctatccaggaagtcgttcatggtgtagcctggtttaagatgaaggtctgaccacagaggactcatctccttcagccctgctgcgagttccataaccctcgcatcttcgctaagtattttgttcttagttactgcctctaattactgctggatgtagtccttgagggatttgtcatcttgttgctttacttcaccaagatcattgggttcaatctggcgttgtttggatgaagcgaattaacttccaaaagcctgcacaagctctttccaagaatcaatagttttaggagcaagcttgaggtaccatcaatgagctatgtttgtcagcgtagcagggaagattctacacaagacgtcatctcgtatacctattggatattggtctgcacttcaaagtaatagatgtgagacaacgagccttctttcctggtgtattgacgctaggtaggattcttaaacttaggagaaatctccaaagccttgattcgatctaagagcggtgagcatcaccctcgatccaattcaaactctgacaactttttggagatgtaatccctttcaatatagcagctaatgaatcaaactcagccttgctgattccatgggtggcggtctgcgtcctagttagaacttcagctgctaggttaacgtggtcaccactagaagctctcgtatccaccaaccatttcttgtttaggagtcatccatgtctttctatttcccaagacgatcaaaaatatttgtcgactgggatttggccacaccctcctgaccatggggtcgtgatggttgtgttagggatttttctcgtatgatgacaacatcatctttggactggttgctgtcagagcgtttgtccgaagcactataataattattcccctcaaaatagtcttttgtagggttataagtgcgaaaagagctatattgattactcaggtttaactcaaaatagtctacacataaatgaatttccaaaatttggtctcaaatgtgttttagaccggaaaacctaacctaaagaagtggcatattattttttaaataaatagtaaaatgtagcacataaattttaattttcttctattactgattatttgattaaaatttcatttttataaattaattttttttttaaatttacatttaattatatttatttttaaaaattttccttaagtagtattgaaaaataatctctatgtatataccttcaaacacttttcctgttggttgttgcgtacaaataatacaaatagaatattgatgcagatattatgtattaataatgatattacatatcttaaaccaccaatcaaccttaattaaaagcatccaaggaaataacatttctctcaagttgtgatgagatgaggattagagagaacatatatagtactagttacgtggattcatatagtccactagcttatttctaggtttggagtttactaattaattataataatatttacaaccctatactatttttttttttttaat

SEQ ID NO: 221202 - DNA, 3913 bp, Cannabis indica
atagacctaagatcaaccattgttattgacttaaaaagatataacggtaagtttaagatatcttttctaagatcaatatcggccccttccaatgtatactccatatcatgtgttgattctagtaaaaaaacaagaaaaaaaaagctctggaatgctctcttagggtttttcccttttcttctggatttttccaactcttcttccatgtgatgatgtgtaaccgtcgttttgtttccctctctagttttgtttctttctcatcatttctaattaggtttaggcatttaatgcacctcagtgaatctaaaaagatctatttctatttaatactcttgcagaccttatttaaatctcttttgtttttcttccttctctctgctcagcgcaccgtcagtagaagaactcgggggattttggtgattattacctcttatattgagggatcacgccagtttctaattaatgttgagatggattcggcatcttccactccttctcagatgttttttgttctcaagtattttccttttctatatatatctttctatgtgttacttaatttactaagtgtttctctgggtatttctttatctgtctgtcctatttcctctgtctgcaaaatcctttcctactgtgtcatggcgagttccagtagaagttcgcctcgtcatcttgctttgaatgacgaggaagctcttattcataactttgatggagtttctttgggtagtggcccttcttctgagtcttactgcttagttgttaagatcctctctctgaaaagcaattaacctgattggcttgacaaagctatgagggaagcttagaccttaagatatcctgtcaactttactgaataccattctggtctctttcttgctcattttgggtgtgatggagacaggcgtatggttattgagaaccacccatggcattttgaccattgtctgatggtttttgctaaccttgagggtcttaatcttcttcaaccaaaacagcttaggttcgttcccttctggatgctaatccactatattgcttttggatttaggtctcctagtcttgctaaaatgatattggagatctcatcgaaatccataaaactactctaatggaaatctgtggacctttcctgggaatttgggttctcttagatgtttctaagcctattcgaagggggatgcaggtgttctttcgaagtctgggtaggaccaaatggcttttgtttaaatatgagggtcttcagaattattgctatttttgtggaaaatttgaccatattttctctaaatgtggctcttttctgcaacgctgtgatgagggttgttacccttctgttctgcctttcaaggagaacattagagctcctctcaaatcatagtttaagcgtgacccttttgatttggcaaactctattccgtttgaggagatgaatcttcgatctttggctcaaaatcatgatcttcaagatgttgttaatcagtttcttcctcaagcaagtctacccagttctctggatactcccattactttggctcctgccgataaccaggttcactcctcgtctcctacttcctctcaggaagtagtgacttctgactctcagtttagtggtcttcagagtcttctttgtgctgtttctcaagcttctttgaatgagccatccactactattcatattgacaagggaaaagggattcaagcttctgactcctttgttcctcatttttctcctcgagctttatctataggtggtggttcgggtaccaagagatcttttactaggcaggatttggttgttggttcctctattcgtggcatgttgaagagggcaagggccaatggtgctgatgttatggttctttctgatgattctgatcatattgtactggcgggtgttgctgagcaaccctgcctggaaaaatgagctttatttgttggaatgcttggggtttggggagcccccgagcattccgaaacctttcccttcttgtgaagcagcataaaccttgtttactttttgttattgaaactaagctaggagctggttctagttctagttttaagtctaggttatcttttgataatgttttagaaattcctagaagaggtttagggggaggtttgtttcttttttggactgctgctgttgatgtacagattaataattactcctctaaccatgtggactattttgtatctatgaatgataatattaatactaaatggcatctctcttgtttttatggttctccttatatttcgaataaaatggatacttggaccctcttgcatcggatgtatgatattgctcctagtatgccttggtttatatttggtgattttaatgattaccttactttaaatgatagatctaatgcttctaaccctcctgtgtatgctatgactaactttcagcattttcttaataaatataatttgcttcctctgccgtatatagggaatagatttacttggaaacatggtaattcttttgaaaggcttgattggtgtatcgttaataactttggttagatctttttcctaaggtgtctcttcatcacttaggtttttttggttctgaccatagggctttaaaggttattcttgaggataatctttttaagtcgtctggtagcaggaggtttatgtgtgagaattttcggatttctgaacctgactttctctctgttgttaaagatggttggggaaacaatttttctaatctcctcaatgccgaccccctatcctccttcctgcttaagtaagactcctgtcttaagactgttcaggcttggagttctactaagcaaaactttaattgtagaattaagtctttacaggatcgtcttgagtctctcctctcctgtcaacctcattctgattttaacagtaatcaagctaaagagcttcaatctcaaattgactctcttctttttaaagaagaggttttttggaagcagcgttctagaataaattggcttaaggctggggataaaaatacaaaatattttcattcgaaagccaattctaggcgtaggaataatctaattcgtggtattgtcttggattctggtgagcatattgattctcaacaagatattagtaaacactttcttaatttttatagtactttatttacctcgcaaggttcgaatgttggggctgtggatcaacttttgcagtttatccctaaccgtctctgtgtttctgctattcaacagcttgatgagtcttttaatagtgatgaggttaaggatgctcttttgcaaatggcaggggataaagccccaggtttggatgggattaatgctatgttttacccaaaaaaaattgtctacttttagtcctgatttatgtaatgctcttctatctattcttaacaatcaaactgatgtttattctattaatgaaactgtaattgttgttatccctaagaaaaagaatgcttctaaaattcgagactttaggccaataagtttgtgttctactatttataaaattgtttccaaagttttagctaatagacttaagaatgtgcttaatgatatcatttctccaaatcaaagtgcttttattaaaaatgtggtcatttttgataatgtcttcattgctaatgagatggttaatgctattactcataggaagttaggtaaagttggttgggcagctcttaagttagacatggaaaatgcttttgatcgagttgagtggggttttgttaaggctattatgcagcacctttgtttccctgttaggtttgttaatctcattcttagttgtctttcttctgtttctttccgtctcctaattaatggctccctcactgaaaaattctcttcctctaggggcattaggcagggaaaccccctgtccccctacatttttcttcttgtctcggaagctttatctg

SEQ ID NO: 221203 - DNA, 2125 bp, Cannabis indica
tatgaggaccttttatcccggttcttatgtagaaaatcaggataaaaagtctcatttaaaacgtaagttgcgtttggcaaatgcataaaaatagcatttctaacactgttttttgtctgtttttcaaactagacccttgttccaaactttttttaaggtttcaaatgtaaaagtaggatcaaaagtttttatagcactttttatattttcaagtgtaaaaactgggataaaaaatctcttttgttgttgtggataacaaggtgattcaagattgatgagcaaaaacaactaccattttaaggggagatattagagaacattgtcccacatggattaaatataaaaatattgagcgatatatatatatatataaaagaatatggactacttcactcatgagcaattaattttgtgatagaactccatgtttctcaacagagctacttttgtctttttcttttcaaataaggttaagtaactagttatgatcaagattattttttttttaattcaaatttaggtataccatcgtgattaacttaagtaactagttacgatcagtttaagttatacctatttttttttttttgtgttaggtttgtcgctttgagagcgataaataattaaccccatattacttaaaaacataaatattaatgtgatagctagtaaccgaccaccatcgtagtattaaatatataaactaaatttataacagtaatcaattacttaccactagattacaatggtaattgaaaagtgccaatatttttttataatggtaactagttacactagatcgtgatcaaatgaaaccaactacacatacaataatagaagaaaatggatggaaaaaaaatgaaaataaaaatttgttaagaaaaataatactacttgaatacacatataattaagtttctatattattatttttaatatatatatatatatcattttataaaaatccaaataattgtatagaaaaataataaaattactttcacaaaaaaatcacatctaatactaaagtctatttaataaaagattgtatcacaaataaagtattataaatatataggaagaaaaactcccataaaaaatgccttaagaaacttatcaaggaaaaatgattgccatagattttaagcatttaaaaaaaaaatctcatatatgcatttgatttaaataaaaaaactaattatatttaaattaagatagtattacacatttatactttaagacttgtgtgatacatcgtattgtattgtattgaattttataatattgtattgcattgaattatattatattgtattattattatttaatgcaatattatgtttgatattgacttttattaatatattgtgtaaaattatactatctttaccataaactcgacttcaacctcgaccccgttagtggataaggatcccatctccagccctgagccacaaatcctggcccagacccagacccagaccccattccaaaaccctgaccttcgaccaggggtccgaggactggggcctggggccaaggttcagggagtccaagaccggggtcgggtctgggtacaatgttcgggtccaaggtctaaatttggggttgggtctggagctggagtctgggtctccaacctttaactctttctaaatattataatacatgctaatatgtatcgttttttatgtattaaataatacgattcacattgtgaaaagttatggtcgtaataattaatataatataaagttttatccaaatacagtgttgttccttattatttaatataatacaacacttatacagtttactgaaccagctaaaaatagttatatttaatacttgcacatttataatataagttgcttaaattataaaaaagacgaacccaagttgtactatatttattaaaattgttaattagtactttcgacatttagagggttctatttttttattttagaattagtagttatttttttatttgaaaaaatatgcataaaataccctaatattttatccctaaactaatacatatcaaaattgaaaacatatgcccactttatctaaaatctaaaaatacccctctcataactcaaccccaactctctctctctct

SEQ ID NO: 221204 - DNA, 1991 bp, Cannabis indica
gttcttagaattagtattctagttgatttcctgtcaataaacagacctaagtgatattaattatctgtagactgtttatgaaagtagacactgttcagagttgaaaatattctggtggattgaactttagcactttgtaaaatgttaagcatcactaatttcctctctaatattagttttggagaaggatctgattatattgccaagctttctatgtgttaatcttggagccagaaaggtagttccagtggaaaagagcataatattttttttaaaaaaattatggtgtttacacaaattgtgggatataagtttgccaatttggtgattggttcatttattattcatccattttcttcaaaatcttatcttgatatactgaaagatcttaattatttgtctgattgggttattttatttcaacctacagggctgagggttattggagaaactgtagtatctgccttagtccttgatgattcttggctttggcatcctgacttttccattgcggcaaagtaataagctggacattattttatcattaatgatagttccttctatcattactattggtaatgctttgtaaaccatatcaaacttcccatgtttcaggtatgtaatgagtcctcccattagagcatcaggacataacaaggctcttcaagctgcactttcaatgggagttctacaggttctccttcatcattacaaaatattgtgaatttaatcaattgagcattagaatagactagatttccatcatatcttcagattcttggctttgccatttctgatatttaaaattatatataactttgtgctgcaaagagtagcacaatagcacatgggttctgattaagcattgctctcaatttttgcagctgttgtgactagcagtttgtgaccttgattgagcgtagttataacttataccgttgtgaccttattactcattgctagaggaagattgttctactctctgttgacccgtattatagttttttattctacaaattatgtatctcatataagttagaaatcatattaggaccattagaagaaaaaagaatggtataacacgagaaaagctaatacacccttatttaggaacaggagtgagtgtaactaaagagttcatgtcttgtgtggtgatatggatgggatctttaggttccattggtttcctctttgtggcattaatttcttaaacaaagagattttgttaactcagccccactcaagacagcaatggatgaatccaagagaatagaacaaggagaattgctcagttggatttacttagccatctttactcacctgcatagtttgactacagaatttctcatgatgtttcttggagtattcggtctacctagtactcacattttttctcattgttcttacaagaaaagatcctatcagcaaacaactttagtatgattgtgattggttcttaggactcaatcatgtcagaaagtaaatagattgaatgaaattgctagaattctttattaatcttgctgaaatgtgatacaaatttccaagtattcaagaagcttgatgtctccaagatgacctagacaaaccaattttcccgataagccaccaatgttctaggtcctcttgtttatacagtcagccccaaagtttgtaattacataggattcataggacataatgtttaggccttttcaaattccttattttatgtgatacatgtcctattattatatttccttctagaataggtaaactctgttagtggcctacaactacaagggatagcaaattattaaccatctcacgtgcctatttgctgtgaatttataatatttattttatactcatttgttactttgtattttctcatataataggtttggtatcctgtatttttaataatgctctcagttatattgaattacataattaaatttgaatttgaaactcgtataattgaagacagtttgatcgtattgataaaattt

SEQ ID NO: 221205 - DNA, 4209 bp, Cannabis indica
tctaatttaagttgttttaaaataataaatttctgaaaaaaggaatccttatgaaacaaagaatattggtcgcgtaactgcacgaggagcaataaagaaaaaagtcagcgtcttcttcgttggggaatgtggtcggtgtacaacagtgcattagcaaaagagtgttcttttgtgtataagaaaaagaaagcacagggaatgctatattaatatttcggcaggaagaaaagtgcttccagaaagttcgcaaaaccttttacaaataattgacgacacatcagcggtaccctaggacttaaaatttttattttcatcagcggtacctttcatcaacggtgccttcagttgaaaggtgaatggggcctttagtaggtactattctactattttgattataactagggcttaaaatttttactttgggatttaatatatctatcaaattcttttattgaatattatttttcgattaggaattattaagaagatatttatatagactaattctaataggaataggaaactcagaaacgaatatatattaagaaggtcttgtctcttgacatggtgagaaagtgatttgcatgtaagtgatttgtgtgtgttattcgattgttttgtgagtgttttgagtgtgttatccgattgttatgctgctggttgggtacgatggcctcatcaagtttggacatgcctgatattgagcaggggtatgctgatatcactattgaaggtgaagacgatggggatttgggcgtcaattttcttgtgccggatgatcaagctggtcacgatcatctatctattgttggctttttccttactgctcggccagtagactttgaagccatgagacatgtcatggcatctctatggtagccaggtcaaggggtctacgcaaaggaaattgattctaataggtatttgttttagttttatcatgagattgatttggaaagggtcgttgaggggagttcgtggacattcaatcgtcaacagtttgttttttggcggctccaaagaggtcaagatcctaagaaggtggtcatcaatagtcttgatatgtgggttcagatacatgggctccaaatcggtttcaaatcggcatctgttgtggaacgctttggcaattttgttgggacatttatcaaatcagacccgaagaattttcagcaagtttggcgtgaatatatgcgtgtccatgtcccaatcgatattacggtgccgctaaaacgaaggaagatactccagcgaagcatggatgatccgggtttctgggcagagtttaagtataagtatgtccctactttttgctttatttgtggtgttatcggtcattccgaaaagttttgttccaagctttttgaagtgtcgattgaaaatactgtaaaaccgtatggggtttggatgagagctcaaccttggaggaggaataatttaattggatcgcaatggttgcgggatggtaatgagtcggacatggagtttgttggccggggtaccagtacaagtgcggctgtgggtggtctgtcttcctccaggccgatttctatggaggctggtggaggggatagggagatgtcgtgtgcggcaaggaggaggttggagatattttttcagctcctaaaaataaggagcaaactgtgggtaatgttgattttgcaaaaaatgttgattttattttaaataatgataatttgtttatggtaaatgatgtggaggatgggtgtgatagtttgattgtcttggacactaagagacatcgtatggtggaatctcaattgggccgaaaccaggtggaaggctctaatgtgagccgaattgatgtggaggggtccattgtgggccgaattaatgtggaaggggttgatgtgggccaaaaccaggttgttgggtcggctggtgacgatatatgtagtgagatggagactagtgaagaggttggtgtgcatggttacttgggtgcaaaaaatggtctttcagtgggtgctggttctcaggcccaccgatcattatgagtatcattagttggaattgccatggacttgggaacccgagggtttatcaaatccttgtggatctagtggtccaaaagaaacccaattttctttttctttatgaaactttttctggtaaagagaaacttgaaagacttcttgttatgttaagttgggctttgatggtttgttttcgattgatgctagagggcatagtggaggtttggctatgctttggcgcaatgattctgaagctcggctacttggctattcttttaatcatattgatatggagatatctgaagatgcttcttctccttggagattggctggggtttatggggatcccaataggagtttgcggtataagacttgggacttgttgcgaactctgaggttggagtctaatcttccgtggtgtgtcattggcgatttaaataatgttactagtcatcttgataagaggggcggtcatgattatcctcaatggcttctggatggatttaatgatgttcttgctgagtgtgatctcattaatcttgacttgttagggtatccgtttacttgggagcgcggaagaggaactgatgcttggatagaagtctgcctggatcgtgctctggtgtcttctcaatggtttcaacggtttaatcttgccaagctcactaatcttgaaatcacagcttcggatcactgcctgttattgcttgagcctatcattagtaactttgtagttccatttcggcaattcctctttgagaatgcgtggctgcgtgagcccatgtgtttacagttatgtctgactgttgggagcattgtagtggtcagccgattactgagaagttgaagtattgcggggagatgcttgcagtttggggtagagagtatacgggtaactttaagcaaaaaatctcgcagtgtaaaagggagattcggagatggaagaaagggagagatgctacttctattcaacgttttcgtgatgctgaactgaaactgtgtgagactctgaatcggtaagagatcttttggcgccaaagatctaaacaattgtggcttcgtaaaggtgatagcaatagtaagttcttccacgctaaagctacagataagaaaaagcacaatacgatttctcgtcttcaggatgattcgggtaggtgggtgtcgtgggatgataggcttcctcttgttatgttggactatttcaagaatctttttacaacttctgcatcagagttttcctcggtcgttgatgttactcctagtgctattactttggatcataatcaacagcttcttgatccggtcactgaggaggaagtaaggcgtgctctgttccatatgcatccgggtaaatctccgggacctgatggtatgacgcatggtttttttcacaaaaatattggaatgtggtgaaggatgatgtggttcagcagattagagctttgtttgatactgctattttacctaatgcgcttaatgatacaaatattgtgcttataaccaaaaaaaaacaacctatttccatcagtgatttgcggcctatatctttgtgtaatgtcctttataaaattatttcgaaggtggttgtgaatcatcttaaagttgttttgccacatgttatctctccaactcaatctgcttttattcctgggcgtttaatctcagataacattatgatagcgtttgaggtaatgcattatatgaagagaaagcgtaagggcaaggagggatatatggctttgaaattggatcttagcaaagcctatgacagagttgaatggggttttcttagagcaatgatgacaaaaatgggtttcgccactcgttttgtggatcttgttttggctacggtcggttcagtgaggtacaaaattgttcatggtgggcatgtgtcagcttcttttgtgccaggtaggggtattcgtcaaggggatcctctgtctccttatctttttctcatttgtgccgaggggttcacttctctcattaagaagtttgaagttcagggtcttttaaagggttgtaaggttgcgaatggggcaccgttaatttcacatatgttatttgctgatgatagctatgtctattgtcgtgccaatgaacgggaagcttctaatgttctgtgccttcttcatttttttgaagctgctactggtcagcaggtgaattttgccaagtcttcaatattttttcagctccaacactcctcttg

SEQ ID NO: 221206 - DNA, 1845 bp, Cannabis indica
ataatcagggtataagggtttcctaacaattcgtattttattaaaatacattgcctattttgtttactacgattttaaaccgtcgggaatactaaatttttcccaacagttttaaatagttacttaatttttttagcgatggtccccgaaaaaaatcgtttttaggatcgtcacgaattttgatatttgtagtagtgcacagttcataataatggctctaatttatgtgaatgacattgtcatcagaggaaataactctataaagtttaacaactccattcaaaggtcgaataaggccttttctcttaaagatttgggggcactaaactacttcttgggaatagaagtttatagagactcaactggaatatacctgtcttaaagaaatacataatagaccttctccacaagcttaacatgaagaacatcaaaccctgtccaacacctacggttggaggaaaacctatctctccatgatgggactgtacttgaaaatcccttcaattataggagcatcataggagctatgtagtaccttactcatacgaggccagatatagcctttgcagtaaaaaagttgagccagtttctcaaagacgctactacaactcacttgagtgcagccaagagaatattttgattcttaaaggcacaatacattatggaattcaaattcattaaagtgatggacttgggattgtaggttactcagacgcggattgggcctgctgcagtgatgatagaaaatccataggcggatattgtatgtattttggagaagcattcatctcacggtcctccaaaaagcaatctattgtctccaagtctagcacagagtcaaaatacaaggccgatgctcatgttactactgaaatcacttggatttagtcactgcttaatgaaattaataaatactcctatagtgtggtgtcatgataacatgagtgcaagctcacttgctataaattcagtctatcatgcaaggactaattgcatatagatctggatattcattttgttcaagataaagtaattcataagtaaattaatcttagatacaaaaggtctttcccactctcagtttcaattcttagttgacaagctcggtgtgatctcttcactctttcgcttgaggggtggtgttaagaattgattaaacaatgtaattaggctgctaattcttttcgttaaaggtagtgtgctggtgcacacactactagatgtaagaaaattatgttatagcctttttgcttgaattggttgtattgcagtcccatcttgtaggcattgtgccatctgttccctacttttgttctgtattgtaatccttcattatataatgaattgttctttcttagcctccttttgagttaagttttctctattggggcatttggcagtttccaaactcaatcataaaaatgtgattcatactaattgatgagcgattctagcaactatcaatgcatgaaaagtcgtttcatcaaaaaaaaaattgcaccttggacatgctctactaataagtatatgtttatgctgaaattggcacaagtgggaagagaattaaacgttgttgataagtatattttcaacgttatttctcgaagtaaatacaataattttaaataattaaatatattatttactactcaaatatttctagaagaaattagaaacaacaagaagatgaaatatgacacacaatcaaaatgtaagaaatctatatatcatgtatgaaattgaataatagtggtcacgtaggcctgtagaacgaacacgcttatatcaaggtaaaattatatttaactattgaatagaatatgaattgtacacatattttaattg

SEQ ID NO: 221207 - DNA, 2582 bp, Cannabis indica
taggcaacatttgagcatctaggagacatatatttaatgaaaagcatgattattaaatgtaaataataattgttatatttgggaaggaaaatatgtgtgtgctagttagggttttggcgtgaagtgtataagtgtgtaattagtacctgactcactaggattgttgagttcaagattatttgaaagaatgaaccctaaaaaatcaactagatcacaggatgagtctgtagagcagggtgataatccaaccaatctaccagcattgccagctcctccgcataactcttagaatactacctgggcgatcaatgttaatccttctgcttaatggcagcaaaagtttactaaaatacaaagtattatactccatcaagaagaagagttgcgacgaattaggcaaccggttcaggcagctccagtagagcaagggattcctctagctcctgctcccatgttagccaaccctagattggccctgaaaccacatcgagattcaatttttgagcagtttgtcaagctacaacctccaacattcttgggtggcactgatattataaaggcagaataatggatgagtattgctactcgtattccagataatatgagggtagtaggaactgagcgggtcaactatgccactttcatgtttcaagagcatgcccgtacctagtgggatttagtaggtcactcttaagacctcaatacggtaacctgggaagaatttaagaatttatttgaagaaaagttctacaacattgccatccgtataactcagatggaggatttcctgaaactggttcaaggtgataagtcagtggctaatatacactggagttttattgcttgtctaagtttgctaacaaaatggtaccagcagatttcacccaaaaacaaaattatattactgggttggatgccaggattagtcgggatttaaagattaccattgatcttgacactttgtataagaaagtggtagagagagcactgattgccgaagaggctgaacaacaaattaagaagcagactactatggatgccggtacgacatcaattccaagtgctagtggtaacttcagtaaggggactggtggtggtattccttatcaaaagagaaagactgagactttcagatcatccagattgaacaagagattttggggtaatagaggtggccgtcaaggtggtggtgatacattcaggtcatacccaaagtgtcccaaatgtaagaaacactatcagggtgaatgtttggccaaaacatgtttccagtgtggtatggtgggccactttatcagagactgtcctaaagctaagaaggaggaaccgaagaaaaacaataaccaaaatccaagatgtctattcacggtaactcaggctaatgatgatgctagtccatctgttgtgaaggtcagttgactattaatggcttttcttatacaatattattttattctagagcaacgcactcttatgtgtcaagtagagtggtcgaatgttttcataaacctctcaaagtttatgcttcggggtttagaaccatgttaccatttggggagctaatgatctcaactaggtggataagatctttgtcaattttgattgacagttgtgagttaagtgccaacctgatcgaactatatctgtttgatttcgatagaattctaggaatggatttcttgtcaaaatacggggcaatgattgactgtaagtgaaagatggtggtgtttgtatatgcccccaaaaacatacagtgcccctgtttaaattttgcaatttactattttgaccttgatactttaattctttaatttgtaatcaatttgacaaaaactagcataaattgcaaaatggggtgcgttttcagccaaatttcccaaagggaaagacttgcttgaatcgctctgtgatttcaatcagtttcctaagctatttcttgttgaaactttgcaaaaactagagaagttttgcctaaactcccatgcgttctttagctatgccttgattaaaaggtactgcttaagatccatagagtgagttgcctgcttcctagttttcatattgccctagtcgcaaaagacttgtttggaagaagtctaaggaaggagaaactgcctgaatgtcaccacgtttttagcctagtcctttactaaggagtaacgcctgaaatcagtgacatgatcagccattttttcccaaaaaacctgacctcacaaaattcatattcagggaacgcctggaacatagaagcccagcctttcgtgagaaaccatccctatcagcgtttgatgggcaacatcctgtataattaattaatacttgaggcaccaaaaaggcattaagttccatgaccacttagtggcttgagaatgaagtaataacccattcacgctgcctaagtggttaattaattttaagttttgtgatttttgaaagggtcttaacataaaatgattatgtttgttgtaggagacaagtattgtatctatggatacttcctaagtaagtagagggattaaaagttcataagtctaaggtttgagactctggccattggagccagggacctttaacaacctaaa

SEQ ID NO: 221208 - DNA, 3597 bp, Cannabis indica
aattggtattttggtcaaattctccttatgaaatttccccagagcattccaaggcttcataatgatgggtttcctgttaaaaaatacataacctcctacaattatattatccctattcaccactaagtgaaatctaacaacaaaaactccatgtgtgaacagggacactttgccaatacctttatcttttcaaattctatggaagaagcctttcatgacatgaattgggggatttgctctaaaaacataacacaccaatgaagagttccttaaagaaacctcattcgctatatcctcaaaggaaatcttaattctgttctctatttttccttttacatttcaccagcaatctcaggtatatgcgaaataggggtagggatatcattgattttaactctagacattctctcctctaaagctttgatgactcctatccaggatgttatagtattcgcatcatcccttttctctagaggtataagtgtttcaagaattgatcttggggcaactgaaggcgacatctcctcgagcatatcctcaatagaggttcccccttcactcctttccttgtccttcttagagtcccccgattctgaaaaatcaattgtagttatccccattaaatctgctaccgacttagttttgagaatatgatcctccgatgtcagccctcctcgcttcacgagctttgcattattagcacttcctttcgcatccttcttcactccctttcttggtctccctcgacccgccatggccctagctcaaaaactaaagatcacgagaaaccctagcaaagacgtaatgtgacagtgttaattttacagttaattttaatagaaaaataattaaatgtcttatgtataaatatatatatatatatatatattaagaaatagagcatattattatacactactatgactataataagtccaaaattttatattgagcacttagagtttcaagaaggggggtgtgaaaaacatggctctcaaatggggaacaaaaagttagatgtgaagaataattaattaataattgcttttgtcacgtatacaaatgaacatattttatatatatacctatagtatatatataagacgactatacagtcatcgtataattgaatcactacatttatatatctatatgacttggcatgtcgaaagctctagcatggatgataatagagttcatatacaatcaattattgaaatatatttacgtagtatatattattatctcatcataattattacttttgagcagactttggattcttttgtgtctagagagagagagaaagagagagtaaaatccttgcttagagttgagagggtccagtagtgtcctgtttggatttgtttatgatggaaagttctctcatctctctctattattaatcaaaaaaataaaataaaatataaagttttaaaaatgatgattgaaattaagagtctgtcctttgacttatgccttctctctctctctctctatatatatcaccataaatacaagctcttcagaattatatcatctctctctctctcttgtattactctccaaaacccaactcttgtttattaaaccaaaaaagaaaaagttactaagaagttcttattcatcatcttcttcttattattagcttggaaaattaaacttcaaaaaaaaaagaaaaaaacagaaatatgggaagagctccttgttgtgacaaggctaatgtgaagaaaggtccatggtcacctgaggaagatgctaagcttaaagagtacatagacaagtatggaactggtggcaattggattgctctcccacagaaagttggtatgtatacatgtttgaattttctttttataatcatttataaatagctgatgatgaccaggcttttaacatgatgatctcttttgttttgacatgttttgtattgttaaagaaaatatatatacatagagagagagagactgataagtgtttgttgttttgtttgtgtgtatgtgtattaattggtttcaggcctgagaagatgtgggaagagttgcagactgagatggcttaactatcttagacccaacattaaacatggagaattctctgaagaggaagataatattatcattaacctctttgccaacattggaagcaggtacttcatcatatactttgattacttacataaatttttttttttgggtttttcttttctccttaattttcaaaatctactgcaatgatttcttataagaaaaaaaggtttaaattttgcagaacatcccacttattttcctcatgatcttgtcttgtcatatttgaatatatgaatatatttattgtgtattgatttaaaagataagaagttattaaactcatctatatatatttaccaaacaactgttgttgcagatggtcaattatagcagctcagttgccaggcagaactgacaatgatataaagaactactggaacaccaagctgaagaagaagttgatgagcataattaatccaacaacacaaggactactactgagaaagcctcctcatcatcatcaaccttccactatctcatctcttcttcaacattcatcatcaacatctacatcctcatcttcatcatcaccatcatcactaatctgtactagccaaacagggtctttcactggatttgaacaacctatatcatcattctcaccaactactactattcttaaccaagagagttaccttactcaaatgccaccacattaccaagtcaacagagaaagttttcaacaactcatgtttagtaatggtggtggtgaagccagttgcagctcttcagatggaagcaacagtttttactataataataataatggggtaaaacaagagaaccaagaagtagtgatgatgatgtcaaatgagaatagcaacaacaacaccaccattaataatgttaatgttaatggaagtggtttgtggggttcttcttcagagcaggctccattagagtactttggtcttgaagagattaagcagttgattagtactagtagtaataataataataccattagttgcagcaactttttgtttgatgaaagcaagacagcggaggaaagggtcttgtactacttctgatgctgactgtgggtaaaatcaatcaaaaagatttggagaagagtggcaaaggaagaggggtatggttaaaagataccactagacttggacttgggtttctttttgggtgcgggaggtggtaggggtagtaggcttggacatcatatacataattctgatgagtaaacacttttgttattttaaattttttatttggactgtacatggtaaaatgtttcctctctgttgcatttctttttgggaaatgatgttgttttgagtacagttaactgcccccccttactcactcagacataaatttcatgatagtcagaatatatctcatcatctttttctatttagatcattttacattttataagaactatggcttggaatttaaaaccaagtatatgcacaattatcaattgtgtttttttttctccaattagtaatattttcttctattactattacaaacctcttttttttttttt

SEQ ID NO: 221209 - DNA, 3495 bp, Cannabis indica
caagatcaatgaaagaagcatggccaaatattaggtcttttacttttgctcttttttttctttcacagtagaggagaattggttaaagacttaaagcaaagcaacccatcatgtatatcgtatgttttttcaaatgagacatacccagatgctgttgttcaacttcgatacagtcactttaaacttagattaccccttttaactctaaggtttttttttttttttttttttttgattctttaaaaaaagagatactgttcattatcctaggcacctagctaggagctattttgtacacggatgttttctttttttctttagttttgtttacgtataaagttttccctttagtcttaacatctgtacactaatatattcttcgattcacacccaccaccaatatggccgacttgccctttttatttatttttttaaaaaataggagtatccatattattacttaagaaattaacttcaaagttcaaacaaattgtaattacctcgtatctcttattaataagattaagactacatacatcattttacttataagtatttttttcgtactatatatattttttgcttaagtcttactatatatattatgaacctatataaacttttttattttttattctcagaattttttttaatttatatatttttaccaaggtttcggtactatatgtggtataatttaactgtggagatcaaaatttgtgttgctagtcaacttttaattctgtctcgacccaaaatagaaaaatgacaaacccattttacatgagacgtatggttataaaatatatttatagcaaatacttaacgttgtttcttaattaaataaagagaagtttataagaatatatattttttatttaatttataataataattttactgttattattgacgtactacgtcagttaaatttaatgcatatgacgttttttaacgtttttcaattttttttttttttagtattttttatgtaacattttagttactaatagtactattaagaaactaattagttatatttttataaaaaattttatttttatatcatataatttgagatacattttggttatctctaaaacttatttgtatacattttaataattaattagtaatttttaagttatactatgataaattataatttaaaatacatttaagtaaccttaaaaaatatttatattaagtagaggataaggcagaatcgtattctatccattgaaacaaatgagggggaaagctgaacagactcaaatgttgctacatagtttttccaaagaggaggtgaagaaagctgcatttagtattgctgggaataaatccccgggtcctgatggattctcaagcagtttctttcatgacaactgggagagcattggtgatgacatttgtgatgctgtggtggattttctggaatcaggtaaaatacttaaagaaatcaattctacgattattactctggttccaaagattaaatgtcctaacactgtaaaggattttagacctatagcttgttgcaatgttatttataaaattgcaactaagctattgagttctagaatcagaaatatccttcctgaaataatttctccttctcaaggaggatttattaaaggaaggtatatagggcataacatcatgatttgtcaggacttggtgagacattataacaggaaagccaacaagccaagttgtttgatcaagcttgatctgcagaaggcctatgacaccattgagtgggaatttttagaagaaatattggatggattgaattttccgaggaagttcattcagctagtaatgaattgcatcacaactcctaaattctctcttatgttcaatggatccttacatagattctttgaagctaggagaggacttagtcaaggagaccccatgtcacccctgttgtttgtcttgggaatggagtatctatctagacttatgaagaagataggtgagaaggaggattttagattccatgagagatgcttgggactcatcaaattgaaccatttggcatttgcagatgatgttttgctattttgctatggagataacaaaagtgtttcttacttgctacaggcaatcaaactattttcactcacttctggattgcatcctaatgcaaataaaattgctatgtattgtagtaatatgcaggaagatagtgtgaaaaggctgatccaaatctctggattctcgagacaggaattccctttcacttacttggggattcctatttgtgcgaagaaattttttggcaaagaatgtgagctgttagctgagagaatgacagctaggattaagagttggaggtctcgaaacctctcttttgcaggtagaatcactttgatcaattcggttttaattgccattcaagcatattggagccagattttggtactaccaaagaaagtaattaaatccatagaagccatttgtagagcttttttgtggaaaggccaagctatgtttcatgggggtggggctgttgcttgggaaagtgtatgtcagcccaaaagtgcaagtggtttgggaataaaaaagattgaggaatggaacaaggctgctatatgcaagtacatttgggccattgcgaataaacaagatagtctttggctaagatggattcaaagtgtctacatcaaaaactaggaatggtggagttacaatgcttccatacatgctagttggtattggaagaaggttgtagctataaaaaccaactgaaaaccttgtgtaatgtgactgattttcagagggacaaatacactattgcaacaggttattgcttgttctctcctactccaaccaagctgaattggtgcaaggaagtatggggtagattgaatactccgaaacactgcataatcctttggttagcaatgctaaataggttgaaaaccagggatcgtttgctgaaaatcggattgcaaatagaaggcagctgttatctttgtgaaacacagcaagaaactggccagcatcttttctttgaatgtttttttttcttgtagcaggttggtggaaatcaaacaatggctgggctggaatgctacttctaacagcctccgtagactactgagatggatacaaagggccaagctctccaagtttcgaaagctagtataccaagctgcaattgcagcccttgtttacacattgtggaagctgaggaatgcaaagatttggcagagttcttctccgaacagtaacaaccttagtgaggaaataaaatggagtgtaaaaatgagatgtaatatgtttttaccaaaaaagatgcaagataaggatagagattggtttagtgctttgtaatgtgtacatacaaagaagatttgattgtgtatagattgaaaatagattgggcccgatggggtgctattagtttgtaaatattgattggtgcaatacaactctctgatttatcaaaaaaaaaaattatttttaaaactgttaattccatttttg

SEQ ID NO: 221210 - DNA, 6079 bp, Cannabis indica
caggcttattagagtgagtggcttagcttagcaatggatgaatatgaccctgctgaggttggattctctaagctcattaaaaagatttcttgcttttgtccttgtctttacctctcctttcattgatgcccctcttcccccctttttgagtttttaggcatagtagtacgtagctggtgtacacaatactctcttctcttgcaaaaaaggatgcatattcatacattttattcccttctctcactcccctccatctccttataaatacccctttccccattcacagttttctacatcttcatttcattgtccttttcttcatcacattgcaatacaatacaatacccctttcccccattttcccaagatgagctatgcacattccaacatgagctctggtttgtttccttcttcttcttcttcttcttcttcttctccttatttacttaaaagttataacctttttggtttcttgtttttccttttctattctctattgtaaatcaagttatggtataagttgttggttttgggatttttcaggtagtagaactgctagaaggacattggagtttggaaggacccatgtggtgaaacccaaaggaaagcatcaagcaacaataatctggctacatggccttagtgataacggcttaaggtattctttttttttgcttttccattgtacaaactctttaatgacattgtggctagctaaagatatcatgtgagtaatgtttttcaaaaagattgttttagaaaaagtagttgtactagttgcaatctctaatgaaattttctctttaggataggataacagtaatgggagcatgatcatgtttataagagaatcaaatcatttacctttttcttagtaaactttaatttgagaagtataggtgagaactcaaaaataatgataatttgtctttttttcttttcttttttcttctctctaatatattccctgacttgtcatctacagttgaatggggtattcttttgttttgtttttaagtagttgcactgtttactgtttttgctatttaattaaaagaaaggattttgagaatgtcaacatctcaatggtggcgggtccatgtgatacatgtttttttcttttccattctaagcttctttcctatgaagattctcattagaaaaactagagctgtgtgctaagtaaattgcaaatacataactcaactaatttttcctttttatttcttctaaagcttaattttcaagaactgtttcagggggaataagtatataccaaatttttgcccattagctcattgaaatgtccaactaaccataataaacttctaatgaaggatatttattagtttaaacgatacttttttggacccccagagtgtttattttggctctttatagcttttatgattatcttcttattattaagttaactacatgtattagcatatttgtggttagtttttctggttctgctgttttccatcaaatatgtggctcttctattcatcaaagcaatcaaaattagatcttttggtaaagttttgatatattttgtcaagagtttgaaaggcttgataaactattattgtatacatagacaagttgtctcataactgttcctgttgtttgcagctcatctcagcttatggaatcacttcccctcccaaatgtaagaatatatatatatatatatatatatatatgttctcacgaccaaaaacttaatactatttctttcattcattaagttgttttgtttcctatattaacttttctactttggtgcagatcaaatggatatgcccaacagctcctactcgtcctgttgcagtccttggcggttttccatgcactgcttgtaagatcgatcacctttttataattttcatcagcttaaaagaaactctcaagttttaatattgataagtgaaatttctatcagggtttgatgttggcgagctttcagaagatggtcctgatgattcggagggtttagatgcttcagcagcacatattgcaaatttgttgtcaactgaacccccagatggtactttctatatatcctgtattatatgaaagctatcaatccatttgattaagaagaaactttttcataatggtatcattttctcatctgatgacagttaaagttggtattggaggctttagtatgggagctgctatggccctatattctgcaacttgttttgccatgggaagatatggaaatggcaacctatacaatgtgaacttaagggcagtcatcggtctaagtggctggcttccaggatcaaggtatgagttggtgaaagaggcttcacaaaccaccctattcacactctcttttccataacagaatacaattaaaaatttcatgtgcaggaacttgaggagcaaaatagaagcatctcacgaggctgcaaggcgagctgcatcgttacctatttttctctgtcatggaaactgtaagcaaatgcataacttctgtactttcaacatgtagatgaatctcatgatatgactctaatcttattattgttattatataggtgatgatgtagttccttacaagtatggagaaaagtcagcacaatgtttaagttcagcaggatttcgataccttacactaaaaccatatgaagggtaacataacaacttgttattttcaacaaattgacatgaatagattaaacacaagcaaaactataatcactttcatcttaaccatatgcaggcttggtcattatacaattcctagagaaatggatgaagtctgcaactggcttatttcaaggcttggactcgagggctcgcgctgagaattttaatttaatttaatttttttttttttttttgggtgaagaagagaggttgtagttggagatgataagggaataatagttataaaaataaaaatgcatatgtaaaagtagaattgaggcatgggctagatgatgttataggtaaactaacctcatagttttcctttgtctgtcctaaaaataaagttttggatgtggttttgttttcttttcttttacttgtagaaacatgatagttattattcttaatattaaatatattctatttggtatttattttgttaatatgaatataattccaaaaataagacatattgtatgataaatttactctattctaattgacattgccaacatatgatagctaatgtaaactttaaaactaaataataatatccaaacttcacataatgtattctatgctaattgtagtaattgtgctcttgaaatattagcaaaagggaaaaaaaatgtggtcttcaaattttttttttgagatgaaaaatgtggtcttcaaattgatcctacatagccatgacttttggagtagtggtgttggtattgggctttgattagggcttggtcttgggtagttgttccaataaggccaccatcaatttccaacaaagtttgccttggtgcttattattgttcttgcctctcctacaaatatatgaaaaagcattttgatttactaagaatttacaacaaaactcaagtgtttcattaaattaatacaataaataacttagtgactgtttcatcaaaaaaaaaaataacttaatggctaataatggatatatagtaaataggattatttataaaaatatagaaaaaaaataattaacatatgtaacatactaagtgtgttattcttttagtcttaggtgtatttaaacgatttttagggagactaattaattaaatatattggtaaataaaaagactagttggggtttttcaatttttttatgtttttctcatttgacattgttataccattattttttttttaataaattatgcaattttattaatagcaatcatctaaaataatagtttgcaattcaattgggatatctcccccattaaagacatgatcaggattaaaattataaaaaatgagtcaaataatcagccacctaattctcaaatcgttttgacaaaaatactaaataaaattatatgaaaaaaattacaacatcacagttaacattaagaatatctatattcagttttatccaccactcacaagatatgacagtaaaaactgttgcagcaacttcattcaatctcgtagcttgaatactcaactattgtgcaaggtacattactgcactactaacaatcccttcagttgcagagaaatttctaactaacaacgatttgatggcaagccatcggaaaacaaaaaataaccaacaactaaacaaaacaaaaaaaaaaaataacacatagacaagactaaaatactcaaacaatgtcacaaaaataatattaaacattcaaaactatatcacagagataagactaatcggtatagcaaaacacaactccgaccaaaccgcaactaagcctaggaaaaatcagtgggtctaatcaaaaaaataagaatagctacaaaatttataatttgagggttgaaacaacaccgtatccttaattcctcaccaacaaaatatcttaaattttagtattttttttattagaaacaaattatattaaaaaaaccaataagaggaagagcacaagtaaagaagatggtactttttgggagctaaaatctacacaaataaacacattagtgagtaacaattcaaagtgacaagggtgagaagcataaataagtgatttgatccaatcttgttggtagcaataagctcttcctcatatatcatatgcaataaattctaaaaggggatcctattgctacaattctccccttttttcctctcctattcactcacatatataatactaatagcccattacaattaccctcatacccctcttatttaactattcaaaggtcccatcacaaacgtgtcctttgcattctccaattcgcttttaccattcatcactgccatctttaaatcctccagctcatgtacatctgaattagcctgcaccagaagaaaaaaccatttaggaatgacataaaaatattcttgttttgataaacattctattccttattgaaaacactacttacagatggacaactatccatttcgatgaacacggcttgcatttttccatagatttccgagttgctcggtttttgctctacgcattctttggcactctccaccattttccttctcatcaactgcaaatgaaaaaagatttagtcattcatctaaaacttagctcgatcataaggaatataatgtaaattaaaactatggcatctcctgttgtatattaaacctgccgtccacacacaaaccctgcattaaaaaaaccatattaaaatcatacagaaacttctgtgaactcaaaacaaaagaaaaatagttgttaatgaaggtggtagatcagttctctttaccatcctgcccaagccaaaaacagttcacgccccaaatcttcccttccttttgcaaagttgtacagataggtgtacataataactgtaggctctgcaactccaagtatcaatagaggctgtcctcccgagatcgagtgaatgatactgcaaatcggggttgaagccagagcttcaactgtgctaaaactaccatcaacctccatagaaaaaaggagttgttgcagtgaacctcatcagagggcaaggtggcacagttacacttctagagcagttgtttctatgactcactctctccttctgctatgtaaactttttatttgaaattgaaactcatgtaggtaaataataacatttcatacataaaatatacattacatgtaaagttacaactttttaaaaggcttaagattatggatcaggaaaccggctagtactggaatagcgatgaaaattacagtagtaaatagtaatagtatacatacatacatgcaaattgttctattccagatagaacagggtatcaactgttctgagctaaacaaaatttccagtgaagtgccccaaataaactcttcactttcctgttcaaaggtgaatatgatagattttacaaaagagccaaagaatagatttttttttaacctcttgttatgctattttcttctttttccaataaccttcatctccacaagagcaaact

SEQ ID NO: 221211 - DNA, 2270 bp, Cannabis indica
ttttaacatgaacagatacagaaatataacaagtttgtcataacatctctagatgagattattattaagttttattttgataaaaaatgagttcagggtcctatttgtacaattttaaaaaataaaaggttcattttatcatttaacaaaataaatggttcaattaataatttttgcaaaacacattgtctaaaatagtataaaaatatttataataaaatatgtgtttatatttatttaaaactttctaataattgggctttaagccctgtaagcccaatttgaatgaaatgcaatttatcactattattatttttaaaaagtggtgttcttgtagtcttatcctatatctatttctgttatataaatcacatttgagtggaaacttctacaagtttgggtgagaagtgagaacaatgaccaaatttaattaggtcatataaaataatttaacctaatcatcacaaattttactaaatgtccaccatataaacttatattaataacctaagtagtaggtaactaccaatgtaattattaatatcccaacataattattgttcacactctttcttttcctttttccatccttttattttattttattacattaactaccctcattgccttcaaacacgacatttgtacatcattatcatatttatagatttgtttttacatttttttttgtctttttcatgttgagctggagatggatccactaaattatataatttcaattattaacttggtcgtgggtggattccttctcggattgtcgttagatatttcgaacaacaaccaaggaaaagaaaacgtggatcaaatctattcatttcaaattatattattacaattaatgccaaaagtaactttttgtgaaaattctgtttaagtatctattattacttggcttctaaaatagatttagtgaaatagatctttctacacacttaagatatattagtgatcattccataataagatacattagagagaaaacaaattcatcttatattgtgtcttcgatctgtctttctacttttacaattttgctaaaatttaatttgtttatttcttaaactataatttgtaaaatctactttcttaagctaggattatgtgaataatttatataaaggactagtatgtgtatttttgtttaaaacttggtaattaaattattatattggcaaaaaatttgcttttattatattaatatggcgagagtgttgtggctggactaccggtatttgttcgaaagtgtgcatgcaaatgcgaggatgcatcgactatatatgaagtgcttgttagagtaaactgtatatatgctatagcactgttgttattataaagggcgcgtacttaaaactaacatttctgggataaaaataaaaataaaaattttattaaatttttatttaagtaaaattcaatgtacaatacacaataaatattcataacttaattggttgaggtgtatcatatattatacaatttcatggttcaaatttaataacattcttttttaatattatatataaatatttttgaggactttaaaatctaattctccttagatccatatatattatattttatttattatttaaactgtatatattatttatgtgtataagatttaggaattggtttattaattttgtgtgggttttatatatattgtttaatgaataatatatacaatcataaataattttttttgtgtaaattttggtattgtaattagaatgagaagagtctacaataccataagtaacaccatactaattagaaggaaagatacctaaatatattataatgtgtttgaatcaaatggattaattcacgataattcaacaattattaataagagaattgcctttaaaaaaattaagaaaataaaaaaaacttttttttttaaataaaaccttatagcatgtttggtttgttgtaatcaacattgtaatggaattatgattacaattctaatgtttagtttgcctttaaactcttgtaatgacattccattgtaatcactattacatcacttgtatgaaaagtgattacactctcatacttcatgaatcttcattacaattacttaaaatgactattttactcgtattttatactttttcttactaaagtatggataattttgtcaatttactatctattccaattttaattttaacaataaacgaaacataacaatcaattcctattacaattcttattgcattacattacattactattaccattac

SEQ ID NO: 221212 - DNA, 3863 bp, Cannabis indica
ataaaatatttttaaaaaaaatgttacttaataaatgatcaacgcataacatataaaatcaaaggtatatttaatagaaaagtagtaacagaagtaatagaaatgtaacataaaatatttactccgtaaaacaatatgtatttaagtgtataaaaattcaaaagataaggtatttatgccgcaaataaaaaaaaaacagtagttcttatagaaaggaaaataacaaacaataaatgtggaagtgtattaaagataacaaaagtattgtcttcggagcaaagctaaaatggagtacccattattgtatatgcctgttcaaatctggaatatagtctctacgacaaaataattgattaaaatgacaactgtgtttcccaatgattaaaacgttagatcatgaaaagaaatttcaatgaagaattaaaatgcgaagaatcatttactgtaattctttactttagaagttaatatagaatgtgttgttagaaagggcttgtcagggaagaaaagaacaaagacaaacataacgaagaaagaaatcacattacatcgatcatcatcatcaacatcatcctgaaaaatcaaattacaacataacgaagaaacacctaaggatcctgatatcaaaacctacgtgataaatcttaaagcacacgacaaacaccttaagcttgatcgaaagaacccttaaaaaaaaacacttgtaaatgggctaaacttggaaaaatgagtagtgggaaaagctcgtaccaaatcttaagctgaccgaaacatagatgcaaggccgagccgagtaatgaaagcgcaaaacggaagatttatgggatcaccaacggtctaaccaacttcaacccaaatcagtgtgttcaaggatctaacagtcagtcactattcctagatttctatcgcaaaagcagagtatcaacccagcttcaaatcgaacatggaaaccagctaatccggaagttttaagtctctactatgatgaggattgaacttttacgaggaaaaatgcattgaaaaatggttctgtgcagccaatttgaaaatgattttcatgtttcaaagctgataaaaatgcagaaaaactagtagttcaggtgcagagacgcagatgcagtggactagtaagtgcagtgaacggctttgagcatcttgaaccagctaagaaaagagaagagataaaccccaaaactttgtttccgaacaacgcaacagaagattgtcggatgcaaccacatttccagtataatccaatttaactcagtaatatgggagcaacaagaagtagaagatagtgaagcagaagcagggatgatgggaaccgtgtgcactaaagatgcagtgagcggtcaacgatgccattatagccgaaaaccagacctcaaatcaaaacaagcacttcaaatcaaaataagcaaaatgaaatattaccacaaccaatatttttaataacaatataaacaggataatatctcaactaaaaaaaaagtagaaaatcgacctccaatactcattaagctgaagtgagaatcgatgcaaatcggtgtccaaagaaccccttttcgcatccaactgtaggagccatccacaataccaagtttctaataaaaatctcattgtcacatatcaacataactaacatgattctcgtcaattcaaccaatcctaatagaactaaaagtgtaacactgcatcatctccaggacagctagcatttactccacttgacgtttcacagctctagtccctgaaatgagagtcaaccatgaaatgaaatgccgataattcataataaggtaacagtaaaaataaataaataatgatatgtgtgtaatatcttgatgtaaattatgcttacacatatcataaactcaaaacaaaagaaaaatacgttaacaagtgtcaccattcaagttaatttttattttgaaattgtttagtttgcaatgaattaatcaattagtatatgctagagaggcagctgagcatacccattggcataaggtgacacacggcgagcatggcggaatggaggagtcctgctgtagcttcgaccacgtgcaataggtgatatgctgcggcgcctgggagatctcctacgcggactaaaactcctgtcacaacatggacttttttatttttgtgctcaagattaacacaccaaaaaatttgggcttggaaattatatgtacatattgccacactttagcttaagataagatgctatcatctcatcctgaaaagcttagtgaataattttcattcctttttcctcatacttttctataattatatactctggattttgcaatgcagaagtgaatacactgctgaaatggtaattatgtgttccagttaaatgaagaaaccattactctttgccattacttcatgaacaaatatccagagtaccgaacaacaaacctgcgtccatatctatcgtagcttgggctcctgcggcgcctaggagaagggctcctgcgccttccactacccaaacctcgtgagccaacacgcatacgacattctctagcaaaatggccaggctcaccacactcatagcacttcaagtcctcacctccaccacgcccgcgaccaccaccagcacgacctcccccaccacctttagagttatgtgaaagctccactcgccaaccatttttccctagacaccaagaacaagaaattttagaaaaaatcatgatacaccaacagaaaggagatcttcagccattcaaaaatggctgtttataataattagaacctaatcgtctgaaaattgatgatgccaacagtcctactgcatgaagcttccaaagagaagaggtaacaaatgtatttagcaacaaataacacctaaaaaaattactgaccatccaaagcttgaatggcatcaatagcatccctgcgatcatcaaattcaataaatgcatatcctggtggtctcctagcaacccaaacactgcaacaatttcaaaaatatcctttcagaggaagaaaaaacaaaagaacattcctaagcaattccaaacaaaaaaatacatagtgaaaccataactgtgtatgaacacaaaacacacagttgtgtaagagttaattgcaaccatcaacgcaagttctaccaaaattacggtagaattcaaatgcttagaaaattaggtaaaaaaaaacaatttcggttacctccgaagaacaccaaacatccggaattcatcctctagatccctttcactcactcgaggatccaaattcccaacataaactcgagccatcttcggaattcacaagtcaattccaccctataaaaacaaaacgacaaaatcactaaccctctgtttgaactttgcttttaagaatgaaaacaaaatctacacaatttcgtctaaatataatatgactcaaatattaaaaaaaaaactctttcttttctccaagctatattcaatttcgaaacaaaacaaaacctaacataatcagtctttgctttgctatccaaaacaacgacacaaaaaataataaaaaagaaaaatacataaatgtttacgatcgaatacagtgaaacataacataatttccatagatatgtacgtacaataccgaaaagtgaaagagagatcaaaatcaaaatccttgccttacgattaaaatcgaagaacaatcggagcatgagagagaaatcttacagagaaattgggttcgaattttgaagattagtaatgtgcgatcgaagaagaagacaattcggattgatcctttaaaatccctaaaccctccctatgaacaagaaaaaaaaggagagaatgattcactgtatgggtagcttgggactgaatacaatataaacactttccacgtgtcta

SEQ ID NO: 221213 - DNA, 1988 bp, Cannabis indica
atccagcggggcgggcggggcagatccttacttgatctggatcaggtcggatcatagccggatcagatccgacccgccccattgacattcctaaattcatcgggtagtttctcaagctggctaccaggcatgacaagatgaacaagattgtgtagtgtaaatttggatcccaaagatttcgaagggtaggcataccattcaagatatctaagctcagaggaaatgatcagtctagaccatgtggaagcttgaatggactcatccaaacactctctgatagaataagcaattttagacttgacatcttattaaaaactgaaggctccatgttagtcgtctttgtgcccgatacaccaaatattcctttaattgttgaagtgccctatacaaagaaataatatattatgatgctataaatagatactataaagaacagttatatttattgataattttttagtcgtaatataattttcttgtaactaaatatgatttttagccacaacaaaaaattacttgtaactaaataaaatatagtattttaaaaaagttgttactaatttacttttagtcacaataaatattttgactaaaaacacatttaattacatacaaattatgatttttataaccaatacttttaaccacacactttttagtggcaacataacataacataagaataataatatatatatacactaaacattagtttgcctatatatatatccaaattggttgcacacatatatataaggatatgattttgtcccgtgatgtactttcacggaatgtattccgtggtacattagatgggtctcatggtacattaaatgagtgtcaaggtacgtttctactttttaaccctaattacccctagatcaatctcagccgtcagatcaaataagtctttcatctgacggctgtcgtacatcacgaattacaatccgtgaaagtacaataacgagacaaaatcatatccctatatatatcaatttaaaatataatatttatgcactgtacttttctgttgtagagatgaataataaagtatgaaaattatattattaggaaatatattaaaaaaataactttgaatatatatatttgtttcaatgacacaaacctctatgttgggattataaaattatctctagctaggaaaaagtagtattttttagagattcatgaaaacaccccacaaattataagtccttaataagcttttttttttcactcaacatatttaacatgtataaaaaataaaaatgtaaatattcactaatagttagtatatttatatataaataaatattaacatgcacttaccatgttatttcccaagacttggcggatatctttattcttccatagtctattatagtttttcaaagaattatcaacatctaagccacgaacaattgagtggcccatttcttgcaacaaatcatgcatttgaagtcgatccaaatcatgatcactatcataatcatcaccaagtaagtaatacttagatctctttaccaaacacttatcaacaagaacttcaatagccgcattacaagaacaataacaagcatccaacacttgtttcacatcatcttccttttttcctcgaaaaaaacatgcaatatcaagaaatatattcttttctatactttgtagtccatcaaaacttatttgcaaccttcttaggattccttcatccggatattttttcacttcctttaaaaaatcttcccatacttctcttctcttcgaatataaatgacaacccaatatttcaatagcaaggggaagacctaaggaataatctacaaactttttcgaaatctcaacgtaactttcttcgacgatttcctctttgaaagcatgcaaatgaaagagttgaagagcttctttcttgttcagtatgtctaagtggtatatcatcttctcatgtctaattatatttcgaagcaattttccatctctacttgttatgataa

SEQ ID NO: 221214 - DNA, 2626 bp, Cannabis indica
acttaagactcaacatggcttggttcccgtaaggaactctgcctaagccgtagcctagtacacgacccctattggagctctgtccagttcttttttggctatacatttctagcagggccttagcctcatgcatgcgaactgatctcatatccagcctcaagccttttatgctcttgctttggcctataggccctctatttttgaatactactattatttagccttaaagccatctatgatggatatatgatcgtcttggctatcttcttatggccttgacaagtaagggtttggatttactttatcaagctgaagtatggatgcctgcatgaattagaggcaggtttagtagcttattttaagccttaaaatttctctgtataagttctttgtgccagttcgatgagttatgggtgcccctcaagcgaccatgcaggcaagtgtcttggtcacttgctattcaccaagtttcacaggagttcatgattactcaagatttaggccgatctactattaatcatctttatgatatggattaggtctttatagtaaacaacatatttgataaagacaacttaattacatatcggtcgatgtcatatataatctctattatatatgacaccttcacttatatgttatactacatcagtaacccgatcgagattacttacactaaataatggcatcagtgaatcacactagcaactattgattaaagattccataactttaatatgttactgactattttattcatggctaagtgatcttaattctccgcacaattcaagtcacaacctctactacaagaaatgtcaaatatgctggcaaaagtttggtattgcgctagtaaattagaatttacttctgatgtgttggcaaaaagggttggcaaatcaacgttggtattaaaacttttgtcagcacaaaataagtgctggaaaaagaacttttcccagcgcgtaaatgcgctggtaaaagttagattgtagccactgcaaatgtatgctagtaaaactttgacctttttaccagcggagtagcgaactgtgctaaaagtgacatttcttgtagtactcatgtatgaataaagacctttttgatatttatatataaattatttaatattaaatattaataatttaacattcaagcacatataaaaatgtacaactcttatttataatcagaaatatctttacagactttttagggcatacaccttaacaatctcccacttgccctaagaaaaattaggcatctctcttaattccatattagttatattatccataaaagatttcgctggtagtgtctttgtgaatggatctacaaggttatgttctgacgtaatcgttatgactgtcacatcacctctctccactatatatctattagtagatggtacttcctgttaatgtgcttgcctttctcgtggcttcttggttccttagagttggccactgctccactgttgtcacagtagagcaccaataatttttctacttcttgaactactttcagatcattgtagaatttcttcaaccaaaccgcttcctatccttagctgcttcgcaagctgctgtatattcgacttccatagttgaatctgcaatactggtttgcttaatgcttattcagactacaactccaccaccaagagtgaatactgactcaaatgtcaatttcctttgtctaattgaaaatcagaattaatatatccagtaaaatttaagtctctaccagaatatacaagcatgaaatctctcgttctgctaagatacttgagaatgttctttcaacaatgttttaaatctggattcaattagtaatgactaacaatccctacaatatagcatatgtcatggctttgtacctaacattgcacacattaagctctcaactgctgatgcataagggtactttctcatgttctctatcttttgaggagtctttagacattgaaccttacagagagcaatttcatgtctagacggtaactgtcctttttgggaattctttattgaaaatctttcgagcaccttatcgatagaagttgcttaaaaaagtgctaatgttttctgctttctatctctatagattttaatgttgacgacaaatagcttgcttatcctaaatctttcatttagaatttttcgaataaccacttctttacgtttgataaccttttctacattgtttttgataaaattttccagttcaagtgttcagttgagcagtttcatttcatcttcgtctctttccattttcatttccctttttctactgttcttgatttcttataaatataatatatacagattaatttcccctatgtttgatatattcgcaaaaaaaaaaaaaaaaaaaaaaaaaaattagtatatagaagaaattaacaaaaaaaaaaacatgtatagtctaaattaatagttaaaaacttaaataataacaacaaatataaattgtaataaacattaaagtattaaacaatattacttctaaaactaatacatatatttatatattgatgtaaaattctaaatatcaacttcaatattacaaatacaattaaaactaacaatttaaatactagaaagtataaatttttaatataaaataa

SEQ ID NO: 221215 - DNA, 4096 bp, Cannabis indica
ttattggagattgaaatttcattttaatggtttaatttgaacaggttcatttaagtgatgatgataattttatgtttgtgtttgtgtaggatttgaaaacccatcttgacaatggtaataagttgccttctcctgatggaattctcatcaatggtcgtgggcctaatgcttattctcttactgttgaccaaggtaagctctcaatataagcgtcacaatattcacatggaatatgcataataagatttctcttaatgaaaatattcccattacaggaaaaacttacaggcttagaatttcaaatgttgggctgcaaaattccctaaactttcgcattcaaaatcacaaaatgaagttggtagaagtggagggaacacatacactccagaccacctactcctccctggatgtacacgcaggccaatcctattccgttctggtaacagcagaccagcctggacaagattactacattgtggtttccactcgtttcaccactggccctgactacctcactacaactggtgttcttcattatagcaactctgctggcacagtctctggcccacctcctggtggtcccaccatccaaattgattggtctttgaaccaagctcgctctattaggtacatttcatttcctttctcccttatcattattattgtgtacctactcgttatctgataggaccatgtatgtgaccaatgtttagttgaggggccacacacattgtttgttgtatacagttaatgcattgcacatcagcacatgtctattatattgtttattgtatactgatgttagattgcacatcagcccatgtttattaaggctcgtttagtatgccgtataaggatggtattgtattttaataggccgtattgtttaaataacaaataacattatgtttagataaaatattgtattatattaattcaagactataaaatttaatataatgtgagttatattatttagttcataacaaatgaccagtattagtttgtattataatatttacaaaaaatttgtagtcaaccccaaccccggaaatcaaacactaatcccagatcctaaacccgaacctcagaccccgaatacgaaccccggaccctagacctcgaacccagacctaaacctgaacccggggtctggtgtccaagtccgggtccggagtcttggtctgtgtcagggtctggggtctagataagtatccctatccgagtctgttgttgcacatgtctactatattattcaataatgttttggataccatatgtaatgcagggaaaatagaatagtaatggaatattatgatgctaaacgtggaaaggttcattaattttcaggacgaatcttacagcaagtgggcctaggccgaacccacaagggtcgtaccattatggtcttatacccttggtcaaaaccttcgtacttgcaagttcggcaggacaaataaatgggaagcaaagatacggattcaacagtgtatctttcatcccaactgatacaccccttaaggtcgctgacttcttcaaacttggaggcttccgcgtgggaagcgttggcgataggccaagtggcggtggattgtaccttgacacagctgttcttggagctgattatagaacttttgtcgaatttgtcttccaaaacgatgaagacatagtgcagagcttgcatttggatggctactctttctttgtcgttgggtaagcacatgatagtaatttcaattgacatgttcgtttcctctcataattaggaatggcaaaatggggcattgaaatcttttatttgtaataaatattttatttatttgatggcagaatggatggaggccagtggacaccgtctagtagggatcagtacaatctccgggatgcagtttcacgttgcaccactcaggtaaagacatttataagagaaatgctaaaaaacgccactagtgtctagcactctccaagagtcatatcgttattagtgcacaatcacaatcctctcacaaaacacaatacaatagcaatcccaaaacaagcaataatataacatgtggaacttaattggttaactgtgataaaagaatatgtgtcatgcatgacaaactttattggtgagtgcaggtatatcccaagtcatggactgcaatacatgtggctttggacaatgtgggtatgtggaacttgaggtctgagttctgggctagacaatatttgggacagcagctatatttgcgtgtatatacagcatcaacttctttgagggatgagtacccaattccaaagaatgcacttctttgtggaagagcaagtggaagacgtactcgacccctctaaacaaaaggcaaccaatttccaaagacatctaaggtttaagttgaaactttagatggtgatgatgaagagtagattagtaattgttgggctctcttattacttcatattattggtttggtgcgttttttcattgtgatatcgatttaatgcccgtatgtaccacttaccactctttcattattaggtcctcagctcgagggcacattctttttctatatctaaaatttagaatcgattgtactgtccttttcatcttttgtttgatgagtttcatatcgaatgagaggattcatatttataaattaccaatttattctcattaaatgtatatttattatttcgtgatacatacatttcattcatttttctcttgcaaattgttcaaatttagtattttactgttttttctttaaatgtatagaaaacagaattgttataaaaactcaaatcaccactttttatcatttattttccttttttaaaaaaataaattaactaactaatctcattgttgaaccgtttttttattattaattattatattaaaaaaatataatgataataaagaaaatgacttgttcaacaacattaaaaaaagaaaaaaaacattaattaataatatttctttacttttctttccactaacttttaagagcctactactcacttatccatgctcaaaaagaggaaaaaggaaagagaagaaaactctgccaaaatttacaaaaaaatgatacgatatattttcatctttaagaaaattctaaagggtaagttttagggttctcacttatcttcttttcttctttcataattttttcttttttttttttccactttgatctaggctttctaagctacaaaagatcttcaaatgtgagatatagccaaagaaaaataagagaatttaatgtctccatgccgttatgctgcccaatttttcatagatttttatgtttctctttaattctctaaacttcgaaaaataagtcaatataggagtacataatcaaatagaatgataaaatcttaaacaaaaataaaagaattgttatgctgccaaatttctcataaatgatttttatgtttctctttgattccttaaattttaaaaaataagtccaaagagaatgaaaaatcttaaacaaaaataaaagaattattatgctgctaaatttctcataaatgatttttatgtttctttttaattctctaaacttcaaaaaataagttaatatgggagtgcataatcaaagaagaagattaaaatcttaaaaagagagaaaggttatgctgttaaatttaccataaatttttatgttttggtttgattcactaaatttttgaaagtcaatgtgataaaaatcaaagataaaaataaaaatctcgagtaaagaaatgccttctgcagtaaaattttcactaagaaattgtatagccaaagaaataaaactgttggtcgattattatatcctgcttgaaatgtacaaattggattgactaagctaatacctcagcctgcgaagtctaaaagtaattcttgtaagacaattatggtgaggtgaggttcaaaaaaaataaagtgaatctgagagtttaattgaatgtatggatatatcatatatgttccctcaaagtaaattaatatatgtgtgtatttctattgggaaatttgattttctatacttagaaaatcaaaaaatttgatttctaaaccaataatttaaaccctaaaaaaactatacctttttttttcaaa

SEQ ID NO: 221216 - DNA, 1423 bp, Cannabis indica
aaattaaaaagacattattcaaactagaaaaaatatgtctgcactgatcaaaaatgcagaacttaaaaataaaagtcatatctaacaaactttagatatctttgatcttgaccaaactgttcgactccaccaccacatcatgtcatcctatttctttcaaccaactcaacaactccttaactctgatagcttcagcaagcataggatcaaccacccccatccgacttaatgtctgagccataataagttggccagaagagttctgtgccacccaaccatacccatacttattttgattgctaaagataactgcatccacattgattttgattgtattagcaactggtgcgatccagtgcttgtgccctaaagaaaacaaagaggaaccaaaaaatttatcttgagcacaactctattgatcgaaactacccttagccaatgaaaccacctctttaaaagtcctatccttaccattgcacacagactacaacgcccaacaaaacataacaactctatgatttatcccagaatcccaacactgaattctatcatgaagccatccccaaaacagttgtcaccaatctctatcactgttgtggaaatatacatagtcgaatcaagtaatataatgataaatagagtatcgttcccacgaggactgtagttaattactacacaattaaattcataaattctatttggtaacaataatataataagaaaaaggggtgtaaattctactgagaaagaaaacaaataattagagtgaaattagcaatgattaaagcttcgggtgattaatttcatttgaatatactttatatagtttaatataatttaatttcaaattctaattttcatgtgatggcagatttattaaagaaacttatattcgagttagaatatataaatctcaacatatgtgcaaactttctactcttatgataaatttaaatatataggaggcactaagcataaaaatcctaaatgctacacaaaccatataggtactctcgttgtatatcgaaatatgtgtctatttcactatggcataatcaatactcacttatcaaattttgaattgatatcataaaacatttaattgttgatcagacaattaaaagaaattaagtacgaataaaatagatacacatagaaaattagaaaataattaaatcacattaaaactagtgtcaaacaatctccattaacaaccctaattaaaagtctagctactcattgttattgtgaacaattgataaaaactaattagaaacatgaaattaaagatagaagaaagaaattctttgaagatcaatggttgtagcctccaaggtcgctttctctctatatttttgtcaccctaaaagtcccaatcaaaagcctcattttaattttttaaatcagggtttaaaaaacccta

SEQ ID NO: 221217 - DNA, 1935 bp, Cannabis indica
ccaaacactctaggcctaattatcccggtatgtacaatcatctacaagctctagaatcattgttgttcaatctatgcctttccttaatttacaaatgcaaacaaatctgagtcgacaaactgagtaagaaaagcataagacatataaacatttagtcgacctccagctaggttcccataaaccttactacaaggctttagatgaattaagaacgttcttaataaaagtacaacatctataccacatgcgctaagtactcgtcccgtactagtgttggtaacgatgtatcatactccttaatatcatatactatatcaatacactttgtaccgcaatcgtactagtgttggtagtatataaatgacataatacaacatgaatataacatacatacacatatacatatatattttatactaatcttacctaatttctaaattcaagtatgttgatcaacctgaatggaaattcgctcgctaaatggaggccctatgtcacatttacgcaaaatgggtaaaagatttgctaaaacctctttggaaacttgaacttaaaactagaagtttctctattgataaatagcatggtaataccctaaatatcaagaaaatacaaaaaatgaagttgttttgtaaaaacgacactttttttttgtgttactgccagcaaaaacggtagaccgtttttgtaaaaacagtctgtgctattttcggctacagaaatctcaaaaatctcatttctaacccaaatcaatatcaatcttcatgaaactctccaaaatacataattaaggtccaataaccataatacaagcagtaacaatagttataacacagaattatagaaattaccattgttgagtcaagtttaagttcttgaactcaaactttctcaactcttcaactagccatcaaaatcaatcaaattagcttcaacaactcaaattaaactcagaaaacaaatcatagaaaactcaggttcaaacaaaacctacttcacccaaaagcgcgcttaaaccaactaaatcataaaaaaattaagaatatggagctaggattcttgcatcaagataaatcttccaatcctccttgaattcattgagaatttagtgaaatatagacttggttctatttgttactcttagggccaaaaaatggaaaaagaaggtaagggatgaataaattttcttaatttgataaaaacataaaaacctaatcttatcttttttgttttattctaaaataacaatcaagatataacgttagaaactctaggactaatccacttaaatcgctaaaattcaaaataaaacctttaggcaagaattaccctttacccttttcttactccttaagttatctttaaggcttaagggtgaaatagtcaattactataactccatctatttccggtattctaaataataaatatactttccttgttaaaaaaaagattctaaaccaaacctgagtgactctaatggccatatcgttacgtttttattgttgctgagcaaacaccacaaaattattaaattacacataacatataatgcacttagagtttaataaaatctttagatttgagaaattataatcctaatacctatttcttataaatatgacccatagaataaaataatcacatacagccatgtaatacaatttattagtgctaattgtcttcctaatccatattctaagtataaggtcattacaattatctctctgttaaaaggattttgtcctcaaaatcaaatctgaataattttgaataatgagcccctaattggactctcttcctaggtggcttcctccacctaaatgtacttcagagtttaggtcatatttcttaaaatcttaccctttccatcatatttgtctgttgctctaaaatcttacatctcctttcacatgttattacatatttactcag

SEQ ID NO: 221218 - DNA, 1393 bp, Cannabis indica
aataaaataaataaaattattgatattttttcaatcgttaactgacaaaatgaaaaaaatattatacaatttaggtatagcctaaaaacttggaaagtaattaagtattatataaagtagctacatcctttttgaatttttgtagcctagcaacgagaaaacgacaccagcgttacaagaaatcaccgcttcaaacatccatggcaaggtaagttgatccttattttcacatgtctctaattctcttctctcctatgatattgattcttttggtgttgatctgttggttactgtccttgagtcagagaagaagccaatgtttttttttttgaaaaagcttaaatggatgctctttgaagatgtaaaatatttcaaaaagctaaatgggtgctctttggagatgtaaaatttttcatgtaagtttcctacttgttgggttatgtttcttaaatcaaggctgtcacgttcaatcaaaagttgggcgccaactgttcgaaaaaaattttcagagtctcatcaattaattttccatgtagagtgtgttgttaatgttgttaatgttctgggttgattcttgtttgtgggtttgtaatctcgtatcagagaaaacactcaaattttatactaattaatcaccgctgttgacattgaatttttgaacagaggattccgatatggtggagatggtactactgggggtgtccgatagcgtggagcttgtacggattggtggtatcgcagtatggtgatgtaaaggaagaaatggacaatggtgagagtgtagaagaatttgtgagacgttactatgggtatgatcgagaatttcttcctgtggttgctatcgtcaatgtggctttcactgtcaccttcgccttcatctttgtcctttcccttaaggcattcaattttgagaggagataattaactcattatttatttattcttttttatggtaaaaagtgaaaaataaaatgattaatataaattattgttgaagagtatatgattattaagtattcgtgtatattaaactttattcgtgtatattaaactttatttaatattattattttacatctaaagttgttagagcacattaatcagcagtgatgatgctctcgagtaagttttttcctatgaattgcaggccccgtttttaatatgagtttaggatttttcttactttgattttcttacttggtgagatggttgtgtgagtatttaatggggctgtttttcattgtgacaggtttattcaaccaactttccatttcacatcaagaaatttgcaaagaggtttgcttgcattgcaaaatctgttttttttttctccccttacttcatgttgccagtgatttcacaaataaaacgtcaagacccaattctcacatat

SEQ ID NO: 221219 - DNA, 4672 bp, Cannabis indica
cattcagaagaattttttagtctaattttttttcatattcatgtacgttatacctatttaagatatcctacaaaattttgaaaaattcggaataatttacaatatagaaaacaatgttcaaacagtctattttacacgcgtataaaataaaatagtcacgcgtgcaacacactgtttgaacatagtttttggtgtgttaaacttttccaaatttcttaaaattttgcaggatgtcttaaataactataacgtacatgaccatgagaaaaaaattgactaaaaaattatttcggatgctaaaacagataggggtacatcaatatatccattgtaagggggtgtattgtagaattttcctaattcttttattattattattattattatttgaaaatagaaaactttattctggaatattcattttcccttaatggcttgtactatatagtctacaattacgaaattctttaggctaattacgatttttgtccctgaactttgacatgtaccaaattatgcccctaaatttttaaggttgttaaaaatgtcacctgaactattgagattattggatttaaggacttttgtcaagttcattcacttttactatttcagtaattgtttatgtactaaaccatgctccccatactttaatatctaccaaatcatgtccctcgaactttgacatgtactaaattatggcccatgaactttcatccatattagacttttttactacaattggaaaaaagtccttaaatccaacaaccttaatagtttagggggcgtaattaaattaaattgaggcgtgcgtggttcgcagctctctcccatggcgaagaagaaacgggcaacccaaaagctaatggttgtggtggatcgttctgaaacggaggacgatctcccttcaatccaagaggccaatttggattgcacaccgactgaagagttccatgatacctactcagatctggaggtgaacgaggcagctgttgatagtgagttgaaggagaaccggtcttctccgaaatcggtaagctgggcggaagaagtggagaagaatgattttcagtctaatgctaaagaaatctggagcaatttcaaatcgaaccagttattatctccttctactcggttgtcctatactgaactcaagaaattaggagatagagttattgctgaacttgatttagaggaagtagaaattgaagcttctttttggaaaaatgatattgtgtgtatggttttgggagctaatccaccattcaaagtgtttgaagggtttgtcaagagagtttgggggaatttgggagttgagaaggtaatgaggatgcattcaggttgtactcttgtcacctttagagatgaagcaacccgtgatcttgtgctggaaacaagggtaattcattttgataaaaaaaaccggtgatattaaggccttggtccactaacttggatacagctagattggtgaagtccgttccggtatggattcgtctaaatggtcttggtcttcaatattgggggaagaattgccttagtgctcttgtgagcacaataggaaagccagttatgttacctacaaaataaaaggcctgctaggtgatcaaaatcgctcaggtcagtgaggactcactcacctactccttatctatctaatagtttcttctatcttcttattgaatttaaaaggcgacccaccgcgccgggctataagatacagctgttgtactacttgactggtaagataaggtgactcaaaatagatcaagggtgaaatttgctcgtgtgttggtagatatggatatttctgatgaacctccaaaatcgattaattttcttaacgaaaggaagcaattagttgaacaacaagtggagtatgaatggctcccatcaaaatgtggtgcttgcggaatgttggggcacattgttagcaattgcaacaacgataaaagaattgcttggaaaaagaaaacgaatgggaaagaaagattaattgatgaagtggaagatgatgttcaggttagacatgggattaatcatgctactgcagtggttgaagttcagaaagagaaaggggaccagatggataaggctcgaaagggagatgaagagaaaaagaaagctgctcgggttactatgattcatcggacagagaatgagaatgcttggatcactccaaaaagaacaggaggcaaaccttctgttgtggttcaactaaaagaacaggaggcaaatttaagaaatggttatgatgtgctacaaatggataaagttgatggaaacttggagacattttctaaaccaagttaagatggaagcttgtaatatgttaggttggaatgttaggggtatgaataagaaggagaagcatcatgctatccttgaagtttggagagaaaataagatcagagtggctgctctgtttgagactaaaataaagcataaaaaggtgaaaaaggttgttgaaaccagtttccctaattggaattactattctagtaggcaaactcctgcaaggattcttctcctttggcagaataaatttgttacggtgtccatacgtgctgaattgctacagatggtgcattgtcgaataaaagtttgtgggcaaaacaaggctttcttcaccacggtggtttatggaagcaattctcttgttgacagaaaagagctttggaagcaacttgctgatttggggaaagttaatgatccttggattattctaggggattttaattcagcttttagctatcaagaccgaataggaggcaaggtagtgaaggctaaagagttggaagatgctcaaaactagttgtctttaggccaagttgaagaacttgttagctctggggctcattatacatggtcaaacaaacatgaggaaggggatagaattttctctgaattggatcgtgtcttcatcaacaatggatggctaatggaattgcctaatactgaagcttgctttaaatgggattggatctcggatcatagctactgcgtaataaagaattaagagattagcaaattcagatttaaaccttttcgcttctgcaaccattggaagcttcataacggttacaaagaaattgtccttgctaagtggaatgctaacctggggagcctctcggatgttgtcaaaaacctacttatggttaaacatgctctaaaaaagtttaataaggaagttgttggagacatcgtggcggattacaacctggcaaaacatgagttttgcaaagctcatgaggctcttgcttaccaaccaactgacaaaaggttacaggaagaagaaaaatgctgctacaactatttgcttcagctgcaacctagttacttcagccatcttaagcagcaatcaaagattacatggatccaatgcaatgatgagaactcgagctacttccatgctagcatgaggaaaaggagaattgagaataggatcaccactttcaccatcggagacaaggtagaagatgattatcctaaggtaattgatcactttattacccattttaaaagctttatgggaagtcggagtacagctatttctgagattgattatgatagcttggtgtgtggcaacaaactgtctcttgaacgacaaattaggctcattgctgcgttctcaaagagtgatgtcaaaagagccttatttggtattcattctttgaagagcccaggaatggatgggtttcgatctgattttttcaagcacctttggcctgaaattggggatgacattacgagagcagtgctgggtttttttttccaaatgggatgtttaccttcaaaattgaatgaaacggttatctccctaatccctaaggttgaagacacgaagggtgccaaggactacagaccgatagcttgctgcaacactttatagaagtgtatctctaaattgatgtgttctagactttcagaagtcctcccaagcctaattcatagcaaccagggagcctttatcaagaatagattgcttgcgcataatatcctaattttccaagatcttctaaaaggctataccaggaagaacatttctgctagatgcatcatgaagattgatcttagcaaggcttatgatacggttgattggtactttattgaaagtcttctcaagcagctttgttttccgtctaagtttatccaatggattatggtgtgcttaaaaggtactagatacaatcttttattgaatggaaagattcaaggctccttcaaaggggaaaaaggtcttcggcaaggtgacccgatgtctcctcttctgtttgttctcgttacggattatctgactagacttctggcccatgcttagacttatgtaaacagagtaatccgataaacttatgctttgtagatgatttactcattttctgtagagggaacatcaaggcggttaaggtgatttccaatactttccgaagattttgtgaggcaacaggtctggctgctaacaactccaaatctcatatttattttggaggtgttaaagaggttgacaagaagaagattttggatgaggtgcaaatggaagaggggtcttttcccctgaaatatttaggggttaaactaagacctacaaaatggaaagcagctgactgtggtatcataaactaaacaagaatttaaactgttgggctaatagaaatctatcttttgcagggcg

SEQ ID NO: 221220 - DNA, 1828 bp, Cannabis indica
gagggtttggggtctctggtttgggggtttctgggttggttggtcgaatgaggaagatgatgggctgggctagggttatacccttttggcgtcggtttattagaaataaacgatggcacagggggcacaccctatgtcgtcggttgtttccaaaaaaccgacgccataagaggcgtcaaaattccttcaaaaaaattccaacccatgccgtcggttctttaatatttgctgaaaagaagtgcctctaaaggcttggtttgtagtagtgatacaagaaaataatattttaatagttaacatttaaatagaaaatttttagtaattagacaatgtaattatagtcaattttcataggagaatttgagagtgtaattagaacacctcaattatctccaattacaccattataatataattacatggttatacaaatatatacaaatatgtcaaattatattattaactctaattacacacaaatttaatattaaactatgattttctaatcgtgaacttagttttaaatttttgagtgttaatattgtctctttattgaaatagaaaaatacccaatattaaaattatgacaattttttttttcttttgatccatattggagaagggtgatttgggaatggataggagaggtgcaaaacaaaacaagtaggatatgactatgaccataaacgaaaaaattagcatgcaacacgttaataaatattagaacagtttactgttcacgtaacattacttaaaataaaacagaatttaacatctcacaaattaaagaagacacaaaagtactacaatgacaaacaaccagcactcttcttcgatgtgcacacaacacaacgaagtattattaagatacaattcttccacacaaccatataattataattacattactgctacttgcacttcggtagcggagctccacacaagcaccggttatggaaataagccgagtaatcaaacctctgcaaattgccacccataggaatcttcccacacaatctgttatagctcacattaatcatttggaactctgggactgtcattcccgtcggaatagaacccattatcttattatggttaagatccatgaatatcaagctcttgggaaacttcactttagaaagatcaaactccaacaagttcctggacaagtccacctcttggagagtcttacccgatccgaataagaatgaggcatcaccttcaagcctgttcctcgataggtgtatagacgagaaatcctttctccccaatgaagctggtattttaccagagagctggttatgagaaaggtagagattgaaataaatacctttgaagtctccaaacgtatccgggatcggtcccgtgagcttgttacggtccagacggagcatgacaagtttggggagctgggcaatggaactcgggatggtccccgtgagggagttgaacgctagagaaatatactccaggttcttcatttggcctaggaaatccgggaccggacccgtgagcccagtgtaggtgatcgtgagggtccttaagtttttgagcttggaaatagcaaatgggattggacctgtgatgttaggcagtttgtgaaagtcaatctcttggaggtatggaaggtcgccgacttggggtgggatggggccagataagttgccgttggatgcagaaagggaatagatttggtgagttttcacatcgcaaaacacatcgttccagtcgcagcagtcggattttgagtcccaatcactgtaggtgtcagggtttttgaatgctttcttgatttgaaggaggacttttttgtcttttgggcggcagc

SEQ ID NO: 221221 - DNA, 1521 bp, Cannabis indica
tcggttactttttgaggtcaaacaacatccaatccgcacaagtgcggattttagatttttcaatccaatccaatccgcgcaagtgcggatatccgcattttgcggattggattggattggatcgtgcggattggattggatcggatacttagtgaacacccctagttaccagtattgcaacaccaacaactagatgcaacaaggcttctaagtgtacaagaatacgacatcttagatttggtcatcagaaaagtgtttaagagttagagaagcaagccattttgaaagggaaactagaagcttgagttttatgaagcgtgtacacatatggcaagagctccaaagtcaagtttagtaacggtgtgcattactcacgtgaaccattatcttattttttccatagatctttagggccctttgaaagtgaaaactctagctagagctcatgaatattattgatgactactcaagaaaagtttggaatatattcttactcaaaaataagatgaagcttttcgcaccttcgtcaattggaaaaaactgattgaaatcaagttgaaataaataaaagctaagcatagataatgggctctagtaatgctcaaatgagtttttacattgtttgtcttaaagtaagggattgcaagaaaccacacaaagactagaactcccaataaaatgggtttgcagaatactcctagaaataatgagatgcatgctcaatggtgttagtttagagagacattttttggaagaagttgttaaaactgcatgttactcgataaacaaatgtctgtcgataaatattaactttgcaacatcgctagagaagtggataggtaaagctcctatcatagtttggagatagttccatttacacaaatagtttcataagaagaaataaggaaagcaatgtcccaaatggatttagataaaagtttgggaccagacggtatgacttatgcattttaccaaaagtgttggtccattgtgagtaaggatgtaggtggggtggaccaacatttctttgagattgaggagtttgagaagggttgttgtaatgaccgcatgattagattatggattagcgaatgcaattggtattaattgttgatatttaatgattatacatgagtttatacctattgtgggtcccatttttagaaatggacattagaattgtaatttctcaattatggtaattttgttaaactctaagtgtattatttatgttatatgcaaaatttacagtttttatgatttttcgttcggcgacgatagaaaatgcgacagatggctgatttagtcacatgaattagcttagaacctttttatttagcaaggtattcataagttgatatttagaatatcggacctaagccattttaccatttaagcacttaagtgaggacattttagtcattttagttttgaggctaggtggctgattttctaatggacggctggccaatatgtgttgtttcatcctaatcctattattaattaatgagattaatcaaa

SEQ ID NO: 221222 - DNA, 3037 bp, Cannabis indica
ttttaactgctttcttcatcgtatgtcgatttggcaaatgctcataaactttttgtctgcttgtctctcttttaggggtttgccattggatctgctgctcttgtgtctctagccttgttcggtgcattcgtgagtcgtgcaggtgtttcgactgttgatgtcttgacaccaaaggtctttattggtctgcttgtgggtgctatgcttccttactggttctcagctatgacaatgaagagtgttggtagtgcagctcttaagatggttgaggaggtccgcagacagttcaacaccatccccggtctcatggagggtaccgctaagccagattacgctacatgtgtcaagatctctaccgatgcctccatcaaggagatgattccacctggttgccttgtcatgcttacacctctcattgtcggaacactcttcggtgttgagaccctctccggtgtcctagctggttcccttgtgtctggtgtccaggtaacataaataaaaatgtcatctttagacatgattcatacaaacatagatatacttatctttttgttacgttttgcttgtcttatcagatcgcaatatctgcttcaaacactggtggtgcatgggacaatgctaagaagtacattgaggtgaatattgtttcagtttacatgtaaagattacttttttatctccttaagcgcatttagttgataacatttttgtttctaaattttcaggccggtgcttcagaacacgcaagaagtcttggccccaagggatcagacccacacaaggcagctgttattggtgacaccattggtgacccactcaaggatacctctggcccatcacttaacatcctcatcaagcttatggcagtcgagtcgcttgttttcgcacccttctttgccacccacggtggacttcttttcaagatcttctaagtgaaagtgaaagtgatgatgggtttgaaaaagatgtagtaatctctcattttgttctatttttggtccctgaggggcagaaagattttaattgacttctttctttctttcttccattgtgctagtacttgtactggtacctcttcttcttcttcttaggtagtgtttgggataaaattatgaaccctgagaatcaattacaaacactagttgcgaaagttaaaaaaaaataccttttgataatattaaatgattgttgaaatggggcttacataggctcccacaattttcattttcattatatttgtcccttttaaataatccactatgatatgatcatcttatatatctttatttacttgctttagtgccaataagaacatagtataattaggtaaaaattcattttatgatatagttgtatactctaccaccccactaacataatcattattgattctcagtcttttttaattaacttattttgggtcaattttttgcactcaataatttgtggggttcatctagttgcaatatgatggttcagaatgtaataaacatataaatagagtgagtacactaagtttgactaataagaccatgaatgttgatttgtttggaaaaataaagaccatttttgttttcctgttttcttttcagattttcaaacaaagaattcaataaggtcatcaggcgtagacttaataagcaaaactccaatccaaagtacttaatatgaaaattttatatacctgacgatttggggttgataagacagagttgggtgtggctttgaattacaaaaaggacggtttcaatcactcatttctttcttgttgttgatttttttgggttatttgcattaatgttagaggatctgatacaaaattatcattttacaaattcatacaattaatttattaaagggaaatatcaatttaaccaatgagttttgctccaacatgattagtttttgtgttttatcaacaaaaatattttatgaaataaatcaaaatagatttgaacttggttttggttgaatagttttgagaagaaagattccatatatattaaagataaaaagccaaaatgattcaaaatatttcattaagtattaggccgaagacatagtggtaaacttccttcagctatgataacacccgaagtcccgaacgattagtttgagaattatttagtttattacagtgagaaataaaaacataagagaaatgtatttatgtttttttaatattactattatcactagagagtaagagtataaatttatcatgaagcaatatttgacaaaatttaagataatatttgtcaatgacgcagtacttctatcttgtgtatggcttggataattttttaatatgaataaaatgcctcaagttttttaattgtattaaattatacaaaatacaaggaatactactaaatatcagtttgacaatttttacaggagaaatggacaccagaggtgtctaacacccttctatatgtcaatatccttattggtccaattaaatatcgagtcccatatagtttaatattttagggaatatcgccaaccaatcgcaacgcgacatgtcgaggaaatattaggcataactggtgcctaatagcaatgctctttttacatcatcaatatatattatttggaccttataaaaaaattggagtttttacaccacttattgaaatttttatttttttttattttttaaatgtggggtggaaaatttttcaaaaacaatgtgttagttttatactgtgtactgtgttaagttttcactgttgttccacagttgttgttttaattgttttgttttgttgttttatttctaaaaattagtcttttttttttttttttttttgtttgtttcaagctcttaatagctcagttgctcttccattcggtttttggtttgtttgttcaggagtgttaattgattctttcttctttacataatgtttttatttgtcatgttaaacgatctgctaacaaagccgcacattgtgttgctcgcggagcttgtttttggtctgatcgtatttttactgaaaacaatgttccttctgcccttcagtatattgtaata

SEQ ID NO: 221223 - DNA, 1885 bp, Cannabis indica
tcatatattgatgactttgtaacggacactcagagtatgaggaagtcattattcattagagaatgttgttaagccttatggtttaaacaataggatattccaagatgtggaagagggtgttttttttacatttggaatagagtgaaatatatgatgtctaaaaactaaggaggttttaatggattgctttatgagagctagttaatgactggtacctttgattgcaacttaagatgatatcctatcattttttattagtatggagcttgttgtttcttactaaagaaaatcaatattgaaagtattttgatcattaattgctgtcgaatagatatgtatgcttgcatagtaagtaacagaagtatgcccttcctttctatgctagtggcaaagatctaagtgtgtattgcttgattttattgcatttgagaactcaacatcttttaggctaaagctcattgcagtgaactgtttagtgttttttttggataaattaagtgttctggttgtaatgcagccactgtagcgccctgttataggattcatcaaacaaaataaataatccacagataatacagtaagtgtgatgtgtgaataaagtgggtactagggagaactagagagatgacagagaaaaaggaatcacaggaaggaagagagaaacaggctcttgcatggtcatctacatagcaattttacagtgttctggtcctagggtaggtgggaagccttgaagaaaatatacggaagaattttcccaataccatcgtattgtctggcgaagtagattttccttgaataaccaaataatattatgggttaatgtttaaatcctagatataagcttttgtaatttagactctggattctgtgtcacatctattataattggtggttattcataataagcgtgaagaattttcagaataggttgttttgtctgacgaagtagaatttgctagtgtaacttacttacagtatggttaaatacttagattctagttatgtagctcttacagactatgggatctgcatctcatctaatataattttttaaaaagtaagcatgccataattttcatttagttgtccagcacccctacaagtctgagtccggacaaccagttccaacagttcaatattcaaccacaaattttttttttaatttagttactgcttgttttgattataatgagtgcaaggtattttcaaatgtcatcttgtttgattataacttagttacagcttggtatggttgcttaagtccctttgcttctgtgataatacaaaaacatatctcccttagcttgtcttccatgtcattctcaaggatctcctggagctggaaatttcagtcattctacttgtgtgctttttctgtatttcctgagctatttaatatagagagttcaattagctgggtggcgagaaagggagaggcatgttcataaaatcctgttctgtttgtaaatttcttgatacattctcatgactactacaagtttaatgaggggaaagtggtaatgaaaattgattttcttgcaacatgatattctctagactggttgtgcaatccaagatattgaacttagagagatattacagtttacatagctactgccagtgagaagaaatatcacactatttatttagacgaagattagattttgatttggcctttattacttttagccacctcaacacacttttatgttgtgtgcagcttgaattgctttgtggcacatgatggtcaatctatgctgaattttctcctgattttacttgtttataattttataaagaatgtttacacaatctatcagtgctctatcacattattgattactaattatacctgtatgtgtgctcttacataatttctaac

SEQ ID NO: 221224 - DNA, 2338 bp, Cannabis indica
tcagttttgcctttattagaacagattaaataaactttatttgacaggtttgaagtctaaattcgtgatctttgttcaatttggaaagtttttttctagtcctgatttgttgctgtggagcctgattctgatgctgcaaatcaaattttttttaagaaagttttgtacagctgggaaattatttctgtggtcgtctctagagttactatgttttataaataggacctagagagcagccaaacgattttatctcttctagtatcatattttcatatctttctttgtgagaagagtatttcatttgtaaaaacctagagtgttcaactaggttttgattttcttattatgatctcatactattcatagaatagattgaagagaatctttgaacaagtgtgggccttcgagagaagacttttccaagtctcattttgggagaaagtaagcatataacttcgagagaagatttgtttaagccttacttcaagaggaagtaagcacacatcaatagttgaagggagttcactaattggtgtgtttcagagatcagattagcaaggtagattataaaggattacggtaaatcactagagggagtctaaatttatttaagtcaatttactaattaattgtattctctgggcgtggccctatagactagtagtatttgaaagaatattgataccacctacaattctcttgtgtcaaatttttaaattctgtactgttattttttttccttaatgttattaaaaaattattggcatttacaaaaatatgatttttcaataagcattagaataagatcaatactacatatatttgattattaaattcatctattatcacatattcatattggatttttaaagttgttatttgtttatgtttgtagagaagaagataatgttaatatatcttccctttcttacattaggaatcttaagaataatgtattaacacataatttgttgtatttaagtatccacactgttagaataatttttatatgggaacaaattaaatattttatttgatttgatttataaaatataattaaatatttagtaattaattataatattttgattatagtcaaatttaattactaaatatttgagttactcaatttaatttttaaacttaattatcaaaatattcagacaattaatgtggcagagactttgatagaaatgtctcacctatataaatatagggtctctgtccccgagctcactactcattctgtgaaattactaaaaacccatctaaaaagagtaaagatagcttaaaaagtctgattacccacaataaccaaaaattaatgttcaaactacatgaaaaaaaaataaagtgcttttaaaaaatttaatatatttttatattttacaatttaaaatcttagttttttatattaaatatttgtaaatattaaatataataacaaatatgaaatgtaatattataatacaataaatatataatatatgatatacatatacattccaaatcgagaaaccttcctcatgtctctttacttttgaaatgtgaattcaaatggttacaaacaataagtaccgtacattataaactagtaacaataagtaccgtacattataaattgatagtgacacaatagttcagctacttgagtttatgaaatgagtggtctactcaattaacccatgcttgcaaagttcatccagcatctcaggagacttcctaactctgtttgtaattctaatcaagtagagagccacattgtcaacaaactaaaaataaaccagaagcatgagcatgatggtcaatgactcaataatatgtctcaaaacaagaaaatatgtgacaaagtcctgaaaaaccttgaacacttcaagtacctccttatcttcataatgaaaaagattgcataatatcagaacaaccttcatagaatgggaggcacattcaaaatgaagtttattgcataagttcatcacagtggaacaaataaataacttaaataaatgctaggtctcgaaaaaaaaagtaaatacaatttgagcactgcataggaatacataattaaaaaggcattgcaatgcagtaaacgtgacacaaaaaatttcaaagctcacatacatattagatgcaatcttacatgaatgcttgttgagaagaaatcgataaaattcagtacaaccatcaccaacctgcaaacaagcgagtggctgctcccacgatattttctccaatgcttgcagacacttcatgtagataagcaatgtattaagacacctgcaaaaaacatattttcctagtataaacacaaaggaaaaacatcaagtttacttgctcc

SEQ ID NO: 221225 - DNA, 1629 bp, Cannabis indica
ataaaacccaacaagtgctagggagaactatttgagaaaaaagatcaatgttagatgcaccagtgtttagtttgtgaaagggaagcacattcacatggaagacaacattacgagaaataaaaaattatttattattgatattatataatttgtgtcctttaatttcttgaggatagcccatgaaaacacaagtacaagcacgaggtgagaattttgttctgtgagcagatagggtagaagcaaaagcaagatatcctaaaaatcttaagttattgtaatcaggtggctttttaaaaagacattcgtatgaggttttatttttaagtaaaggggtaggtatcctgttaattaaaaaagttgcagccattacacacttactccagaatttaatgggaaatttggcttgaaaatacaaagcactagccacattgagcaaatgttgatgctttctttcaacaatagcattttgctcaggtatttccacacaagtgaactcgtgcaaaagagaagtattacattgcaaagtatctttaagaaaatctaaacgtttgtgggacaaatgtccaagtgaaaatcctaagtttcagctgagacagatagagcttggggggatctggtgcgtatcaaggatgtaaagaccattgacagtgctacctcttccaatcatcctcttgttggcattgtcctgaacataaaaaatatcaaaagtgaaatttatcgagacagaagtatttctagtcatataactagtagaaacaatgttgtacttaaagttaagtgcataaagaacatcagtaagcacaattttatcattcaaaacaactgtgccacattagttaacataaaaacatgttgcaacttggaggtgcgggttatttatagggtcttggctcgctcaactaaccagcgctctaagcgctggcagccgaacgcttccaaaggcgaccctctcgagtttctgaatgtttcccaaattgaagtagcctttcctcgccctaccaaacgaaagaagccaaatagctcgccctactgatgtaccaaaggtgtgctacgcccgtttcaaatgcttctccgatctagaagttctcatgaagataataagatgctgctccccctccctctatcttttctcactttgctaatttcccctctaatgcgggccgggcagcagcaggcgtaggaggaagaaacctaatagaagacgctcttctcttaggtcctttttttcaatgcaacgcaggaaagtgccttctttttgtcatccctgcaccatattttgtattgaacgcatggcatagctacgaccttcaaatcatgttttagcctatgttcaaaccaatcctccccacctctttgaataaggctggaaagagtgcccgccaagcttagatcagggaatgttttccccaaccattaaaggaaaggctcgatgaatggagggagatgcagcaggggaaggaaaatgctttcggagatcgagttttatttgtttttcatcgaaaatgaagaaggtcgaggagggcccatggttcgtattatctgaagggaacacacacgcttttttgactgcgatagccgacaggacaagccgatggatacaggaaaagatctccccttgcaatgagcaag

SEQ ID NO: 221226 - DNA, 2068 bp, Cannabis indica
acattacgcctttgcatataaaattgtgtcaccacactatatatcacattatatttcatatatgataatatcactataattaatgtctatatagcatagacctatgtgttacgcctacacgtctacatataaggccttactagggttcaatttagttacaaagtgtaacctagtaatgccttactcgcataactctactcatgtattacttaacatattatcgtatatttatcacagtacgtacttaaggtattaaccctaatttacgatttcataatagcaattaaatgacatataactgcgccacctcgctatactctatgtgcttagtttgttgtcttatctaatttttaaagtatgaggagaaatctcaatctacaagtaattcaagcgttggtattcttatttataattttcgagtttcacatgatagggttaatcccaaaattacattctataaatattcacatacaggactttaagactcgactaggtaatagagctcgaaacaagctttctaacgatataacgaacgtccaaattagagtttaaagtcaaaagttatgctcgaaacaaaacatgtaaaagttaaactgtcgccacatagtcgctgcgaccatttattgccgtgaccagaccattggtcaccacggtgagaaaaggcagaggcaaacctctattttttaggtgtagcctcaccgtggcgactatgcttaaaaacccaaaaatgcccaaaaatcaaattttttgacattttgcaattaaccaaaaacacttaaatttaaataattatgcaaacacgatttataagattcagtttatctataaatactatcacttcatcagtttatctaataaaacacacaattcatcacacaaaatctaataactccacatgaaaactccaagcaaaatatgctcttgaaactcacaagaatcacaatacatttacacatttatgctcaaatcaataaattcaaaactgaattaccaagaaataaatctagattgaagctgtaaaacttaatcacatagccacttacaatcaaaacctagcttgataactaaagctctcatccacaaattaaccaaaactcaacatgcaattcaattcaaatacaagcattttcagataaaacaaccctaatttaaaaattaaatttaagatttaaaatagtgaaaactaccttgaatatcttcctctaagtacgttttactaccaaactcaactaaaaatggctttaattcttctttaaagttaaaaaaatgcaagagaagtttgagagagagcccggggggggggatttgtggaggggtttctgtaacgccttaacaattaagcacgttacgatttttcgataaacataatttaatctcgctaaaccgggattactagaaataagagttgaatttaaactttaaattatttacggaatgaaaatataacttgtaactatttaaattttacaaaccattccaaaaatattacgcacgtttcgggatcccgtaaaaattttctcaaaacattataagttatttttatatgccgacctaaacggcaaaatccgagaatatacaacatacatcaattggtagactcaacctgtgtggtctagtatagcccgaatatgtacaatccaccgccaagcccttgaactcatggctgatcacaaactgatttatcctttccctgcacagtagagcatctgtgagtcaagcctaacaaaacagtatacataacaataagataattataataataataattacactttatacactacgccactgcgtatatactgtgccactgcactttgtatcacattattctatatataatgatgccattataatgaatgtctatatagcatagatccacgtgttacattcacacatctattaatgtctatatagcatagactcacttgttacgctcacacgtctattaatgtttatatatatcatagatccacgtgttatgctcacacgtctattaatgtctatatagcataaacccacgtgttatgctcacgcgtctattttatatttaaggccttactagagtttg

SEQ ID NO: 221227 - DNA, 2928 bp, Cannabis indica
aattagactaaaaaattctcctgtatgctgaaacagatagggggtctatcaagatactcatttaaggggtgcaatataaaattatccaaaattatagagaattgctaaaagatactactggtgcccaacaccctcctcggtgtcatactacactatttgcgtaattaaatatcagatccggtataacttaagaaaataacttttaaaaaatatcacttaattataacatgcacctttagaaaataatgagcaccattaatactcaataagaatgaacaaaattatgtataatatatatgtaatttgtaaaagagagattggattgcagctttataaagatgaaaagtgaaagtgaaagggtaataaaaggtatgaagttgtgcttttccacgttgatgatgattcatttctattacctttccaatcttatatgatgcatttcataccactaattagtgctttccacataactaattaactatctcaattaaacaaaaaaaataaatttcaattttattattcttaaataaataaataaataaaatagcattaattaccacgtatatgtttaacttgattgataaaaaataaaataaataaaatttggtgtggcattttgtaatttacttgtaggtatgtataagcccatacaccaatagtttgggcttttgtgcttgggcttgggcttagaaaactgtgttattttaggaaaatatgattacttatagttctactattcatctcaaggaattattttattattatttttttaatggaaatttcatcaatattgaaaatattaaacccccacatctgttaccaaatacggtagcaactcagttagaacagactccaaactaaaagtacaattaggatataatctagcagctttaaatattttgaaaatagtagtgtactatatagcattgtcataataagtcaataaacaatatttaaaaatagtatcttaaacttaatgaaaatttataagcaattttattattagttcatatagatttaggtatgatattaagctatctatgataaccatggcattattcattatattatataaaagaaaattggtgtttatgaggaataatcatttggactaagtaaaggttatcataacacctaattacactaaagaactacactcaaaaaaaaaaaaattacggtggcgtttggttggaggtaatgaaataaaatgaaaaggaaatgaaacaatatccattcaatttctttatttggtagcatattaaagtgtgttggaatgacctttccactattttggtggaatgacaattccattttgaaatagaaggaaataccatttcaatgcatgatgagaaaaaatttaataatttttttatcaatttttttatacattttaaattttattctattcttattctcattcctatttctatgttttcaatcctcctaaccaaacgttacctaagagcatatttaatggtatgttatacaattagtataatgctatttttttattattatttttgtagcacttttcgataatattaaactctaacattatgcgaaatatgtgtcaaatttaacacatacttaaaattatgtcaaatttaacacaaatattgcataagccaaaattatacgaattaaaattatatttttcttatttactattttgtcaataaataatcatgtttacactaatttaaactttattaatttatttaaaatttcctatctacttttaataataataaaaaaaagtagattattttgttcacttttttaaaataatttgtactaaatagtacaacacaataaataaatttagcacaaaatttacaccgtccattgaagatagcctaaaactaatgttatattatacatatggagaaattttgttatttccatatgaggatcttcttatggtacttcaacccttacaacaaaaaatgagtaatttttgtaaattatttgcaactgagaagtaaacttaagtatttacgccacaaattactcttatcttatttactattagggttgtacagaaatttccgtaaaccgcccaaccaaaataatcctcccaaaccaaactaaaaaaatcgataaaaaatacaaatagaaaaaatttgaccaaatgataaaccacccaatctgttaattgggtggattgattgaaaataagtacaacccgcccaataaacctcatttaacccgactagtatttattttttttttaattttgtacttcttaatttttaacttttattataacataaataataatacataatataagtataaaaaaaattcaatgatatgatctctcaaattctttctctaatattttataagttgaaatttcatttattttgaaactaaaaaaaattaagtccgtttggacgggttagtttgactaaatcgttagttgggtagatctgaccaagctgtcggttgagttactgactttttttctttctaaaagttaagtggactgcacttaaaattttgcaaccagatatttacatcgaattgaaaaatatgtattataaatcaatcaaacctatcgatatacaatcctatttactacacaagataaatgaaaaaaaaaatgtgttagttttcattttataaattacacactttacacattataagcaattttctttatcttccataaatttgtttctttcctttattttctttctcattatcatatacttaggagcatagtaataatccctttcaaaagtaaaaataataaataattaataatatattaaaaattgaataattttaaataaataaatattatcactcggtctacacacggccaactcgttattttccattggaattttcttttcaaaaaatatttatttattttttccttttccttactccaaaaggaaaagactaatctttcttcacaat

SEQ ID NO: 221228 - DNA, 1094 bp, Cannabis indica
tattttaaactttaataatttttaattccatatttttttatattatttatttatactataaaaagtaaactctattatattttataaaaaaatcctgatttctattcataaaatatttagccttaaatcaagtcaaaggcctatttttaatcgctcacaaaacatgattttttatttttttgtacttttaaaatactctttaaaaattaattaaaatatgcaaggtccaaattagtaaaattataagagaaatttaattaaatatgcgctataataaagacattatactcatgttgaacaccatagctattctaggcaattttatgattttattcccaaaatgcccctcacatacactaatgccattttctcttccctttctcttcttttaatttctctcttttctcacttcactatctcactcattctatctctttctccctaaccaaatcaaactaacatcttactaaaattgaatatttgggctgctccaagcccatatcagaggtggattggaggtgagacattttttcttaagcaaccaagggaagcattgttttgagcaatggttaagtgaacttttttttatttattgttatatttattttatagaatgttatttagatgttcgatttgtggtttgttggtattttttattgatattttttgtgtgaatcgttgttcttcaaaaattttgtatatttatggtttctaagtttttttttattaatccggatacgttaggggtataattgtttgttcagtttagaggttaggggtgatgtgtcgatgtttttcgatagttgtacaatagcagtttgattgtttgttcatgttagaggttaaggttttgggtttgatgttgtctaatggctgtacgatagttgtcttattgtttgtttagtttagaggttagatttatgtgtctgatataggtcgatggtatgtctaatttgggtacgataggatattgttttaaatattattctttgagtacgatttacagctcgattgtattcgatattttttcgatattacacatgatcaaaaattattttagcctttttgttgtgtttttgtttttgtttttgttt

SEQ ID NO: 221229 - DNA, 2761 bp, Cannabis indica
actggccaagacaattacgtttcttggagtcgtgcgatgcagcttgccatttctatcaaaaacaaactaggattcttggacggttctattcctaaaccttctcccattgattttagtctttacaatgcttggattagaaataacaatatagttatatcttggatccttaattctgtttctaaagaaatctcttcgagtttgttgtatgatgaatcaactgcagctatttggactgatctcaagatacgttttcaccaaagaaacgggccacacatatacaatctttgaaagaatctgatgaacctgcgccaagaaaaccagacaatcagtatgtattatacaaaactaaagaccatctgggaagagctgtctaactatgggccaagttgtacatgtaatggatgtacttgtggtggtgtaaataaacttcaagaacaacaccacatggaacacataatgtccttcttgatgggtctctcggatcacttttctcaaattcgcagcagtatattgttaatggatcccttacccgaagcaaatcgagtctttcatctggtgactcaagaagagaatcaaaagggtagcatcactactggtaatgattctaattccaatttagcttttgctttccaatctgataaaaatgtccctgccaagcctgattctcagaacagcaaaaatcatcctcctagaagaaatagacccttttgcactcattgcaacattctaggacacacaatagaaaaatgctacaagattcatggttaccctcctggtttcaagggaaataagtcgaaggatgcttcagcaaatcaattacagactaaaaccgataccaatcctgctacagatgaggctcatacgattctacctcaattgaatgctacttagtatcagcagcttttgaatctccttgctaactaacaaaatggtatgacaaacactgatcctagcacctctacgggaacaacaggtataatactttccaactattgtgtcactcctcataatgaatcttggataatagattccggagctacaagacacatatgcaataacataaaattattccaatatgtttgccccatgtctaaaatcaggttaatccttcccaataatgaattcatatctgtccaacaaagtggttcaattatcattaataaagatcttactctcaatgatgttttatatgtccccaactttaaatacaacatcattccagttagctctttaacgattgatgataaagttaaagtaaaacttttcactaatagtttttatattcaggacaaactcaacaagaggaagattggcagaggtagagcgattaatggcctatatgtactggacaacaagcttcaacatgctgcagtacacaatgtctctgctaatctttggcatgctagactcgggcatctttctaaacaaagaatctctcttttaagtagagaactgaattgtaatgtgaattctatgcataagaactctccttgttatatttgtcctttggcaaaacaaaagaagttgccatttccaaataaaaattcttttactactaactagtttgatcttattcacacatggggttcatatcacattccttctcactcaaactataagtatttcttaactttggttgatgaccataccagatttacatggatttaccttctcaagcaaaaatctgatgttgcttacataattcctcaatttatttcatatgtgcagacacaattcaaatgtattttcaaaaaatttcgttctgacaatgctcgcgaattggtattcaaagaccttttttctaaccttggcataatgcatgagttcacttgcattgaaaccccagagcaaaatgctatagcagagaggaaacatcaacacctcttgaatgttgctcgggccctttattttcaagccaaaatgcccatacaattttggagcgaatgcatcatgacagccacctttctcatcaatagaactcctactccccttcacaaaaataaaactccttatgagctcttgtttaatgcagcccctgattacaccaatttaaggaacttcagctgtcttgcttttgccaccactctcacggccaatcgaaccaaatttgccccaagatcaagatcatgtgtttttattggatatcctcaaggcactaagggttataagctatatgacatcaataataaacaaatttttatctcaagaaatgttatatttcatgaacatatattcccctttcaaaaattaaatgctgaaatcactaatattgatcctttttctcacttggtatttccttctacacatatctctaacactcatattagtgactttcctgtagttccacaggtgcctatatccacatctcctgaacaagaatcacaagatcaatgctcccaagatcaagtgatcaatgatgcacctgatactactgctaccacaaccacacctgctactgatgacacccgtggcactatcaacaccacaagtccatctaaccacacacaaccaagaagatcaagtcgacagaccaaacctccaacatatttaagagattatgagtgccattctgtcatacaggatcaatcctccacacctcaccctcttaaaaattttatttcttatgataagctttcggattctcataaagcctttgttcttgcagtatcaaccctctttgaaccaaggaattacaagcaagctagtcaatacaaggtgtggaatcaagcaatgcaaattgtactctatgctcttttaagga

SEQ ID NO: 221230 - DNA, 2541 bp, Cannabis indica
ttataaaatgggttaaaaaaaagggaagctaaaggcccatattgtagtagtgtataaacttccataagcttgttgtgtatatttattgcgccaagtgttgtcttcatggtagaactttcaaaaagtgtctacaggagttaaaagttctcctgtcatagaattatcctatatttaaataaaaataagtgtgattatcattttttacaagaaaaaataatatttatcaatcacaaataaatataaaaacccatctcatcaaaaatatgtactacaataggctttgattcccttccaccttgaattttcatttaatcccgactttattttttattaatcttgccttgaattaacatatttgtgttgcatgctgttaattatttattattgactaaaacataaagtataactaacattgataattgcgtacttgttctttatctgtgccccaatataagcaatgcagtcattccacatctcttgagttactccttccagaggtgtcttgtttgtcctctcctctccaagctcctccatattttaaatggaaaatttgacgatgcatgcttaaaataaatgcatggtctaattatatacatctctctaaaacatcaaataaaatatgctacttcttttttttttaccactaattttactcctcaaataacaaaactaaacctaaatccctatctttccctctcattctcatcactctctttctctctctgtaaactcacacacacacacccttgccaaatttttcatttgtcaaagcaccatttggaggagcaccattgacaaccaagtaggtagagcatcccaaacttcctaccaacataattcttgaagaaaaaaacaatggccaggtgtgtaatttatttagtaattattgttggattaagttatttttaattatatttaggttaaaatgaatagatctacacatatcattcttttattttggctatgttgttattgaaactcgagctgtcgaaattctacgttttctaatttttttcgtattttagtgatattttgcgatacatttttagcgacataagagcatattgaatgtttggggtgatttttaatgatatttagcgacaagtttcacgatatttagcgatattagggcatactgaacgggagggatgacttttaacgatatttggcgacaagttgcgactaaatttacaacacgatcattttatgctttctaactacgatagtcgtgatgtctatcgacattgttcgcgatgtttgtcgattgtgttaaacttatgcattggtgaattaggaaatgatatttatcgacatgttgcaatatatagcgacgagcttatcgacacatattataataacttgcgatgtcacttttgatatttctcgatatatttttgttaactaatgttgtagcaaccgcaatatttaaatatagattagtgagattataagtgctaattttattattaatatcattaatattggaatttttatgtgaatgattatgttaaatgtaaaatatgttatctctgtgattttagcttggcgacaatggaaaatgcaacggaggatattttagtcacttgaggaaatatagaatttggtaatgttagaaaatatgtcatgtaagttcaattagttggtaatggcggggttgtggttgtggaccattttacccccaagccgatttttgatctaggtttagtgatgggggtaattttgtaatttacctttattttaaatgggtgtctttaccatattttgacagcttccaattaattaggtaaaggttaattaaataaccttttatttgttaattggagaaattaggaatagaagaggacaacccttcattgttctccttcttctttgttcggccagcaagaatcatcagccaagggggatttttctttcaatttctgaagctattaggtggaatttgagggcttgatctgaggtaaaccctaagcttgttctgttgtgagtttatgatgttcttttgaaggttttgttaggttaaggatgattttgatgaacttgattatgtattgttaattttcgtttaggttagcttcggtaggtcttaaatgaagttttaagattgctggagttattttggtggtaatttgtgggtttggtcaagtttgagttcatggagctcaaacttgacgcaaccatggcatgttgagttttgttgtgtttttcttgctactgttgtgtgggatttgttctagaatgtatttgcaggtgttctggaaggtatggttgcgtttgggaaagatttggacgagttgtgtaatttttggggattgctggagcaaaccggtccaccagttttacaaggtatgtaaaaccggttagccagttttcatgccaggttcccgaaatcttgacttttccgaatctgtgttattttttgagcatggtttggtttttcttagtatttagggtgatagtactttgaatgtgtcattaagatcaccttagcttttgagttagggtgttaaattagttgtttaagtaatttacccaattgtgttt

SEQ ID NO: 221231 - DNA, 3347 bp, Cannabis indica
gtagaaatacatctcattctctttctctctatttctcgttatctctctcagttctactttgtaaatcctaagtttttgtctaacatatccttttcatatttggattgattttatcttgatttatgcttgaacataaaaaacgaaatcaaagattcaacaccagaaatttacaagcttcacctgccccaaaaactcattttaagcagccagtgcttgggttgcccaaactagggtaataactatcactatattcaaagatttatcttacaaataccaaccataaataatattgtaaacagtatatgtacttttttacaaaatacagtactgaatctatacccaaaccaaccaagacctttgattggagacacaagatccccttgtgtgaatgatgagctctcttgaaccattttcttcaatctgaactctcttcagatctagtgatgaagaagatactgaaattcctacagtctaaactcaacatcatcaagctctggtctacaactttggattaataccaccaagctcaaggttcagacctgccatgtaacacaaagacaaaacaagaagaaagaaacataattcttaatctccaatcaaaaaggttagtcaacaccatagcaagaagttgtatttatacccagttaaactatgaaccccgaaataaacagctttcaccatctaaacaattaaaactcaaaatatatttgttgacgtggactatcactaacaatataaacttcaaacgcaactagacctaatttgtcactacagaaaatactggttcttacatacctgtgcagtgcctttgccgtcaccagagaacgcaccgaagagtgaaattaatgattcccgagccgagctggaaccatgccaagggtttctgtagagactacctttctcaacagagataattgagagaatatcttcagaagatttacaactgacaataaagatttgcatcgacagtctccaatctactttgatcctcgtgaaatgctcggttgctgcaaagctacgtctattaacgaagaatcggtctgaaaaccaagctttaattggtgagtctggtgctgtccctactctaattcctctcctctgatgcaacgacccatggactcaagaacatgttgtgtcgacggccttgctgaacctctctgaatatctgagctttagaaggttcaactttttgaatatctttcatataatactctgttccggcacgcccaagtgctccactaaatccctagcttattccatatattaaaatcactcctagtactcagagcggaccctaagttgaaatgggccataggaaaaaaaaaattgggcccttactataaagataaatagtattcttaaaaattatttaaaaatatgtatttttttatttggacccctaaaatgagtgggccctaggcgcaggcctaacccgcctatgcctagggtcggccctgctaatactggactccattgcatttatgaggcaaccaatgcaccactggaccaccaccacaccctcttctttcaatcttatcatgtgttataatcgatttatgaggtattatgtgttatttatttttactcattttattgtggaattagttttttttttaatttatgtttagtattttagaaactgatttcctttttattttttaattaaaactgggttgagttattgtgtgttaattacttatttttattcattatgttataaaactagttctatattgatttatatctaagatatttaacttcggtaactttttcgacgacgggacaactctagtgaatttttcaataattttttcggtgacttttctaagaacaataactttttcagtaacttttttggcgccaatgatttttccagtgctggtatcttttccagtaacttttctaatgatatttcttattttaaattttataaaatttatttatggtcttttgtttggtttctcgatcatattttaaattttatatttttttaatttgatatcttttgcattatttatttatgtaaagttagaattctaagtagaggtaacaataatatcagggtgtggacataatccaatctaatccaattataaaaaattggattggcttgaatgttaaagttaaattctaattgaattggattgattatagaatgttaatctcaaaatttaattaaaaaccgattcaatttaattatatttactatatgttaaaataattatttatatataatattaattaatagtggtttttttttttggaatattgaatttgtagtactttgatattttgtctattcattttcataattaatgttttaattttattacttagcaatgttgttattttagttattttaaacgtttcgttaaacttgtaaggattatacttttatggagtattaaacttaaatgaagagtgatatatatagtttttacgtatttttattcatgctttcaagttaatattaaaaattaggtgtgtaataaattgaaccaattaaattagtaatttacttgaattggattttaagatttaattgaattggatcggatgatgatgaacatctaaatctaattaataattaaatttaatcaaattgagaaaaaaatattagattagatcagatctctaattttaagtaacgcaataacaaacagtagtataaatatttatgttacaactagagttaacaactttacaccattttatatagtagtgtaaatgcgttttttaaaatgatttttttaaaagcttttaaaattgtgtttttttttttaaaaaaaagaaattatgtatttaatacaatataatatttaaaaattatttttatttttttaaaaaagaaagccactattttcaaattttattttaactctttaaaattgtgcggctcgattctaatattagtaattatattaaataatattcaacagagtaaaaagtattcaaagtagggttaacaatttgtatatttgtcttgtatttcagatcaacacaattatacttaatatgaacacgatacaagtaaataatgtctcataaaatataaacacgaactcgacataaataagttcaaatttctcatttacatgtgcaataaattatagtttcattaataagttaatatgtttatcaattttattttaaaatatttaaaatttgtttagtaatatgtacttaattgtatttagacgtatcaattttaggtttatattaggttaacatgtgcttaatctattttgacacgtacctatttatgttaaggtgtcgttaggttggaggtaatgaaatgaaataaaattgaatggaaacaatttttatttcattcctttgtttgattg

SEQ ID NO: 221232 - DNA, 2324 bp, Cannabis indica
ttttcaatacagagtaaactataatcaaacataataattacattaaaaagtaggtcgtaataatattatcttattttatttaacaagtaagcataaataagaaataattttatttattataatttataatttgaatattgtttacttgttagtaaactaaatataaaagaaataatttttaaaatataaaatttgaaagagcatatgctttcaaaataatatgcttttatgcattaaaataatcattttaaagagtagatcataaattcacaatagtgtaattttttagaccaaataattcttagtttagccaaaaaaatctttttgaatatataaaaaaaacttaaggaaagataaaatattttgaatctaaatatttatcagatatatgtagagttgaagaaaaagttaggttcttcaccaaaaaaacataataaataaaattaagcctataggaaaagatgattaatgcacatcacattattgctccctgacgttatcaatttccctcatcaataacttcagcctgtttaatagcccatataatatagtttaaataaaaaagatgttataaaatgacgtttatataaataattagacacatcaccttattattggaattgcatagacatataggtattcaaatataaatttcccaaaaaattatacatccttagtattttaatttttttaaagaataaatagtatttttgtcctatcaattttttatattatcaagttgtgtgttttatagaatatagaatatttctcaaaatataatttttacagtaacataaaattttaatcacattttattgaattttattgtgaaataaataaaatagtagatggtaattaataaatagttacaaattaagggtgactactcaatggttacatttttattgtaactatcatggttatatttttttttacatataatagcatgttactaataggtaaaatttcctttttgagaattaattaattataattaattattttcttaaaatgattaattgaatatttaacaagacctcttttagcaattaataattataaataattttttatataaatccctgctataactattttttttagagaacaattaagccatttgattataatatttacaataaaattttattttttttttacaaaaattagattcttttgacacaaattagaattctctttttgcataataaaattttaaataattaattatttttaaacgatattaaattattttttataactaaaagaactaagtatgagtttttttattcgagtttgacgttgcttcatttactgggggagcttactttattttttgactctggtttgattttttaagtaaatgactccttataaaaaaaaagatggaggagtttagccatttcttttttaaaaatacattcaacctatttcattttttattattaattttttctcttgttacattggaatggtctttccttcctttttaaaatagtatagtcattccaccaaaatggtggaaagagcattctgttgttggaggaatttagacaacaccaaaataaataatataataaagatatcagcagagaatatgcgagtactcaacctagagtcgcgagtatttgagctatgaatacaaatgtactagaaatatactggaaatataaagaacaaaaaggaatatagtggtttggtcagataaagatctgcttagtctactgttgtaacgctttactgtcttgtccatttcatgttggatcactcctttatatacaaagcaagtgtcctttgattacacagagattgaattcattatcaatccatttgtacatttaattacaacaattaaattaataaaaatgtaaatataataaatgaagaatagtttcggcccaattcactaaatacagcaacgtatgcgacttgtgttatagtgagattttctcacctagaaactcgagaccagactcttataaaactgacaagtggactcactctcctcgaggaaaactgagatgtcagtgagagacctcttgagtataaacctcgtctgaaccagactcagcgagatgacgtgaccatgacagagtctaatcgtattcgtatagctcgcataaaataggaccaaggaacggtttaagactcgcatataccgagatatatgcgaggactatcgagatcctcctgcgaattgtaaagattgattctttactcttcgagttggtccagattacccaacaaccctgataacccgataaggattcgcatgccttaggttgtcgacttattacaggatgcccgtataagcgacttgaaca

SEQ ID NO: 221233 - DNA, 1194 bp, Cannabis indica
tattcttaaacaaaaaaatgccgttagatagacactattaatatataaagatatataaaaatccaattaacaacattaataataccaacttaattcaaatttagtcacgggttatgcccttaacttgagggcatcataaaaataaaatcatataatggatgcccacacatttaaatacaatcatatatataaatatatatgaaatttcttgatataggtatattataaatatatatatatatatatatatttattgtcaaggccggcaagttgagttaaataatgtatatagggcttaaaaaaataaaaggtctagtattttttttcaaatgtctttcagtatttttttaatgaatccaattttttaaaagactaactacttgtcattagtcacttccatctatattcttaaaatccatttttaattctatttaaaaacaaattaaaaaagtctaaatagtgttattaattatttttttcaaacttttcatattcatttttttgttgtatagaaattaataaaaattttaataaaataattagaatttttttaatattttgtaaaatatatataattctataataatatttaaaaaatattatttataaattgtacatattttttttttgtagggagctaatattaaaaattaaaatagagcctctaaaatatttaagacatctgtgttgtgtatagacataagtaaataattttagtgcgttgtgtataaaagcattatttgatcacaagctgtgtagaccaccaccatataaacatatatgatctgcccatagaccacactattattaattattttaattaattactctctcattttatttcttatatgtccatagataaaatatatatttatatatatatgcatactggccactttatatttttataatttgattataattattattattattatttacaaaattcccttcttctttaagcaaaatcttaaatataaggttataataataagaaagtaaagtagcaaatgttaaacacaatagatcgatttatatacatgcactataaatatattaatttgtttcgaacctatattctaatattatatcaatttatatatgtgcaataataatttacatataatataaacattattaattataataagaatgatattttgtttatcaattaaaaaatactaattaattaaa

SEQ ID NO: 221234 - DNA, 3716 bp, Cannabis indica
cccatcttccaaccttggagtttttcccaaaccttgttgcgaatcaaaccaaaagcctctttcttattcttcccaacaaaggcagggaggccaagatacttcgtatgattttctataaaagttacccccaaggcagcagctaaacgaagaccttccgctttacttatcttcttaccaacacataaattggacttgtctaagtttatgcattggccggataaagaagagtaaacccgaaggacctccgctagagctttcccttcttctatagaggcattcatgaagattaggctgtcatcggcaaataaaagatgtgtcaagtttttctctagagtaccaaaacggagaccatggagatgattggctcgacttgcttcatcaagtaagcaagacaaaccttcagcacaaataaggaataaaaatggagagagaggatctccttgcctcaatcctctcttcggtatgatgtgaccccgagcctccccattaagcaaaactgagaaagttacagtcttcacacaccccattatcttcctaatccattgatcatcatagcccaaacatttcatcattccctctagaaaatcccaatctactcgatcataggcttttgacatatccagtttaagggccatcttccttccattaccaaaccgacctttctttaagcaatgaagactctcaaacccaagaattgcattgtcttgaatttgccgaccttttatgaaggcactttgattctccgagatcaccttttccatgctcagtttcatcctatttgcaagacatttcgatatcaccttatagacaacattgcataaactcaacggtctaaactcttccactttctttggatccttcactttgggaatgaggcataacagagtatcattaaggcagccacaatccatgtttttattcaagacctccaaacaagtagtaataacctcatgtcccacgttccttccaatgagtgtgataaaataatcccggcagcccatctcttcccggagctttaagagggtggatttgatcaatggcttctttaacctcttccttagtgaactcttccagtagcatggcattatcattgaaagataaccggtttggaacacaccgattgagagtttccatcatatttggtctacgatttggtgctgaaaaaaggtttgaaaaataccgtacaactatgtcctccatctcaatgtcctccttacaccatctcatttcttcaaaataggccacttattgtgttcttttttcgctgggaagccttgtgatggaaatatttggtgttacgatccccatgagaaagccaaagtgcccgacttctttgtttccataaaatctcttgtttctcctccgccacgttaaggtctctttcaatccttcttcggagtttccaatctatctctccatcggatgaagagataatctttaattcctccttaagttttttgttttagccccaagttccgccttcttatccttattccaatccttaagaatctcaccacaacgattgattctctccctaagcccttgaggagatccccaattggaaccatcaaaccaaatagcctctatgatttttccacactcctcttcttcggcccatgcttgttcatagtggaaccgagacctccactttggcgtagtcttagagagatttttgttactgctgaaagtaaggattaaagggcgatgatccgagttccaccaaggtaggagggagactttcgacacattaaaccttttattccaattcgggttagccaaaactcgatccaacttctcaaaaacaagactgttttggcgtccattacaccaagtaaactctcccccttccattcttatttccttgaagttgcaatacgaaatggccttccgaaagtcactcattaggtaatcatgcttcaagcatccccctttcttttcattactcttaactatctcattaaagtcccctccacaaacccaagccccttggatcaagtctcggagccgttccattagagcccacgaattcttcctccctcctggatccagactcccataaaaccccgtgaatctccaacaaaaacccagcccattctcaaccatcgcatcaatatgggacaccgtaaaggacttcacttccacctcaaaaggctccttccaaagaagagccaaaccaccacttttacccttcgccgctacaacaaaacagccctcaaaaccaagaacaatacgaattctctccattgctacttcattcaatcgcgtttcagataagaaaatcatcccgggatgatgatctttcacatgggaacaaagagttttcaatgtccaggggttcccaagcccctgaacattccaaaacatgatattcatggctctcggcgacccagggcccccgggttcgccgcttccaaagtcaccccagagtccaaatctttcaaactagaaatgtcccctggtaatttttcctcccctgagttttccactttcccagtcaaatctttcatagtgtccactgcttggtttttcagtttagtgtcatcctttcgattcctccttgccacaatcttttttggtctccctactttgcctttctcacttgcctttccaaaatgtgataggaatgtcattccaaacactcccctcctcagaatgaacaactgacaattcctccctgtgtagtcgtttaccagagtccttccctaaaccatcttctttattcaaagaatctcaaaattccgctctccgttttaaacccgagcttccttcacgcacaccttccttagctacccgtttgacatccaaagcattcataagatttaaacaatcaaatgaaagagaagagttagagactggtacctccaaattgggtggttttacattcgtattcctgggcagagagggatttcccatagcaccacaaggattatctctatcattcaatgtcaaaaaatctgccataggttccaagtttaaagacctttgtactccaccttctgaatcatctctcaaagtgttcatgtgtcttattcctttatccaccgatttgcccttagtctgtctctccctttgtcccatcgacttctcatcaattttcaaccatgccccaaaggcttttgagctcgttccctcctccgtcttaatctctacaggattctgcccacatgaacggtagtcgtgccccaccttgccgcaactgaaacacatgaatggtagtttttcataccggaagggtaaccaaacatgtcccccagaaaacggaaaaagaaagcctgggcagagtggtttttcaattgaaatccaaactttaaaccagaaaaaaccattcatagtaatcttggttacatcttcgctttgaatatcgattacctcccccgccatcgaagccaaccgcaccatattcttcctggttatggatttagtaggtaggtttaaaaccctcccattcagagggaatcggtttaattcctcctcccatttcgtcggcatcttcaagaaacgttgaagaatcaagacaccattgttcagcatccatggtgatttgttcagaatacggttcagatcatttgcgttcttgaaagagaaaaccaagaatgtagcttcagtattaatcctcttgatcttaactccccagtccacttcggctaagccccacacccttcccagaatagttcgaatgaggactctgttaacacttttgttcgaacagaacctac

SEQ ID NO: 221235 - DNA, 3282 bp, Cannabis indica
ccgtcccaacacagctaagaatgcacataaattggatccaaaacataggctaaaaatagcctaacagttatacaagtgtgtgcggactctttggataaccatcttaaggacttaagccccaatttctttattgggggtcatctccgaaatcactattaagtcgaatgagctgggaattaattgtgcttgattctctttttcacatagaaataaaaaaactattatttatttattattttttgttggggtgataaagctttcttttctttcctatctaacttctaatttttcatatttgacctagtaattaaaacgattaatattgaagaagcttaactcaaaaccaattctttctttctttctttcttttattattatatatttcttggttgtcttctttctcaagttgcatatttatggtcacatcaatacctttttagaggggtcacaaatatagcacaaccccatatagagctatcaccaaaagacatggataaagccaacttcaaattcaatacaaattttgggaatattctaaatctaatacccaaatgataacaatcttcatatattattattattaattatatttttattttgagtgttcaaaatagaacattttatagtttgtacccaaaaaaaaataaaattatataacaattattttgtacaataatattcatagcatagggctaagccaacaagaaaatggacatgcataaaattacattcttctttaagaggcatatacttattttatatacacatttatctatatattatttactatatatttttaaaaaaattccatttgaactctaaaccaaacaaataccaccaattaattttagtacaaattaagcatataccaaatcatcattaatgaatggaaataaatacacttgtttaaaacgcgtatataattaaaaatattaataactaatttctctcttcaacaataacatatattggaaacttaatgtttttattaattaacttttgtacttatatttatttattttgatatataataataacctattggaaacttgggtagccccacaacaacacaaccccatccaagaaattgttaagaaaattctttaattctgtgttttcttgatcctatctctaatggaaatctttttgtgggggtcccttatccccattttttgtgatcgatctaggaattgtacattcatatatttatttatatacacattaaatacattaaaaatatatataaatatatatatgtcccattgatgaaaaggacaattaaagagccaatagaaaaacaccaaatatgcaaaccaaacaacaaatagtcatagactcatatccatgtgttgcattctcattaggcatataattcttcatatatatataaatatatatatatataaatatggggatatgattttgtcccgttattgctgtattttcacggattgtaatccgtgatgtacggcagccgtcagataagagagttatttgatctgacggttaagattgatctaggtgtaattagggttaaaaagtagaaacgtaccctgacactcatttatgtaccctaagacccatctaatataccacggaatacattccgtgaagtacatcacgggacaaaatcatattcctatattagtaatatacatatttatatttaaaattattacatgaaaaatataaactgacattttatttacaaaaataccttcataaggtgtagacaatatttacaccttttatatacttttaattaccaaaataactcttatactatcacttacacaataaggcgatggttgtagggtggttggccgaagattgcatcagacgaatgtttcaatcagacaaaggttgttgggtggttggccgaaagttgcattagacgaagatttcaatcaaacgaaataactgttaggaaaatgtttatgtaattgtaacacaactgttatgaaacattaaaaatcataacagtgttttcacgtacgtaactctatctacatgtctcttcatgatttaatataaacaaattgatcattagaaatttagaaaataacgaaaatacaccaggataaacattttataatagtattgatgtaatttcttttgcattatacttgagttggattgtttgcaaactccagttcaactttttgagatctgcatttcatggatctgaaaattgaagtcaggacattaattttatccaatttaaactggatttccggataaattttagttttgtagtagtttttgtacactttttttttcataaatttgaaatagctcctgttttgattgattctggtcgtcttctcaggtgaagtcaccgaaattaatgatggttctctttctggttgaattttcgtttcggttgtgttgggtttctattaaaataataatgaaatatttcaaaaaatatgaaaaaaataaattgaggctatttctgaccagtgatgatgatctaatagtgaaattgactctggaggttggtcatcaattttcagaacttgagtcccgtccgcgagacccacttcaggtaagttgtagcttaaattcgtaactctcttgaggataaaatttggagttgatgacttcagaattgagattagaatgtgagacatgacttgatgtagcattgaaatagtttcaaaacttaaattgaatcgcatcaatttgataaatattgagtgagttattatcattttactaaggctattctaagaccaacgcctaggttgacatgatgtgacgtcaacctggacgatgggtgagtgggaaaacatgatgtggatagatttgatgatttctaagtgatgttttgacatcatttagctagtttttgtgttatggtgaaactattcaccaatactcggagatgttgttgttttgcataattgggaaactcgaaaccgcttaatttgcgagtaagtcactttgccaaaaaaagtaaaaaaatatgaatttgtgaattttacttgtctaactttatagctcttagttactatgaaaaactagacgaaagctcgagacaaaactagaatcggataagcagaacacaacgcaccaaaccacaaatcaacttgggtgttgggtgctctttctggagcttataggatgtcattttgatacttccaaggttcttgaaattgagtacgaggtctcctaccctgtttttgaccatgtcaaatagaatgctcagagcataatttgcatttgggtgatcgaaacctgtaatgaccgctctagtttatgaattagtaaaggcaatta

SEQ ID NO: 221236 - DNA, 2171 bp, Cannabis indica
atagtcatctgggaactccatttcggactcaatatcattccatagactcttctaggatggacagttagctagccgagaatacacatcttggagatgctttaactttccaagaacgaattttgaaaatcttttcatttggtagaactataccacaatactctctatatatttatattctacttatgtgttattgtaataattatgcaagaaataattcttgcacatctagtagttcaagttcatcaattaaccttggaaattttcatgacacttcaaataaattggggcagtttcctgcaacattatggagtaccacacttgaaagtaattggaagattgccacaatttgtcaaaggttgtcctggtttaggtctcttatttcctaaacaatttgaaatttaactcaaagcctacatagattctaatttaggatctcatcaagacttaaggaggtccactttaggtttctatgtgttacttgaaaagtctttgatatgatggaataccaagaaataacatacaacttctaggtcttcaattgaaacagaatatagaactatgaaaaacactacttgtgaaattgtttctttatttttttgtcctaaaggagcttaaacaagactacaagggaccatttaagttgttttatgacaatcaagaagctcttcacattgttgtaaacccagtgttccatgaaacaacaaagaatatagagattgattgccacttggttcaaaagaagactccatccaacttattaagacatctcatgtttcttcttgtttaccaagttttttggaaacctaatattatgaaagaataagcgaaagaaaatagattaagaaataaaataacacacaaatttaacgtggtttgtgaatgagccttagtccacgaggcagttttatcatcttttagcaatggagttttgacagctctagtatttttctaggttgtgaaccttttgcatggaagagataataacttatttataggcagccatgctaaatggattggacgaatttgggcctaactagggttgttgtagggaaaaacccactgatggagtaaaatacatcatttgagcattatgttgatttatcaggtcgtaaaggtgaggcccgattcttgaaagcaatctgccagacaaagtgtagtactattgatagtgataggcgaggttgtgcacaatcgtttgaaataggaatgtaaaagttaaggtgcacccctaaaaaaggtgctctcccttttttttttttttgtgtgtgcctttgcgaaggtcggtagaagggacaagttcttaaatttcttaggatcgtgtcagaggtgtgacacgtaagtagctctcaagaccatagactatctaagacacctttccagcttccattcccggaagaccgttgagggcatttcttccgattaaggattcttataagtctcattaatattttgaggtgtgtacttatcaattttgggaaccttgaattatatttgatctgattatatttttaaaattgaattttcaccccaattcttcaatattttcttccatttagtcctgaattatttgttccacaaacacacctaaaagtacataaaattaataaaaataataaaatcaaattaaaagtaaataacgcattatataattagataaaatagctataaaaatacactataaactatgaaatgaaaataaatctaataaattataaaaaaaaaaaactcaataacttaataaattaactaaaagcataaatactgaactattttcaacttataaaatgtgataaagtaactctaatttctaagattatcatgtagagtagataatttaggtaaataacagaattagttaaatgtgtttaactaagaactaacttaaccaaaaggctaactaactaactaagagcatccctaataaagatacatataagtgatataagttaaaatataactcatttagcaaaaaatatactctaatgatgtggcaaaaggtgatttgaatttggcacataaaaatcttgtatcaaatttgacactacatttgttataatgaaaaatttacatttaaatgcactactttttttttgtttacacttataccatttatattattttattagtatctttaactatagcattaaattataaaatatttatattatttt

SEQ ID NO: 221237 - DNA, 2500 bp, Cannabis indica
tgctttttatttcccacttctgggttttatcactagtttcttagttggcacttttgtcacctcatttggttttagctatttttggctaattttttttgggaaatttttagggtttaggcaggacgtaggtttttgggtttctcaaatttaccaacttctggtttgataaatttcattcaggaattgggattgctttttttttttaataatgtcccaatttggttcagaagtttatcgtccagaaactttagaaacagagtgccccaatgaacttgccatcccgtataaacccagtaattcaaaactcaaattcaaattagagatcaatgatgcaaaaattagagaccacttggtaaaaccccaccaagatgatattgctagtccccacagacacttcttgcaagaaattatagaaggaaaatgtcatttcttgcgagacgttgcttggcctgagccccccagtctatcatatattcctttggctaggcctttatttttacccaaagtcacgattacttttgaaccaggtgacctgaactttggaatcatgacttccaagcctcaaaaatcaaagactccacatgacccaaatgtcaccttcgagactgaactaatagagtcgaaggttcgagctaatggagactacgtaggtaccatcctaaagacatgtggtatcgtgtacaagagaaactgttgggttaggtcagtagctactggtgagtttagttgttacccactagaacgacttactcgcgaagcatctaaggggaccagtggcgaggccagtacgagtggctcgacaagggtaggagcttggagcctcgaacacataagggttgaagtaattatcccctgcgagactactacaaggacttcctaaaccatctcgaaatcgccccattctagatggttcttatttcatacaaaatcctcttaagtttgaaggttctatacaaaattttgaactaggagtaccccacatctttggaaatagaatacctctactcagtgaaggcagtccaaggaagaatgctgcagggggtttttattatctcgagactcacacaggcgattgtaagatcattgttgtgttaccaaacaagactccattcaaagaggactttgtctagacaactagtctttagccaatcgacacaaccaccttcttcatgatacgtaagtgattacttgcccaagacttggttaaattattccatgtcttgaattctagctttgttgattttaattttgcttctgttttcgacagctgtttaggcagattttcgttaactaaatttgagcctcactgtagtaattttactcagaaaaataagagctataaaaataaagataagaacacaaggttttttacgtggtttttgcagttaaaattctgcatagtccacgagtcaatcttattaacaattctgattatttttcaggatttctcctctatgagttttttccgtcccactttttcaacttgtctgccactatttataattacatagtgtgcagtaaattacaaacgttgatagtaatctttacaacaattattccctcaaatcatgggatttgattacaaattatgctaagtaaatgcggttttatttataatccacactactgtgagtatcccgtttttattgggccgagatgaatgcatatttaaggatatacggtaagccttttatcatggagatgcctcgctaggaatgaaactgagttaagtctaatggcgagctctgtctcatcatatgacttcccaaaattaatattgctgataactacattttctggtgccgagatgatctttctcgcatgcatgccatcctttagcgagatagaagcctcgctgtttgtcatctttattcaccaaattttttatacttagtttgtataccatgtagtatatgctaagtgtttttatcgttatcgtttctcttccatgcgacgaggttgaagccttgtcatgcacacttgcactcacatggtttctcgtcgatacataagttagcagtttgtacatttttatcttgcagaagactgtttagctagccgagttataaacatactctagaaattatgtttctaacattcatgccaagtgtacttacgatttcgtgtttgagttcttcgttcttcccagctcaaaacgtatcctcttccaatgtgcttaccgaattttaggtataacaacagctgtctcgaagagaccaaccccaactcccgagatggctgagcgacgcaggctcctacttggtcctccatacagtctccgatcggatgagttcctcttgaacgaggttaacttgaggtccgttgatctgctcactgagaaggagtttacttgtgattacaaatatcccaagtattcttcttggcaacaggttccagtcctagccaatgaggaatctcaggattatgtggctcgggcacactacctctgaaatgcagtccctcgggaagccgaagaaagagcatcccgaggtaatcaatg

SEQ ID NO: 221238 - DNA, 1905 bp, Cannabis indica
ttcgtttttctattcaaatttgtttatttttaattaaaaataagataaataatagttatttaaaatgtggcctaataatgtcgctatgtgtttttgagttggcactcaataagggtaagactgtaataaaatcttaagtaaatatatttttactgctagttttttttattaaggtcatatctgtaacaactgtaaatgttaaagaagttcagcgtaaatatctcttattaaattcataattaaaattaaaataaagaatgttttccttgcatattacaaaagtcatcaataagtgaatttatattaaaatttttgacaatttctttcaatatataccagtaaacaatcatttaaaaatttattttatcttattgcagcgtgtagttttcactagattaatagttgaaaaaaattattttgtagtagctactaagccttaaccctatcccatgataaaattttaataatttatagtatttatattacattttatagacaattgagcatatcttgcaaagtaaaataatattgttaaaaagaaaaataaataatcttaaaacacaataaaggaaacgaataaatttttataaaaataaataaaagcaaatccctataaaatatatcatattcataatttatgtttgacaacgatactcaattatcctataagtttaagcacatataatatattgtggggggaccatggtccctctatgtcaaagtgtacgtccaactttgtataccttaatctttattaggtaaatactattttaaattttgtgttttataaaatttatcaatctgatattatattttgttaaatgaaaaattagattctagtttcatttttttgttaatttattttttagtataaccaacctaaaatcaatttctaacacaaatacatatatacaaaaaattaagtcataatctttttaagttatatttattattaaattttactttaacaaaaattaaataaaaatttaaaatatcatttaacagaataaaaaatcaagttaataacttttataaaatccaaagcaacatttagtcttttttaaacgaaattaataatattacacatcaattaataattagtgtgattttttattttttatttatttatttttttttatataaaaaaggctatctttcatatttaggggaaggatttggtaccataggttaggattaagtaataaacaaactgttttcctaccaaaatccaaacttcaaaatatagactaataagaaaactttgtaaattctttaatcaataacattaatttatggattattaggtctttacttggttattagtccacgcctcaatcaaaatgtgttattttaatttgaaataaaggaacaattcgattaaaaggcacaaagccaaaggatcaaaagatcaatacaaaatgtgttaattaaactggtaaattattaacaaagtaaatacattatactataaaattcttatttgaaacttgtctaattaaattattgttttttctcaattaattttatttataatatgtataataataagaataaacaaactaagtttcagttataacaaaactacacagtgtttaaggataattttaatttaagatttcatataattagcttgagcaatataaatgattatttatttatgagcattgttattaggtaccagtggtatctagcattttctcgacatgcagcgtaaattattatattaaattatatgagacctgataattagttggaccaatagcaatattgacacataggtaggtataggcacctctagtgccatttaacatttccctctttttatatatttacctataagagaatattaattcaaggttttaaagagcagaactttataagtcaagcgaaaacaaagtcgcacaa

SEQ ID NO: 221239 - DNA, 1915 bp, Cannabis indica
ttgagcagtttcagcatttagctatagtttctccaaaaattcttacaaaagctattttttgactgtttaccaaacacattttatcacaaatttttcaaaaagtaacttttaacttttccaaaaagctgtgtcaaacgagccctaagacaatgtcttatgaagccaagaagctttctatgccaataacaacttcaacttgttcctcattccttgtaactggcacatcagcaagaggagggatgtcaggatgctcgagattgtagccttcgacccttaagcttcttcaactattggctcatctccattaaagttaaagtctattctctggagatcatcttcattaaaactctactcacaatgccttataaagaataggacttctgtgtcaaggaatgccgactagttgaatgaccgtgctcctccattggatgaccaagcatgatagaagacatcaaaacataagtcatcataaaatgtgacattaataacagccttatcctccagtttattcgcttgctctctcagacatttaacttgatcttcaagttgagtagcagctaaagtctgctcattaagttccagccgagaagaatcttcaacctttgaagctttctttccaagcagcatccaggttcttcttaaagctactctctcgagctttggcactatcaaccacttctcaaagactgtccatgattttctctagagaatcaatgttttccttcaagacagccacttgatcttgtgcaacaacaacacactcctctacaattgagagtttttaagcaagctcaatcaccttcttgtgtttgttatccatagtgtaagcataaccaacacaagcctgaaaacaagaagaaaattcaggtgatgataagtaaaataaagttaattcaagaggagacaagaaatgttaccccaaagatattagtaaagcatctttgggcaataacatttgaaggcttggggctaactaacttctgcaatgggatgttcttagccttggatccaatcaaggcatcaccataggcaaggagtcaggagccctatgcacacagtttcttcaccaggtccaaacctgagttttgaacaccattctcagtttcatatggagaaatctcaatgggagatccctcataaactccaccacatctaaacttctcctagcctagatcttggccaggggacaacttcagcaagtttactcctctttcgaagtttcttctttgtaagagcaaaatgttaataactaatcttggctttctattaattctgttaattagttattagttaggtagttattttttctgttatatcctcttgctgtgtaatgactttgtaacagctctatataaataaagtctcgctaatcactttgattagcttttgccttttactttgttttctctctgtttttcttttcctctgttcctgtggttccatggtattgttcttacatggtatcaatcgctagttgactaccgtccatggcgtcttccacaaccgatcctgcaactgcaccaatggcttctgccacaacttctactgctacctcatggaatcccttttctcattcactcacctcgtctctcactctcaaacttgaccgtcttaatttcctttcttggaaatcccaggtcgtgccaacagtgattggccacgatcttgacgaaattctcttcaccggagtagcaccagtaaagaatcttgtcaatggttcctcaaatcccgaatatgttcaatggaggcgtaaagaccagctccttctttcctggctcagatcttcaatgacagaggctgttcttgcatcagcggctaactatcaaagctctttcgctgtgtggcaagctttagaacagaaattctcgagccaaactaaagcccgtcgtcttcaactcaaatgccagttctccaa

SEQ ID NO: 221240 - DNA, 1972 bp, Cannabis indica
taagaagagtatttttaaacaccaaagatagtacggcaggtgtgctcgcaccaaactgggaaggaccttatcaagtggtcgaagttctagaatcagtggcatacaagtggggtaagtatgatgaaaaaatgcaactcattctggtaccaaggtattggaacggggaacatttaaaaaaatattaccaatagaagtaccaggtcagatgaccatatcaagtacgaaataaaagaacatttgctcttcagtgaatggccttctaggcggaccacgacctaaggttcgaataaaattttcaagtactcaggtcggatgaccacctttgaaagtacgatttttatttcctacaattttttttgttcatgttaagctaaagattagattatatcaacataatagccttgatgtaagttacaacggtaacagacacatttccgaccaataaatgaataaatatgtttatttaaattccaattgagtcgagttcattagcatgttattaatttatcatccaatgcgtacaaaaggtttggtcgaacctaaaaccctgaacatacaaaaaagcatacttgaaaaatataaataaaaagtgaccaagagtcatgagtctgcttagtcacttgggggcacctatacctgtacaaagcatttggtaaaaaccaaaacaaacacaattggacgatgatcataaacaaagaatgaaattcattaaggatagcaaaagccttcaaacccgggattaaaggctggccaatcatctagctgttcgaaaaatgaaaaatagattctaagtttaaagatcgcttgtccgatcaccttgtcttaaaaaaggccttatggccgaactgataaaaaaaaagatagtaaaaggaagcacttaaacagcaggagttccaggctctttgtatgggtcaactgagttagaaggggccggaggatcattagtctgagcaaaaggcacttcaacacttcgatcagtagaagaggtggatgtggtcgcctaggattccttatagaccgcctgagcagcacagtagtcgagaaacatctctttggaattgcccagataatcaatgtttgccttgggattggccttccaaaagtcataaaaaatatcgagaccagctgtctctagggcattcaccttcactctgagcctcgccacttcaaaattatgtttctcaacctcgggcccaagctcctcttccttagccttcttctcttcctccaacttgcgaagaagggtccagagatcctctctttcatcttggagactggtcacttcccgagataaggaagcaatgtcagctttgagctgctcagtggatggcatgtcctgcaaatcttttgtcagttcaaccactttggtctcagcagcaaggagcttcttattgacctcacccagctccatctgcacaaccccaagttgaacccgggcttcctcggcgtccttcttggccaagtccacttctgttcgcattgtgttggacatggcaaggtttttagcagcagctaacttagctcaggaatatgcataggccatctttagaccagtcttgacagaatgaagacattaaaatccgaactagttaaagaagaacaaaagaaaaatgtcaaaaaagacgtacctgtgaaagctctttcaagactcctcccatgaccagctccaaggacaagtcattgtcgccccagctagttgctcgttcatctaagggaccgactggctctcatagtggatgagcatctctctgcctcttttagtctcctgtttcagtactagaggtgggacaagttccttaacctgtccaaacccgtttctgatcagctcggatccaccctttgcttgtttaggcctgtccaaactacctcctcgagatcctttggacttagttgttcggaatattttaccaggatctagatttactaacaagtatgctgaattaacatcgtaaatatgaattctctaaaacaa

SEQ ID NO: 221241 - DNA, 1932 bp, Cannabis indica
aataataaaaaatttacaaaaatatggttgtacggaattttaaattttttttacggattttatgattttatttacaaaaaatatagttttttgatgtatttttatattttatttttgttaaattattgttggtttttgttattgttttgatgttgtttgaatgttatttttagttattattttcgtgttgtttttatataataccgtaaagtgtaaaaataaatctttagtttttgcttttaaaattaatattttaagtaattttcactattagttattataaaaatgcactaataacactttgatacgtatgcaccacaagatgccccttttgatcatttgtatatattcacagctctgactttgaaggattaatgtatgtattcaaacaaaacaaaaaaaaaaacaagaatatgcagctcaccacaactcaaatcagtacaatccaagaagatccaaaagccaatcaatgaggccaagccaactttgaacagcttgaaaacaagcatttaaagaataagtgttgcatgcttgctacactatgttcgtgttaacttatgcatattaacatgtttaattctaatccgatttatatataatatatatatatatatatatatattgtgtcaagaaatcttaactcgtgttctcgtgtctacttatcgtattcacgtatcgactatacttatattacaaaacaagctaatcaacatgattagtattatcacatatttagtttttatgtaattaatcacaaattatcaatacaataaataatttttttacatcaagtataaattatctattttatatttttgcaatttttttctaatttatatattttttatgaaaataaataataattttactataaattaataattttaataatatattatatataaacaaattaattcgtgtcgattccatgttacacgtgttacctttaactcaccccaaataataatagtgtcattcaggttcggcccaattccaacccacatttcataaccttaaccataataattcgtatcgagttcattctgtgttgcggtgtcatgaattgccacacttacttaaatctccctaacaagcctggctattcatttactttcttttttacaattttgtggttgactgtgaagatggagtgatttgaagcaattttattataacaatatgttctagattatttttctaaataattattaaagtgctcttgaaggaaaccaaaaaacattggcataattttgtgagtatctgtatggataatggatcaagatatattaaattatacaatatagtttatatatattatatgattaataatttaatatcatgacagctcaatcaaataaattttcaaacacaaaaaaagacatctttaattgattgaggcttttttctttccaacccataaataatccaatcttaaaagacaccacatttttccagccactcctacctaaatcaactatcatttttaattattatttgtttaatttaataataataataattataatatccacataattatcgtgcaagttaatgattaatatgaattatattaagatatatatatattccagcatgcattacatttcttcacgttaaggaaaaaatgaaaagaaaaaaaacttgttaattaatggctgcaattaaagttttccttattaatatcaatacattttttttttctcttcttattgattaatatttttatttaaagaatggtgtttggtaaaatcatgaatttatacattggattgattataatgtattataatattttttttttttatggaaatataaattatttctaacacacaacttgtgtatatgttatgttatcctattcttacaataattttgacaataatatgttttaattcctatataacaactaatttcttctattttttttcttta

SEQ ID NO: 221242 - DNA, 2640 bp, Cannabis indica
aaatagaagttctactgtataaagtgaggaagttacccacatttctttcaatcaaactttgtgattaaacaacctcatttgattaaatagaaagtaaatgaaattcaaagcttttaagattgagtaaaatttgaaaatttcagaagaaaccaactgccttttttgccaagctcaatataaaattaatcttacaaggctttttttttctattaagaatttttttaaacaaaggaatcacatgtagggtatataaagtgtagaaattaaaaagtcattcatattacctactaaatatttgtgagactcactacattcctacttagaatacaacaccaaacaaagagtttattttaagtgcactcacatttcaacacttatccccataacaaatacttgagttccaaattctaatatgaattacgtaactaagggtatttcgtaattaaagttaccaatatatttgtgtaaataaataacgaattacatgtaggcatataaagtgtaaaaattaaaaaatcaactaatatgtagcttttctctctctggagtcttctaggaggtatgcgaaaccgtttcatggctgttggtctggtcccaattatggtgtttctcgtccaccctactcagttaagtggtggttttcattcattttttcttcctttttgtcgttttagttcattttctatcatcattaagagcattaattgctctgtgtattatctcctgttcacacaatcccatcatattaattgcaaaccatcattttacctctattctcttcctatttctttgttttacttcatatctgggggtttatgttgggatctttggcatttattatcgcctgaggatatctccagccatcttttctctcttgaagattggaaaatgggggcggaggtctgggtttatgaagattttaatagcctcatcatcattacacctcttcaggtgaaggctagggatgtgactaggggcgattcgagaaggcacctacggggtttctggttttatctatatatagtaagactaaggtatggatcatggcacttccctttcatcttttcaattccttggtttgcttgttattattctgtgtgtgtctgccttgatttctatttctctatggatgattttctcaatactgtttctaatactttagtctttccttctgatgaaaacactatttttacctatgatgctagctcttcctcttctacccctgctaccattagccttcttttgaaactccataccattagaccttataataggccatccttgatgaaaaccctatctggtatttggtcatcacagtgtagattccctgtttctgtcactgagcatgctgatggtcttttcctagtgactttcggatgtgagggtgataagggtagaattttagaaggacagccgtggcatttttctcaaagtgtcaccatctttgctgctcctgaaagttctttccctattacccctgatactcttcattatgttcctttctggatacaagtttatggtataccttttatgtgtaagtcctttgatttagcccattttattgcctctgaggttggggatcttatagaagtggataaggacactgtcaaggagggaactgggccttatttaaggcttagaattctccttgatgtcaatcttcctattaggaggggtatgaacattagattcatacgtatgggtagagagtttgtcaaatggattgactttaaatatgagaggctccctgacttttgtttcttttgtggtaaacttgatcataccaagaggtattgtcatttttaccttcaaaagtgtgatgatagtcaaactgagccactctgcccttacactatcctcctgcgtggtaaggaaaaaattgtggacaaagctatgccatttcaataccctcaccctccagctattactgttgttgatcatgctcctgttaatcttaatcttcctactaggaactttttggataatatcatctcttttccatcttttctggctggtactggtaattcagggtctggttttctcagccctcatacttcttctactgtcatgatgcctactcctcttaatcctaatagtggtcatgcttttcatactggtcttaatccctttggctgccaccctttgaggccttcagcattcacctcttattccactgactctttggtagttgctaccactgttggcactactgttatgcattctggtgatatgagtatctcgactactcctgctgctgaggttgtctcggctagtccagttgagactgttgggactcatgctgaagttggccaacctgactcgctggttcgtggaaaagggctggcttctgcttcgggagttaaacgcccatctttccatcctcagcaggtggttgttggtggttctgttaggtctcaattgaaaagagctcgagctggggatagagaggaggaatcttcatctgcttcaacggacatggaacaggcgggtggtgcgttgcacacccgcccagaaaaatgagtcttatgtgttggaatgcacgtgggttggggagtacacgtgcattcagaaggctctccctgcttgtcaaaactcactgtcctgatgttcttttttgattgaaacccgtttggttgttgg

SEQ ID NO: 221243 - DNA, 2793 bp, Cannabis indica
atctaggttaacttaaaataaaaattcaggcttcatggttagctcaggttaacgcgaccaaagtattcaggctacttaaaataattgattcaggttaattaaaaaggtaagttcagaaaggccctattcttaaataattaatcagcccaggttcatttgttatttaaacaagaaaaatattcaagtctaaacatttaatcaaaaatttaaaggtttaggcctttgaaaccagaacctcacgaggctggaagtattaaaacttagcaaattttgcggataaaatgcaaatatctaaggaattaatgaaatagtattatgtacttaaaaaccctacgacaagggtataaaagattgtctatgcacacataaccaggggacccttgtcccccaaaagcaaaaactaaataagaataaagttgctgataagcaaggattggtaaggatgagctgggtccttcaaggattatgaatcttgggtttgaaaatcaaacgagaccttcgggatcgcagagttagttaagataggaacatcagaggtcggaagagcaaagtcaaccatgttctcaccagcaggaatggtagtcctaggatcaaccgtttttgtcctctgagctgcttccttagctttacttgcctcctcgagtgccaagatcttgggaaacagatcttctttgtatctagcatcaaagtggtagattatagatttttcatgctgccagatggtgtacactaagtagacaaatgcctgttccagggccttggtgtgctgggcttcttgctcttatttctccaggatcgcctgctaaagacgtccctttaaaattgagttttcaccctctaccttggtgacctttttttgggactcttcataagcctttatagatgcaatcagtttagtcttagcttcttcatccctctgaatagcttttgcctcagcttcctccgctttctgttgtaactccagatggtgcttcacctttctctcaagagtactttcgctaatgtatttgtcttgaataattttagcatgttggtcgtactccatagatagggtggtaatattttgtctttttcttggacatccaccttggcctacttcaggtcgacttccaagtctttgattttggtaagagttgtggaatgcaagtacttgtacttgtctctacggtccctctccacctttcacgggtcaaggccttgtccaaagagttagacaccctttgctttatggtggcttccatcttggcattggcctcagctaaagcattggttgcttcctctctcctcaactcggcattggcatgctctgccctcagcacctccagatcataagccagttgaataaccatggagccattcctctctaccatcaagccaacctgtgaaagagaaaatataagtgaatcaaacaatggaaaaattaaaagtgtttattcaagtcaaaagaaagttaaacttacagcattagcatgggtcctcatagcttcaactatgtacattggatccctgctcgccatcatgacaaacttatcagcaacaagcctacagcatgtagcagcactctgttccaataggtcaaccaaaaatggtgacatgtctgttccaaattgaggacggagcttctccgttatcttaactttgttcacaagaagagggtaggcatcattccatttgtcgtagtcggtaaatcaaagttacatttggaggagatgctactggtcaacttcttcatcttttcatacttgttgccaagccccttctggtataactgcttgataaccattaggcgtgaattatcaactttcatcaacaacaaaggcttgacaaaaagtatgaagggtgtcagaggtaataaaggtagtgtagtgttttcttttcccaggacaactgagtagaggtggcgggaataaccttaggcgctgagggtggtggaggaggatcccaattatcccttgatgttttggtgcctcacctatgcgggcttccaccatcgaatgcatcagaccccttctgggactgagttttagaggactgccttcttgaggctgctaattgtaagacctattctttggtctccacccttgccctcttgttggcaacaccatcagatgaactagcctactttttattaatcacgattggcccatcgtaatcagagttatcccccctagtgttctcgataagaacctaccttaactgttccacgaccaggacaggttcagttaggttgatgatggaagtagacatggcttccatgctctgagccttagaagcagctttcgaatttgaaaccgaaggtgctggctattgagattcgctcccagaagcctggttcttctttccttcatctccaccaccctagcgatttcttgaaccttgtcaggttgggatttgatgttgcatgcgaacctatttagttgccccatttatagagtggctggttgatctacataaaacaaaaaaaattgtccatcaaacaagaccataacaaaatatgtgatctttacagcatatcatcatgcaagacattaagaagatccaaaccattaattttagtataattgaatttcccctatcaaaaagggcaatgtcttctcgacataagttagtctcgtattggaagaagcctaggaagtaaattttactaaatgtatccactctgacatgatggtgcacaggtggaacaaagtggatgggactcctaatgatgcaatctactttatctatatacttactgaatggatatccacgatggtcagaaatatggataaaatcaacattgactgacagtct

SEQ ID NO: 221244 - DNA, 1164 bp, Cannabis indica
gtagactaaggctcattaatgcctggaccacgtaaaaatcatttccttattactgcatttattatttcttaatctcttattttattagattccgaaaatctcggtacacattttgttgccttcaatgggttctgtagaaagatctaagccatgatgttgttgaaagtatggtggctacttgaaaaacaattacaaaaaagactcttcagggtggccttgatgctatcatggaagatgtaaaccctctctccagagcacgctcaatagagaaatttgagagaatgggatacagaggttgacaaccgagagggtgacctaaacaagcatcgtaagcatgttaaaaaagatcgagatgctgaagaggaggaggaagatgatgatggagagcacgtcaatgatgggtattataagtatggttattattatgagtgggaccccaaagtgaatctagtgtctaaagagctgcatgagacccgagaaaagttagcccatcaagaaaggctttcacaaaagatggatagaatgatggctcgtctctaagaaaaattcggaaatctagaaggggactatgaagcaaaaccctcagtgcaagttgttgacagaaacaacaaggaaaaccctgctaatgctgaaacctcaactcctgcgaaggataaggagaaggcaaaggtaggtgaccctcaaaactcgacatctcttgtacctcctaggaaaagtacgaatccaaccaacagacctatgcaggcacagaaggccaccgatgcctgtgagcttagatgcccttctactctaaaaggtcatgttgcgcaaaaagggatttgtgtaaaagtaccaaggcctaggggaaggaaaaactattctagtgatttcgttaaccaggacggtgggactggggaatagtaatcagacgaaagctggttcactgtagacctttgaaggtgtctcaatgacaagtacaaaaaagctaagggagagatctcaagaactatctaaatgacaaagcttgtagacgtgacctcctagatagtgacatgaagtgactggaagagaaaattgttgctctaacaaaactcattcgcaagcaaagtgggaccttcatagattctaaagatgaggacctggagccctgtgttagaaggatcatgaaagtgttgggttttatgc

SEQ ID NO: 221245 - DNA, 7724 bp, Cannabis indica
tattaatatatattgcacttttaattttttgttgtataaaaaagacatagcatcaatgccattgtgtgacatcaatgcaaatttcaagaatagcattcttttatctccagtggtatatcatctctatattttgccacataagctttccacctcatcaagcattctctaaaatattaccattggagatgctcttagcactcctcatcatatattagcttaatagcttaaaggtcttcagttcgaacccatcacatttccctttttcccatccctccctcaccactaagctagccttagtggctttttgcgattcaatattagattacactaacagtgaatttacacctcataaaaatattaggcactataaatattctttagcatttctcattaaaataatgttagtttatttaatactccgctgaatcgccgatatcaaatatatgaaaatattttcgtagttttataattgaaatgatagccaatatagctactaaaaagtaaagatcccaaatgagtgcaattctccaaacttattttataaactttattttatgcatataagaataatacttttaatggtatgaaaatttatagtatttagagattgtaatattctagcctctaacctcctaaatatagaagaaaacgttttaacttttttgttttcttcattattttgaatgatggtttaattatttgttaatatgtggaaatttgcaagtaattgatatatatataaaaaaataaatagagatttttttggcagggacatcatttacatattgtatgagcattattaattaagaaaagaaatatttaggatatcttaaggtgccaaacatcacaagaagtgacatattgttattagtgaacttaatatcgggtctcatatattttaatttaataaataatataaaaaattactaaccacttataacacatcacatcagtatagtattgaacaccttatgatacctaataataatgctctttctaatattatatctcaatttgttttatatagtgtttgtatattgtactcgtggcctactcacacagtctcataccaaaagggtgaatctagtcaagagatcagcccaatgacttatggttgggaatcatttaagcatctactaactggcttctactacttgaatcaacttatgatcactagaacacctttaaggtttctagagacactcatagaaaaatcattttcctacctgaacttgacaaagaaataaagaatacctatggtattttttttttcaggcaattgtacttgtgcttagcagcatatactggattggaagttggtaattcgttcaccaatgagtgcaacagaaaaaaactctgagcacatagtatacagtttacactcagattaagtaataggcagggatcatgaagtgattggagttggagataaactatagatattactgaagtttttgatgatgaggtggaattcaaagttttctagacaatatatatgacattgttatagaatagatataagtcttcatttagattgttattttgcaaaacaataacatgcattaagtaagtactagcttcaacatttagttggataaaacaaaatcaatggtcttgttttggaatgggattgtcttgtagatgtgcaagcaattcaaaactcaattagattacattttggttttggggtttttgttgaaataatgtaaggatatgtagagaatcaaaattggggctcaaacattctttcataacttatccaatggatactttttttctttcttcggggatgattgccaccaaaatttgtaccattctcttcgtgtccttacccatctccaagggcaataacaaaacactaatagcataattaggcaatgattgagcaacgaatttcagccaaatctcttttcccactcgcgattacaatttgccatcctaacgttgaattatattttgaaccttttctttgagatacacaagaaatacattctaattccttccaataatattaggtaatcccaatacacaatgtcatatatactatctagaattgccacaaaatattatattgtgccaaatttaacctacaataaattctaccttttttttatttactgtagtgccactaattattatgattcatagacttttacataactttatcttctttatttactatattaccattatttaagcaataaaaaagtaaaaaataataatgtttgtatattttcaatacaatatgatgatcaatataattatgtttttttttttacatttttacattggagtacgattataaatagtaggctaaatataatacaaactcaaattttgtgccaaatttagcacaaattttatattttgcattggagatgatcttagtcacgtttgagttaaattatgccaaaactaatacttcactcttcattgacattacttctacccatgttgcctctatgttagtgtaagttgataatattattgttcttgataatattattgttcttgccttaaaagatcttggggaacgtagctatttccttggtatttcggttctccacactattgatggtgtgcatccatctcacacaaaatacttacaagatcttttatacaaaacaaaaatgcaaggtgcaagtccaacagagtgactactggtctaaagctgtcacattatgggagcaatcctattctagatccctctttgtacaggtgagttgtgagagctctccaatatgctaccatcactcggcctgatatagcattttgtgttaacaaggtatctcaatctatggaagcacccttaagtctcactaggttgttgttaagagaatcttacgatatatggttggttcccttgactatggctttcatccatgtcttctcactttgacattgaagcattttgtgatgctgattggatttcagaccctgatgaccgaagatccaccaatggctatagtgtcttccaaggatcaaatcttttgtggcttggaggtctaagaagcaacaatctcaaaatcctcaattgaagctgaatttcacaatctagctgatgttgtgactgagatcacttggctccaaccactactgtctaactttcctttgcacacaactccaaccatctggtgcgataatctaagcactatgcttgcaacaaatcctattctccatcctagaaccaaacacatttatattgacctttattttggtaggaacaaggttctacaagctcagctgcaagtgaaacatgttcttgctatcgaccaactcgcagatagtcctacaacggccatttcaagcacacggttcccctatcttagagttagttataggatctttagcattttgttagtgttagttgcaagttatcatctgtaactaaccaacctatttctataactaattcttagtctcttgtgtagtatgtaaaaggctgatctatttatcagtgtgtaacaacaattcattttcattattgaaaatcaataacactgattatttacttgagcttttcttttttaaagcttacaaatcggagttgagcaaactgtttcgctcaagctcaggctcatgagatctttcttcacactaatttgaataagacactaatatgaatactaaccaaatcactctgttctgccaacaaatgactttcttcctcttgcagcattttcagagtttggggcattcatcaagttaccgctatcggacatggacatgtagaagtgattatagttgattctagtaaccaaatctgtcaaatggggaaagttacccacgttcagcttgaaagaaaggacctgcattaacaccacatgtgagaagcacattcttttattttctattttgcaaagtaaaaacctgtagaggcgtaacaaggaaaacgaaagaaggttactcttaggaggaaagcaatgcaatcatcgaattgttctcaatacgatcaacttccatttcacatttggccttaattgcagaaactggtccaccactcagtgtctgctgtgtggaatagaaatttaacgctaatccaagaatgatgttgattctactcgcaatgagagcccactgagtgcaaaagaaaaacaataaaatatgaaaattagactcaatacaagatccaggcagttagagagagagtatcaaagctacccaccagcttatctgggactaaaaagcactggcgccgaattgacaataagtaggattcatgtacttctatcgcttcatccagagaacgagcagctgccatatcttcacagagttcttgccatgcactgtgatatacctgattactacatcctattaaaaatttaacattttaaccttttatcaaacatactcaaaatataatgcacccaaacaggtacatcagtagaagtttgacaaacaacagttattggagaaaatagtaagaggtaagctggaacctttccttttttaactacaagtttaaaagttcaaaaagctagaacatacattacatgccatagtgtgaacaaaacgacaagcataaatgtgggacgagcccgaaagagaaaaaatacgacgatcttgtacactcctacaggccatagattgcaactaaaaaagtccaagtttcaagttaatttcacaaaagcttactctgtccatcacatattggtgaaaagcatccacaaaatggagaagtttttgctccaccaaccagtgatgcttatggtgattcgttggagcacctttacactgcatataaggagaaaaacatcaatgaaaaagccaaatgacatcagacagctgatatttagtgaaggaaaaacccaagcacaattattccttacattctaatagtagttgatatactaatgtcataaaagaactacaaaatccatgctaatacaccttgataatacagtgtgaacaagaaaacaggcaagtagaaataaaccttccacatccagttccgagctttatcgagtagaaattttgttctcttgaccttcaacaagaaccccatcacctacattgtatttaaaacattattgactggaacagaattcgatcataaaaataggtactaaaaataaatttggaaacaatacctggttatacttctttattgcctcggtatttgcaatgagttcaagcggccacgacacctgttgcaatgtaaatacatactgatttaataaacatgaatggattacaagaaagagcataacaattaatagagtagaccttatatgtaaagttaactgaatcaaggccatcgattccaaaggtgtgtgcacgccttttgtgaggagttgatggaagggaactagattgctgatcgccatatacatcctgatgtttggtcagggacacaattaatgaatccggagcacttagtagcacactatcagaagagtttcttatggattcctgcagtactaagtacagttattgtcactaaaaggagtgaaagaaatggaaaaacagccagaacatataagatctgccagagtaagaaaaaaaaactacaagcactgtcacatgatctaattcaattaacatagtgacatacaatagtgaacaccttcatcccaagttatttactagtccctaaaattatattatatgaaaattttagacagtgattctctaagatgacacagtacacatgtattcccttagggtcagtagtttaacatcaacagtccttactctatttcctttcaaacatagctgtataatatacataataacaaaatattataacaatggtgaaatttaaaaataaaaataatatgtataaataaacaaaagcaatgtcataacaattatcagaaacattcttgcacttctgtaaataactcttccattaaacctacttctaacagcacacaataattgttagaaatatgtcactgcacctgtaaaatagagttcaactcaaaatcatcatcccatgtttctcctttatccagcttattgaaaataacagtcaaaaagtgctgtaacagatcacctacagagagaaaggaatgtgtcaatgcccattaggagacaaagaaaataagaatttcaatttaataaataaatacctgatcctaacaaaaaaatggcacgcaaaacagctagctcctccattaacctccaatcattcattaattttgacaatatatgttggccaatacagtccacctacaagtacaacatgtgaattttaaatccatgaataacaaacccaaaaaggcaccaagtctggctcagtgtgccagttttacctgcttcttgatatacacagtaaagcactcttgcataataaccacaggaagtaggtaccttagaggaaggaagaacagtaggaaaaggaaacaacgtttccaacatcttagagtcatcctgtgtacgaagatactcagattcaccaaactggaaaccaaaaatatagtctgttttttccactgcagaaaatgtgtcactctcactaaatatcgcctttcgtaagacatcatcatttagagggggcagatagaaatctctggataaatttaacactgtccaggactccttattcctagaaaggatttcttggcacacagtaataacaggattttcaggagagaaggctctcaaaagatgtgatttatttgcatcaaattcagccattttctctccacttgtgatagctacattagtttcaacattactcagtttcttctcagatagtgtatcaaccaaatatttataccaaattttttcagagcaagcctcaggcaaaagtttatgttcatcgcctccaattttttctttgttcatagaatatccaagtgaccgaataatattgttcttatgccagtcatcttgacaaagataccggaagatgtgatcaccatgacctataagacccgataatgacacacaaaaaacttctgacaatgttaaaccagcaatgctttgactgtgacaacaatcatcttttaaattgctaaaactggcatgaacatcatactcatatcctctgccagctactactggggatgctattgggatatgccgaatcagctgcaatgactttccagcagaaacaatttccctagctatgtccttgataaacaaagggcatgctagaaggtccgcattgttccggtccttccctttagaaatataaatagagatgggttccctttggccaacttccttcttttcattaaccatagtaccaaggccacaggaagaaattaaagtagtcatattagaatctaactctggacactgtgtttgcctaaatagatagctcctttcccagaagtcagcctcatcaacagatgtggttctattagcaaagaagaacatctgctagaagaaaacaagatcaccaaagtatagggagtatataattataaaacaaaattcttaaaacagagaacatctccaactataccctgtccacacagatgaaataaaatctttacattgtacagatatattacaaggcagaaagcattcatctaataaaaaaaatgtgtaatcaatataaccaaacacacactcacaggactcaaaaaagaattactcatttatatacttcttttttgtgctacattatgagagaaatttaccttcaaatgcccaaaacaaaatgacattgttataactttaggacaaaaaaaaagttttaatacaattacctcttcataaggatcatcaagtgttccttcaaaaagccatgaatcaagaccttcaatata

SEQ ID NO: 221246 - DNA, 1984 bp, Cannabis indica
ataatttctgaagttgtattagctgttaccttatattcagcctctactaaggatctagacactgtgtgttgtttttttacttttccatgaaattaatgtgtttctaaggaaaatataaaaatgagtagttgatcttcttatttctggacaagctgcccaatttgagtcagtgtaagctaatttgaccttagattgagcatagaagaaaattccttgccctagtgtacctttaacatattgcagcagtctttgagcatcaaccatatgtgatactattggtgtgcttaagaattggctcagtctgttaactgagaatgacaaatctggtctagtcaaagtaagatattggagctttccaataatttttctatatagtgcagcatcagccaacccatcttctttagcttcctaacacaatttaattaagtttggttccataggagtgttcaaaggtttgcttttcaaatatccaaagtcttcaagaatttgtaatgcatatggtctttgagaaatggaaataccttgttcagatcatgcaacttctaaacctaagaaatattttagctttcctagatccttaagtttaaatctttggtcaagctttattttgagcagttccaattcttccaagttgttgctagcaagtatcacatcatcaacatagacaagcaaggctatgaaatcatgcttgaaatgtttaatgaagaaggagtaatttgtagcggaatatttgagaatccttcttcctcaaggcattagaaaacttctcaaaccattgtcttgaggcttgttttagcccatataacgattcttgtagcttgctagagaagttgcatagcacgtttaacttcaaaaattcgtggagcatttttttgactgaacctctcctacaattcaacccaaattgatgaagaatttttgagatacattatgctatcttcgatctcagtcgagacagcacgcaagatccaagaaatgatcaaactattgcatctgcaccagggatcataatctttatcatgttgtgctagtcttccatccataaacttgactttgtttctcgcaactagagcaacaagcattgatctcttccacgagctgtaattctcaaatccagtgagaattttagctacaagcattgcacttggattatctccatgagaaagatagtaggatttcttggatcatcgaacctcaaattcgaatcagtagaaaatgaacgatttgcatttttagagttgtcatctaaatttgtattgcttcaagtctgtgttgctcctccttttgccatagctagaaaaacaagaagaacatagaagaaaaacgaagaacaaagagctcaagatgttcttggctctgataccattttagtaaaataagaacagggtgtaacagagagatgaaagagagaagatgtatttcattgattagaggatcatgcttttacagtaagtatatatatacacggttcaattcaattctgttacaagaattagttataacagaactaactaactttctatacagctcactaactaacaactaacacacacctaacactctatatggcctatttagatagaacccaaaaaatcttgtgttgtattgactaattgtaagataaattgttatttttagtgtcatcatcatattgtgtttgtgtggtgtggagtttttaaatgtattttagatgggcaacaaaagcatgatttgtaacgaaaaattaataaaagacaaacacgaagataatcggaataattttcgaatcatttcaaacttgtaagatttcaaatcgtgttcatgttaaatcagagtgacgtgacctgataattgccaccttacaccactttaggaaactaacaccactactttaaaagacaaatatttatatatacttatcactatacaactttttgtggctaagagtatcttcaatggagatataaataagtagtgtaaaactaaaatatagttcatttaacaa

SEQ ID NO: 221247 - DNA, 2331 bp, Cannabis indica
gaaattgatgtatggtgaaatgtaaaaagtgtaggtataaaaataaagaaagttagaattttagtgatgtatctttaaagatagagtagagaagcaaatgggactactcttaccccttttattcaaaaggccctattaagtactacattggatatggcacagtgtacacgtgacaaatttttagtggagaatattagcagcaaaattacatgaactatatgattagtgacacttaactgcataaacttgttttttggtggtaaaaccctctaaaccttatttttgttagctatttaccccttccgtctgaaagacgctattaagtgacatggtagacatgccatagtatacacaagtatatacatgacaaatttttagtggtccacataattttaattcattaaatatttttaaaaattataaaaataattaaaaaatatatatttttttttcatttttcattttttttctctttcttttatatttttctccctataaccttaatttccacccgcactccctctctttttcgttctccttcttgcacaactctggcaagtcacctccgaccatcttaaacccgaacgagcaccaaaactgacttcccaaccttacaaacccaacccttcaacctttctctaagccttgaaattcaacccttctttgaagtttctctatcttgcctcaacgtctccgggtatgattctccctctcctgcaactctttgtcgataccaccgtagttggaggggttcccagggttcaccaattcgtccctgggtttgtcgtggtctggtgggttcgtcacagaagaagaaagaacgagggaaggggagatctgatagtttcagtcgtagagcaatcaaaagagcctttcgaaaggaaatggaaaatagctaaccgaagtgaggtttggagggttttaccaccaaaaatcaatttatatggctaagtgtcactaatcatagagtttaagtagttttgtcgccaatatccgccactaaaagttgtcacgtgtacactgtggcatgtccacagtagcacttaacaagacattttgaatggaatgagtaaataattaacaaaagtgaggttcgaagggtttactactaaaaaatcgatttatgtggttaagtgtcactaattataaaatttaggtacttttttgctaatatcctttattttattattttaaactttaacacaattatttcttactaagaataaaaaatttaaattatattatatttatatattttttttcctagacattcaacattcattgaaaataattaaagttttatacattatagagaaaatattggaaaaaatccatccaaattagttcgtcatccatcttgagtacacgaactactaattcttgtataaagcgaacataaactaaaaatgctttaagaaaattagacaacaaacttccaatatcttaaatcattataaaattaaaaaaaataataaaaaaaaaggagatgttagaggatgcagaatcaaacctattattaaactccaacttccaactttttttttttttgaaaagaaacgtgcattgatagataaaaattagaccttgtggttataacaaaagatgtttgctggaatggaagagagagataaataactatactaattagtgggtaaagacccattttatcacattatgggttacaaagttacaagttcttaaagactaaagtactagaaaataaaaaaccaacaaaataaggagaagtccttttacataatgaagagtagttcacaatttcccatataaaatccttgtcgttgggagtattgatcactaccctagagtcgctctccacaataataaacatgcaacctttatcctttgccatttccaaagccaagcaacaagcaaccgcctcgccacaaagagcatcataaaaatcttaccttgtcgtgttcacccaagccacctcaccttggtgatttctagcgacaactgcaatacacatactttccatccctactataacttcacaattctgcttgagccaatcttgaggaggaggacgccattcatctaacaagattagagtaggagtagggataagagaagctctataatctaaataagagtaataaatgaagtcaatgtattattttacattatctagattattattgtgtaccttatcatttcgaacccgccaaatggcgtcaacaacaatggaagcataaagaaagacctcatttgcatcaatgcctttattttcttaagctcaagataaatttaacctagtcccgcatgcaaatacatgttccacatacatgaaagataccctacaaggaggac

SEQ ID NO: 221248 - DNA, 2724 bp, Cannabis indica
aaaaaaaaaaatattcttactaatgccaatatgccgggaagctgtatatcactgtacatcaattcaaaattttcttttcatgtcatcaaagaagatgataaactgagaaatgaattcttttactgtttaaagcataaaaattactgacagcttgtttttttcttctttttcaaataagaagataaatttttagttgtttaattgtgctttcatcatgtgtttggtttttacacagcatggcgtgagacacgaggtgaacttagtattggtgtggtgtctccctactctgctcaagtagttgcaattcaagaaaaggttggaaagaaatatgaaaaaaatgatggctttcaagtgaaagtaaaaacaattgatgggttccagggcggggaggaagacatcatagtaatttcaactgtaagatctagtataggccagtcgttggatttcatatccaaacctcagagaatgaatgttgctctcactagagctaggtatgatactctttgtttatttttgctaagtatgatcttgcatgatttttatcaagtgtgagctacttattctattgacttcttcaggcattgcctgtggatactaggtaatgaaaggacacttgctaatagtcaatctatttgggaggcactagtcattgatgccaaaaatcgtcactgtttctataatgctgatgacgaagaggatttagccaaggctatattagatatcaagaaagagcttgatcaatttgatgatcttcttaacgctgatagtatgtttttcagaaattctaagtggaaggtatggttttttagtgctcagttgctctttacttgtgccattctaattttttcttcctcaccatgtcactccaaattataggttcttttcagtgataactttttgaagtcatttaaaaagctgacatcaatccggagaaaaaagtcaattttaaaccttcttcttaagctatctggtgggtggaggcccaagagaccgcttgtagaatcaggaagtagaagttctttggagataatgagatttaaggttgaaggcctgatagttatcagcactgtggacatcacaaagaatttgaactacgtgcaagtattaaagatatgggatgtcttgcatccagatgacgtaccaaaactgataaaacgccttgacaatatttttggcaactatacagaagattttgtcaacctctgcaacaataagtcttttgatgggtacgtacttttgtatttgtatagccactagctcacattgctaattgagtgttggatactgcaatcatattgtattcttaacgtgttcttgttctgtttctagcaatttggaaattcctaagacttggcctccctctttggattttgttcggcataaggatctctccaacaacgaatctgagagtgaattaattggttcctcgtctgatggaagaagctatgtggaaaattcgaaggtcagcgagagtttgctgctgatgaaattctactccttgtctcatggtatcgtaaaccacttgctatctgaccgtgatggtagggaaattgatcttccatatgaagtaacagatgaacaaatggaggctgtcctgattaatgaaagtagctttatacttggacggtcggggactggaaaaactactgttttgaccacgaagctattccaaagagagaaattgcaccactttgcgatggatgagttctatggagtgaacagtggtgttgttgaccatgttagtcaaaatagtatggaacctgatcagcaggtggagaagaggaataaaattttacgtcagctttttgttacagttagtcctaagctgtgcaatgccgttaagcaacaagtttctgacttgaaaaggtatgtaaatgtgcttcaccatggtggttataagtcgattcttaagattgtatgttataacattttaatcatatatcatgatgtttatgttacttgggcaggtttgcttgtggtggtagcaatctagatgaaagtagtttgattgatattgatgatatagatgatgaagcacagttcaaaaacatcccagactctttttatgacattcctgctacttgctaccctttggtcattacattccacaagttcttaatgatgctagatggaacattgagtaaatcttattttgaaagattccttaatggggaagatctttcttatgatcaaggtagaaattcaagatcagtgttgcttcagacattgataaggaagaaggaagtcaactacgagaagtttagtgctttatattggcatcattttagtgacaagttaaggaagaagcttgatccttctcgagtcttcacagagataatttctcatatcaaaggtggtctgcaatccattgaagcaagtgacagtaagctaagccgtgaagattatctgaaattgtcagagggacgttgctccaatctcagtctggaaaagagagagagaatatatgatatatttcagatatatgaaaagatgaaaatgggaaatggtgaattcgatcttgctgattttgttaatgatcttcattctcgactcaagcatgaaagatacaaggctgatcaaatggattttgtttatattgatgaggtgcaagatctcacaatgagtcaaattgttttatttaagcatatatgtggaaatgttgaagagggtattggttttttctggtgacactgcacagaccattgccaggggagttgattttag

SEQ ID NO: 221249 - DNA, 3256 bp, Cannabis indica
atacatactcatcacagataatagaaccaaataaaagacatactactaattagttctctttgatgaatttgtctaccaagctaaatgttaaaaacaaataatctaatgctttaaaaaataaaacaaaactaatcgccctttaagcattatatttagactagtttagaaagtggagttgtcagtttttattgggatagttagtttgaccaaatacccctaggttatatatagcttaagtgttagaggaaaaggtaaaatagtcattttatgagttttagaatttttttgtcttttagtgttttctaggctgaattagaaattatagtaagtttatattatgttttttaatttaagtattacttagaaaaataagatgattctccaaaattattctctctcttcctttcctttgagccttaggagccagctgaagaactaaaggattttcaactcagttcaaggatttcccagctgaataaaccgattttaggaggctgtatgagttttgtagtaattctccatctttttcttattgttttcctaggttttaggttaagttttgttgagctttatgtggttttggatatgtggtgttgaattgagttcagagcttaattttaagtttaaattaaggttaaattgaatgaatcttagggctgttaagtttgaatttggtgaattgagtttaagaacttaaagttcactcaagtatggtgattttattattttgatgaatttatgagttttgattgattatatacattgtattcatgatatagaactgttttgtgaagtttgagaacaattggttaggtttggagcaagttttgggactttaaaggtctgaaattttcgagtttctgctgtagtgaatcaaaattcctgatggtacagggctgtaccaaccgaaactccgtttggtgagtttttcaagaattaccgattttcgtattttggccataatttttcactcggatgtccgttttagacattctatatattgttttgaaggttataaagagctctacagtatgagacatagattagagccagaagatgtattttattttagggtgttttcaccataagatttgatagaaaaccctaggttattttatgcgagttttagacagtattatggaatagacccttattaatttacctttatcgtgacataggaccgagatcgtcaagcatcgttccactcagtcggcccacacacttgactttggacttgaggtaagaaaagttttatgcaccgcaaagtggttaaataagaagtgattataatcgttagtgcctcgattgtgatcgaggtaatgatgagaaaaaattattatcgtttgtgactcaattatgatcgagggaaagacacggtcattaccgttattgtgaatgaataaagatacggtcattaccgttatgagtaattactcgttgaaactgcggataggtttcttatttagcgttcgctttatcgggctacgatagtgacatacatagcttgtggttaacgagtagtaagggtactttatgaagcactgcgattatgtgagattaaagtgctttatgaagcactgagaatatgtgattatgtattgaatgaatatccgtttagtgtaatgatgaagttgttgactatatgatgctatgattttctaatattgtgtaatatatgtgtttgtatagacgttaaactatatctatgcatgctgaatatgtgtgaatcacgagtatgtaattatgttgagaaatgaatacttacattttcaatgctctcgatctagtagtttttcttgctgagttattgtgacacacgggtgcttcgtggtgcaggtagggaggataggaactgtgttcaaccatgagtcagaggtctcccatcaatgtacatatcagctgtggtgtcttggcttccggaaaacagaatcaaccctttttctatgatggaaatgtaaccttaatttgtaatagtagttttgtaacttgttgtaaaagaattttataaacagggcatcctcgtattatggtggtattttatataaaagttttattttaatttaatcaaaaaaaaatttaattaaaccaaattttttctaaactaatggattagttagaaataagtttgtaagaatacacacacgtggcgtctctgtgagtcaaggcgttacagctctcgtgtacaagtccaagtcaatataaatatttattcaaaatcaagatgtaatgacaagaaagcaaagctagggatattagagagaaattaagagagtggagagaaagaaagaaagaaagaaaaagtagattaataatacctcaactcaagccattaattagtctctcttttacgatatgagaatgagaagagaagaaagaagaatttgcagcaaaaaatgaagagagaaggagagagatagggattcgtaggaaaacgagaaagacaattaagaataagaaatataattaaattaaaatattttgataaaatatatatattacctcttcacttgcttccattcatccaaaatgaagaaaataaaagaaattggtcgaaaaatgaatgtgtctaaaaataaaataggctattaattattcttttgttcttgcaggaaaatgatcaaagaaacgattaattataagggaaaaatgaaagaagaaagggagggagagaatgtgtatattattatcaactgtgactcaaatgttttttgacatctttgacgatgacgacgactgagaaggaatttgatgtacgaagtaattttagtggtcagacgatacaaaacacaacgatgttattttggatataacgacaagaaagcctaatggagagaaatgattattaggaaaaaaaatgagaagggaaatggagggagagaatgaatagagagaatattatgtcatttgattattttttaaaaaaactcctacaacgattgtaataccttaatattttataaaatattataataatattataaaatattttataatattaaagtattatatgattatatttttatatattaggtactttttttgtaatgtaaatgtaatgatgataataattgatgatttagtatactctcgatgggtaatgattgtgttatttcatctttttagtaatatagccttaaagagtatttttgtcattacaacctaacgagaagagagagtactactgggtgcatggtggtcaggtcaatatgtgtatatattgtcccaacgatttgtattatatatttattttcttttt

SEQ ID NO: 221250 - DNA, 2716 bp, Cannabis indica
aatcaagggctagagatatgaatggaaggagtcattatattccgctgcacccaatgtaaggttaactaaactttatatgtgtttatttcattgttttagaattcatattaggatgttaatcaaacatacttggtagtaaatctagatcctggtaaaatatttccaacacttaagacctttgttaacaatattaaacaaggcgataaattggtcactacctattttacctagttacaagccctctgggatgaactcaatgagtatcaaccaaacactccttgcacttgtggttgcacttgtggtgttatgcaaaaagttgattactacaccagagaccagattcttcaattcttgattggtctcaaggaatcttacttgggcattcgggctcagattattctctttgatccttttctgtcactgtctaaagtttttttttatggtcgctcaacaagagcaccaacgttgttttggcaacaccagtattattgttgttgcccctgctaaaccaaaccccaatcaaccttcttggagtaagaagctcccaccaacttattccaactgtcttaaaccaggtcacctggttgaaaagtgctacttcattcatggttttccactaggatatggtgacaagaggaaaaataaatctactactcggacaatcaagtttctactagtccaaaggcttccatcaccggctcttcccagctacaactcagccagcaactgatttccctcctcaatcaacaaatttgaggcgctctttccaccaatgacagtcttcctgtggtttctaacgtctttggtaatgataatccttttccactttttccatggattgtagatagtggagccacacaccatatatgtcattctcttcattgttttacatctctcaataaaaatcctttttgctaacttagttactttacctaatggtcatcagatacagatcaacaaacatggaatcgtgaaaatatctgataaactaactttaactgatgtgttatacattccataattccagtttaacttattttctattaatgcttatcttgaacattgtcctaataaactcacatttacttctactcaatgttcgattcagaattcctcccttactttcatgattgagactgctaaaaaaattggacaactgttttgcaaacattttctcacatctaatatttttattttttcaaacaatacatgtactttgaaggacccctgacatctttgccttggtcatccctctatgaacattactactatcttaaataaacatttgcaattttgtgagaaaccactagattatatgtgcactatatgtcattttgctaaacaaaagcaatctccctttgtttctaacaataattttgctactgttgtttttttttttttaatttaatacaccttgatatttgggaaccttttcatattattagtgttgaagttatcgatatttttaactattatagatgatttttctcgctatacctaatggctaatgccaaataaataatacaaaattagcataatctttgttgttctgattaaaaaatagcataatttataatttataactcgaaaaacttcaaaagacattaaattttttttataattataataatatttttatttatatatctattccttataaaatagaataaaaaaaatgataaattatattagtcgtatagctcgacacaccataaagaggagacatttgcatcatcatggtggttggaggtcgaaagagcatggatttgtcattagtagctccaataacaatgtcggttcttttctttctccttcgtaagagcgagctttgcgccctttgcagttgcctcatttgcaacaagctttggcagcatcttttctttccacgtgagatgcaagactttcatggagttcctctctttctacggtttgtgtcatgaggaatatgatttcattacaccatatttaaatttttatctccacgctggacataattttctttagtaacaaggcttgttcaaacaaaaaggagttcacgatagtaaattatgtcttggtcttggtcttggtcttatttaaactttgaaagtcaaggatttgcatttagtaaataaactattaagtaaaagacaaaaaattccataatccatgctctttaatctttctcttttattactttaagggtgtgtgggaagctagtaaatggcaatattaacaagaatagaacaaacttagaagtcttagacttctacacggaaagaaattccataattctttctagttttctcatatatgtgaatttcttctggtattgaccatccattagagtggtcaattttaaccatttataattttttaagtttgatcacaattttataaatctcacaaacagtttgcccaggcttattcacttgttgtctactaaacaagcgttagagcgaactaacaaaatattcaatgtaatatcaaatcaaatcaaatagactaagttctttatgtatagttaatatatttttttattttattaaatattgatattgggaacaatcttacacaaaatattgatattgttttaatactgcttggagatttttttttgttagactttttatttaggattacattttattggttttatttaaaacttaggtcgattggacagttctttgatgtgttagttcatattattagtgatcaattgttaatgggcttagca

SEQ ID NO: 221251 - DNA, 3292 bp, Cannabis indica
tcaaaataataaaaattctattttatttcatactatatcaaatatcacaattcttattcagttattggttccatagtctttaccaaataaaagaatagaaatttcattctattctattcctattcctattaacattcccattcccattccatttttattttgtaaccaaacgcaaccttaaacgataggttatgcctctatatcaatagaattgatgattagaaaagcatgttagactatttatttggactaacattaattttcattagttttaataaaattgggttgattggacagttttttggcgtgttagctcatatttttagtgatcaatagttaatggacttaacatttgtttgtgtaaagtttagttgaatcagaagtttggacttttctagctaattggtgtctttgatgagcaggtctaatttaactagggttatgtagctaagtcctttccctaactctataaatacatattatcttatcacaattgcttacttttgataataaaataaaataaaattgcttttaatttggagatttaggaaggaagacttagttgataatattacactatataaatgagataatttttatggatcaatcaggtatgtatacctaattattatctattattattgtactctaaattatgtacaaattttgtatcctggtttatttaattttttaacatgtggtatcagagcctattgtatatgatttaggatatataatttatgtaacaattgatatgtgtgggttaattatgtctagttacaaataaatttcgtaattattatttgttaatttttttgttgtttaatcttaaaaatttaatggtttttgttaacccaaaactttttctggtaatgtgaacatcaatgtttgacacgtagtatgaaggatgacgtcacagagttgagtaaacccgagtcatagcagtcaacttgggaggggaccctagccctgagcccaagtcgattctaggatctctaggatggaagtttggactttaataacttgaatctaactatcttttagtattctgtactttgaagacatggagaaacctaatacaagctccgggagctgaaattacacgaacctgttacttagaagacaatcttggaacctagggtttccacctagtgcctaggttgacatccccaactagggttttaattttttggaccgtcttactgtaaaatggccaaaaattgtattgggacatcgacttgacataccacggacatatttgaggcatcaagatcagattttgagcaagttgatttttgagcacccgaggctctgagcacccagtgcctaggttgacaatttgtcaattttgggccccttccaagtgtttgatcaaagcacctaaagtttcattgaatttttcttcatcaaaaatagagaaataggtccttctagaggaaaaataataattcttgggcagaaaaagcaagatccaatgcccagattgacatttggggctggccagcccaagttggcaatttgacaacctaggcctcaaaaaatggaattttcctagaattcttgtgagaatcatctctgtcttcagaaaatattgagaattaactatttcttgagaccaagcggaacttctaaaggggcagaagagggacccagcgcccaggttgacacctgggactcggccttatgcccaagttgatattttgttaactttggctgtttataattcagttcagtaaatatttctctaggcatcttcaccgtcattcgaaataataaagagtcaagtaaactcagggagaaaatcacaaactcgagtccttggaaacagggcccagctcctaggttgacctggtgctgggtccagcacccaggttgacaatcaacctaggacactgcctttaattgttcaactaccgaatctgatgcaaccattgaattttgcatggtcaaaaataggggaagagacctcttcctcaagtttagaagccttggaagtataacaaatagaatctcgaatgctcgagttaaaggccctaactcctaggtcaacaaatggtctggttcgctgggttctgtttattcgaatatgatgccattttaaccgtttgtcatgtttttcacaagttcaatgatccatgaattcaaatattcacaacttcaattttggctcattcagaagccggaagttttgaggcttctatttctacaaaatagtaacatctctgagaatgtgtgaccagcttcaccaaaacctatagaaggactaaggtgtgtcaaaattatcacttaagcatctcaaaggacttcccttggacatttttacacttagacagtgtccaagttgacgtcagatgtcaacctaggccctggaatgtcaacctaggcactggaatgtcaacctaagcactggatatcaacttgggcgctggcatctaaactgccttcagtaaaatggccataactcaatttttatctgattgacgtaattcaacttgtattttgaaactagtttaaaccctatatcaagtcatgtctcacactccatttaaaattctgaaactatcgtcgtcaaaattaacttccaagggagttgcaaaaataaagctctgagtaccttgcactgggatcccccagacaccaaaaattagccatcaccaccaaaagctaattttattgttagattatcatcaatggtggaaaaaactttaatttgtatattaactcctattttttaggcttctttcacctataaaaggagagctcccttagctcatttttcagattcagaaaactacccataaggtccaaacttctctctagaattcgaagcttctgatacttaaacagtgttataattaccatctcgtgacaaataaaaactcaaagtagacatagctccattactctcgcgatatatggggtaaactactataaattattgtgtctctcattaataggggtgtttataaaatagttgatccaatctaatccgcacgatccaatctaatccaatccgcaaagtgcggatatccgcacttgtgcggattggattggaaaatttaaaatccccacttgtgcggattggatgttgattgacatgtaaaagtaaccgatccaatctagtccacacatatttattaaaaaattaaaaaaatttgtatacaaataacattttaatataatataaaaaaaaataataatttaagagtctaacacatacaaaacaattatatttcaaaacttcatagattaaatgtatattatattcttatatataattttttttgtaaat

SEQ ID NO: 221252 - DNA, 1828 bp, Cannabis indica
tactacttttggtaatatgttatttatttttataattaaataaaatataattatttataattatatatttatatgcatgagtttatattaaattttcttcttttgtttgatccttagcgacattatcattattatcacataaactattcaatattcatagcatgaatttgttgaattagtaactttgaactacattgaatatcattaaatataactaaatattattaaaaattattattctaaataattttatagactagtacttcattaattataatagagaaatttgcagcaaaattttcttattttttaatttttatatacttaattctttttgttttttggcaaaccctattaagtttatttttctttataaatttaaggtgtcagtcagatatatattaccattaaataccaattagattactactgtatgatatcgacttcgatgttttactgttacatttatacagtgtttatccaatttatatttgacagtaatatttaactaacgtgtcaaatttatataaaaaaaaataaataaataaagaaattttatcactaaaaaataaaaaaaaaattaagtatataaaaataaaaatataaaaaaaaaattcaccaatattcatcattataataataataataatattctctctccaataataatatatattgctcaatatgtgttatagagaatcttaacccataatttcttaccaaaatatctgacacaagcaatcccatatggccaatatatataaatattaattaataacataattaatctgataattatatgtttttattatatgataggtagattaattagcatgcactctttgaaacaattaaaaatataatatcatataattatatttataatatttagttgatcatgattatatattggcattactctataaatatatatatatatatatatatttctattatctatatacatatatatattcctataattaagaatcattatggatcccttaatcccggagttattaatttaatatgaatgctataataagatgaacccaccaatcccaatttaataaggaactctcttaactcttaaatacataattaaggcctaggagatttttttttaaatcaagattattgttattggttattatatgattatttattaaattaaaataagtgagactcgatattaaattgtgaatagtgtgtagggcttgccttaaaaatttatgagctttaggacaaaatatattattgaaccctcatgaaagaaatatgttgtatttttgaagaatagtactaaaaaatatttaaaattttagggtctttggattggataggccctaggcacgagccttaaccccgaccaggctcaaccctggtagtgtgttcactaatattatatgacaaacgctaactatttacttcagttaagagctaacacaaagatctcgtttgggtcaattgcaaatgtgacacaaatcttgtaactcaaatcctgagagactttgcttcagtatatcagacccttcaatgtttgtactagtacaaatgatgactatgtttgtgttgtttgtgatagtgcccacttgatgcaaaaaaaaattcctatgatagattatttttttacgaaataatacaaaaatgtcccttattattattgaattttattttggaccttctattttaaaaaattataaagaaccctctaataattagtatgataaaaaaatagtctcctcaatatatttttggtgtatgtttttttctttcaaaagtactaaccctagtgtctatttttcataattaatatttcaaaattctt

SEQ ID NO: 221253 - DNA, 2354 bp, Cannabis indica
attaatttttggattgtcttgaaaatttttgtagctggtaggggcagagggtgaataaactcaaaacctcaatctttttcagcaacaacactgaagagagtatgaagagaggcattttgagggaaattggtctcaacaactttatagggaacatcaattactaggggctcccaatttttaggtcccgccagaaagacgttgatttcaatttcatcttagataaccttgtttcgaaacttcatggttggaaattgaaaacactgtccaaggtgggacgtgctactttaatcaaatatgtgggacttctgttgccagtttatactatgcaaaccacgaagctctccaaaaaaacttgcctcgaaaattgatggcatggttagagacttttggtggggctgcgagcaaggcaatcggggtatctgcttaaaggcctgggatcacttgtgtctacccaaatctcggggaggtcttggtttttgaaagactggggaaatgaataaggctttattagccaagtggggttgggctcttctaaatgaggatcagtcgttgtgctgtcaagttctaagggccaaatatcttagagggaattttttttttttgagtgcaccttcaagagctctgattcgtggttctggaagaacattgttcgtacaaaagatatcgtcaggaaaggggcgtgcaagcttttttcaaatgggaaagagactaatatctgggtggacccattggttattcatagtcgggattttttccctaagcctattacccgtctgtcgtagaacttgaggttagttgctgacttactcttaccaaatggggactgatgtcaaagctctcaaacctttttgaccaggaaacgatcagtaacattatcaaaggtggcaagcctaatggtcaagagggtgatagatgagtctggactaaggaatcgaatgggttattttctactaagtctgcctactttatccaagcttttgagcgagctcccctgtgcagtgttgccccgacactctggaataaattttggaattccaaaaatttagagcggcataaaattcattagtggagtattctttccaatgctctgcctatttgtgcctctctagcaaagagaatgcatatcgaggaggtatcttgtcccatttgcggtgagggcgaagagacgatggagcatctctttctctaatgtaattttgctttttatctctggtgttcttccccttggggggttatgcatgtttcgaattccagagcccgagtttgggattgggttaatttcttgtggagtttaaaattttaaggggtggacaataaaaaattatcctttatgcttcgattgtggtggatacgatttagcgagcatgcaatgacaaagtacacaagaatgttctgggtagtattatacattatgttgactccatctcttattgttacccagattatagttctagtttacttacctcttcgaaggttgctgggtctcctgtttgggtaccgcctcttgatgactgggtcaagatcaactgtgatgtcaaagttggttgcgactccatgtgtgttgtggccattactagggatcataaggagtctattttgtgggtggctacaaacttgcttagcttctcggaccccctcattggagaagctgctgcttgtctgctagccatggagactgctattttttagcacaatcgttttgttttggtggagagtgattcggagacggttatgaagattctgacgagcactagcatcttttggggaattgataactatgcgtgtcagtgtaaaagactctctacttttatgttaagttgtaattttttgtttatttccagaacttataatttcttggctcataatgtggctaggtgagcttatgttaactctattttcggtacgacggatctttcgtcaatgctggttactatcctttgtaataaccatgaggtgtaactttcttctatttataaaatgcctgtttttcaaacaaaaaaaataaaataaataatactacttttcttttccttttgctaaatgctatctgccacttcttatttatttatttttccttttagcttttttcttttagcaattctccccctttatatatatatatatatatatatatatattgatactaaattttatttttcttctatctttcttttcctatctaatttgtaaaatttattatggctattttattcctcagttaagtttaaaaagttacaatcataatctattattgaatgtgatcattttaatatgtaggaagcatatagttttgttatttttttaaaaaataaaagtaaactatttgtagttacactatgctaccaataatatac

SEQ ID NO: 221254 - DNA, 1062 bp, Cannabis indica
aaaaaaagaaatcattttcatgagctcctttattgatcttgatggttaagttgtttatctatctatttgatttaatagctttaacaatataaagaaaattatttccaaacaattacttttaaagctcaattattagttaaaaatcatcattaaacataacaaatctacacaacaataaaattacaaaaaaatctatgtccaaatagctttaatctacaaacattgtgcaatgatagccatgaatcttctcttcatcttttctggtcctgcccctttgcaaaagcaatttggttcaagctagtttggggtattcgaactgagatggtgagtatttctacttgggctcaatggatggattggtttaaaattgatgtgaaccgacctcctaatgtgacttttgatgagtttatggttcatactctatgtgttgttgaggaaatatggaaagagagaaatagaaggacaattggggaaaagaaggaggacatgatgcgtatcattgatataatcacccttaagattaaagaccatgtcatggcctctttgaagactcttcctgatgtcctcagttggacctcgccacctcctaagtggaaatgttgcaattctgatgttgccattctcaattctgaaagtgtgatatctgctgtgctgcgagatgaatggggtaatgttgtggcgatcaaaacagctgtgattcaggtgacaaatcccatgctggctgaggcacatgctgtgtgtttagcagcagatctgtcaatctctctcggggagacctgtgttatgtttcaaagtgacaatctcaatgtagttcaagagtttgcagtctcaacctcttctgttgcgaatttcaggcttcagtgtgcaaaaaaaagattcatggttttgtgttctaagttcatcgattggggtatcattcatatctcaaggaaatgcaatttcatggcgcacaacgttgctagatgggcggctacacttcagatgtttggaaacatttgcactgttatgctaccttcggctgtgcttgatgattttgtagaatgggatcctggctctgcttct

SEQ ID NO: 221255 - DNA, 553 bp, Cannabis indica
acactttttttttttgtttgaaagaggatttttacacatttcaaacataatgaaattcaaacgttgctataataatgtctacacgtgtgtttaataggtttttatttattgttatgatttcttttgaaaattaagttaaataacctactcttttttgtagattggaacttagaacctctttcttgtaaactatatttatattcacggttgaataacctacccaaataataatttggaaaactattaaagaaagaactatataaaaaaaaaaaaagcaattgagcattcgggtaggtggtagttttttaaaaaatagtattgttattaggtgttatggtatccaacaacactataagatatagttctttattaattttactcgttagtaacttatttctttctccaaccaagctcgtcaattttttttgggctaaggtgtggtttggtcgggatctatgtgctactgtgattagtcttgtttttgtaacatgatttatttcattttatttcgttattggttcgtttttttgttttacggtgcttcactattgaa

SEQ ID NO: 221256 - DNA, 2374 bp, Cannabis indica
ttttatatatatagtcagcttttttaaatctaatattacattgctgatgcagagcaggatacaaaattttcaatcttgtagatgataaacccaaagttgatggatgacattctaattattttagcacaaaatcattttgtgtataattattgaccttgattattcaaaacactggtggcaaggctagtgaacatgattctttagagcatagatgcagctggtgttcgtttctcccttgcacaattttacttggaatacctatacctttaattttttaggtgtgcagtttccttggtaaatcttttttgcttgcttatattatactatggctcgatatgtgaaatttttttgttatttgatgaataataatagtggatccaagattcacgagtaatagaactgaaattcagaagagctttctcccaattattagctagcttaatttgaaagtaaatagtttagcagttttatatttagttaattttgtggattgcttgtgataatgtattttaaggatttgaggcttaaatgtaaattctagttcataacaaaatttgtcgattttaatcaccaacgtctgcatgaccattttagaccaatatttaagaggctattcttgtatttcggtattgctttttatgcaaaaagaagttttattgtcgatttgttcacataaaaaagaaaaacatttgcacttgtattccaagagacttaagaagctagcgtcgtacttggacaaccatcaggagcgcaggccaagatatctctgtaatctcgtgatatcctgaatgagtcgtgaacttttccatcactactcttcttgtactcaaataacagatttgaatggtcgaatgctgtaagtttggtgaatccatagtcgtagtccctaaccagactccattttggtgtagctgaggagaatttcacaagactcgatcccccgccaccagcaaccacatgtattgtcccattcaagctacccttataataattcttcttgtcactggtgcaaatgttctgttgcaggtacataacatagcaaagattagtgaaatttatctagtaagagattgcggaagtcaataatatgatgtaaatgttgtgagaaaagtgtatgattgatgttgtttttgttacctggtatattggacatgttctttcatagttgtgcacatgaccatagatggcaatatcaactttatacttttgccagagtttttgaagactgtccctgcccataggctctccgaacgatccttcgtccacgtaaaagtctccagaagaatagccaaggacacgatgtgcaagaaagatcaaccatggttgcttctgtctatcaactgatgctaggcaattttcaatgaatcggtattgttcagtcccttctctccaatcaagttctgtgtcagctacacaaaatcggaacataccataatctgttgagtacctgttaaagaaagtaatgtgatgttcaatgccagtgagaagtttctaccaagtcctataacaagtgaaaatttggcatcaagatcagaatctcagatattctattggcaaaacaagtggggtgagtaattctcctccatgtagtaagggtgaaattgtgagcaatgtgaaaatattagagagtcattattgtgaacaatataaaatattgagtttggtgtttgttgaatagatcaggatgccaaaggactattgagaataattatatgcacttaactacaacacaaaattgctttaaagtagactagacccagatgtgtggtcattgtttcataccagaacttagccctgttctcggcagggacataaaacatagtttgagccaagacaccgcattccccccctgaatccaagttttcatagaaagatcctgatccaggccagtcacgctcatgattaccactaaaataaatcagaaaaataagatgtaagattaagcaataattttgaacttaaaacaaacacatgatctatattgtagtgacaaacctagcaaccatgaatggcacagttgatgctattggctcaaccatagaagtgaatttatcccactgcgaaagatatccatttgcataacatatatctccaattaggaagacaatatcataattctccagatcttgaataagctgattggtagtattcagagaaccatgctgataattattgtattcgttggatccatcaacttcatcctgcaagaagaaatgtattagaaattaaatttgagaaaaaaacattctagtcggttaatcagatgaatcagataaccacgggaaaacacaacacacacagcgatgatgtctctcgattctagaccaccatccatcagccaaacttaatgcacctttttttttatatatatata

SEQ ID NO: 221257 - DNA, 3914 bp, Cannabis indica
aacatcaaaagagagattaaacttgaaataaatatgatcaccatataaatgagacgctttagtcatatagtgaaaaacttgctaattagtaaattgtttgacaaaacaataaaaaaaaattatcattaaaagaagctaaaacatgttatttacaattcagagttgctaaaaagtatcgttggtgcctagcaaaattcttagtatcatactgctaatgtataattaaatatcatatcttataaaccttaaataatttttagaaaatattgctaattaatcgtggagtattacttatagaaagtgtttgacactactggtgtccaatagcaatactctttacaattctcaaaattgaatgacaaaacactcaaatttctaagagcttgtactaataccagtcaatccgatttgaaaacactaacaccaaaaaaatctcgctttaatcacgaaagcacgtctttaagagctacgagttcaacaatctttttattttttatttatttatttttttttaaaaaaaataaagattgtaatagtactaatacgataacaacgcagccacgtaaaagtccttttccacatatgtagtagtaaaattcatactaataatattcaaaggtttggtgacatcactttgacgcattgtcccttatttaattaacctaaaaaaaataaataaaattaaaataaaaaataaaaaaaaccttatattatcatatgcctatttaaagaccctttgtgtccatataaccaaaccccacttattctcttctctttccttatttatatatttctcttcttctctaaccatttcatcaccaaacatacatttttaacattaccattttctaaataagcttcattatcttattaattgaaactatggagtgtagtactgagacaaacactactactacaacatcttcatcaccaccacttgctgcagcctctcaatattcttcgaattcatcttcttcgtcgcctgatcatcaacaacatctccagaccctaaaccctaaccctaatccggtagcaacaccagtggtgcttagcccctgcgccgcgtgcaagatcttgcggcgaagatgtgctgataaatgtgttttggctccttactttcctccaactgagcctgccaagtttactattgctcatcgagtgtttggagctagtaacattatcaagtttttgcaggtactctattatattactcaaatctaatcaattattatattaattattacttcacttctattatttattaaatcaaattatacaaaactcgatattaaaatacaccaataacagtacgtcttaacaccttaaaagtacattttaacatttttagtgaaaactacatttgacattagaaaagtgtgtcaaaaattattactattataatccaatataaaactgctaactaattatatgatgtcggtttgatgtattaaacataataacaataataaaaatgaaggaaaaattgactaattttgtaggcgtgtacaagtggggtatgagtagtttctttctttctttcttttttcctttattaaagtccatatcaaggtcaagggatttatggtgggagcaagtggctctaacctagcttttaggttacttgtcacttcattttttttcttcaatagtttcgagttaatttttcaaattttaatctttatatttgggagacttattattactttagttcgttataaaggggccatggtctagtctagcctaataatctaatcaaataatattatttagtcattaatttctctcattggccaaagtttagtagtatagtaatactagtggttccgtgggacttttgggtacggaattataatatatagacgttattatatgtaaaataataataataataataataattttcaattgttaataataataaaataaaaaaaaacatttttttgttttttccttgtaaattattcgaagcatccaaaattgaaaagtaaacattctatagcagattgttcacataagaaatatatattttcttttttctttctaagcctaaaactttgttcacatagacactatgtatataccccacaagcaattaattaatatgttctctccttaattaatgatgattattaaaagtttgttataaaacacaattaataataattaattattgttcattatggtgatgattatttcaggaattgccagagtctcagagagcagatgcagtgagcagcatggtatatgaggctggcgcaagaatccgagatccagtttatggttgcgccggagccatttgccagctccaaaagcaagttggagaattgcaagctcaattggccaaagcacaagcagaagtggtcaatatgcaatgccaacaagccaatcttgtggccattctttgcatggaaatggctcaatcccaacaaggctttaataataacaataataataacttattatctcctcaacaaaatagtcttgttattgatcatggtttaatgatcaataataataataatactactactactcctctcatgattagtaaccaaaacaataataatagcctaagttttcttgatgatattaacctaggctccttgtgggaacctctttggacataattatatatatcataataatgatatattctcatgcaaggccccatgttttagtactaagtcatgatatatcatatcatatatatcatgcatatatatctttaatcatagcttagcttagcttaaatctaaagaaaagagatatatatattatgaaaaatgttccaatgaaatattctcctaaggagaagttgatggacatgatgaaaaaaataattaattatagattaatttttattagtgtacttgtagatcaagaaaaaagagagggaattattaattaatgtgtaagctattagttaagggtctaatcactttgttaaagctaggcaaagtatagatgagttttaatataattgttgttccctccatttcttattatatgatcatgtaatattttgtttaattaaatatatatatattaatttccaaaaagaattaataattatatatgtttgttgatctatattaattatcaaagtccactattttgagctgaagatcattatatggaatcctaaaccaacttttgggtcacctactataattactttaaacacatatatcaacataaattgattatatctaccaataataatgaaaattccttctcatatttacttttgacccatctcttaatttttctgattaataagttacttttaattaataccttatatatatatataacaaaaaattctcaaacaatagtacttgtgtcaaccaagcacaattatggatatatttatttatttatctaaaaataacaaaaaaattatgttaacaaaaaaaaaataaataaacaaaagagattgttaaaattagaagattttttcaatctaaaaaattaattatctaaaacaggcaagagatactaaaaaaaatgacaattattacgtttcttcaaccaaacaaatgctattaatcagttatatatgccatcttgtcactaaataataaatatatatgtaaaaatatctacaataattaaatcatgtcatatctatatgtacacataaataattcttataagaattattactattccatttggtcagtcagagtaaacagtgtatcgatttgatttttcttaagaagaatatatatatcaaacccttttttttttaagaataataatatagtgaatatatatatatatatttatatatatcaaacttataattgtaacaaaatggtgataagtataataacactaatattgtcggattgatcgatgtgtatctggaagtcactatgcagagctgttcaattggacgtctaataattaaa

SEQ ID NO: 221258 - DNA, 1757 bp, Cannabis indica
ggatgatgggcgtgtgctgggttattcgaacaaccacattgattttcttgttgaatcgtctgagaaaggagcgtggaagcttaccggtttctatggtgaaccagagaggaataatagacatcgatcgtggactctacttcgaacattggctaccgactctacccttccatggtgtgtaataggagatttgaacaacatagtgcggcatgaagataaacggggtggaaggccatatccccataggttgatcgatggcttttaacaagcattaaacgaatgcaacttaactgatatggagttagtgggtcaaccattcacgtgggagaaaggcaggggctcgcgaaactggattgaggtgaggctagaccgtgccctcatcaacgatgcttggtctcaaatttttcaaggtgcttctctgttaaatcttgaaatttcttcatctgatcattgtccaatttttttagaacctgaaattaatcattgtttccctactaatcgcaaatttaagttcgaaaatgcttggctcaaagaaccaatgtgctttgaaatagtaagggactgttgggagagtgaaggtgatgataatttgccaaataaattggcacggtgtgcagacaaattgagtatatgggggaaggaggtgactggaaacttcaaagctcgtattactcgttgcaagaatgagatcaaaaggctagcaaataaaagagacacggcttccattcaacggcataaagaaaggaggagttgtttcatgttcttgatcagagagaatccttttggaagcagcgttctaaacagctttggttgaaggaaggagaccacaatagcagttatttccataaggctgccacaaccaggaagagacataacaagatagtgagtttgaagaatgacaatggagttcgggtaggatgggaaaatggtcttgatcaagtgatgaaagattatttctcaacattgtttcaagcatctaattctacttgtcaagaagtagtggaaagtgttcattgttcggttcctcattctattcatgagaacttgcgcacggccgtttctgaagaagaggttaaaaaggcgatttttcagatgcatccagacaagagtcctggtccggatggcatgacacctgccttttatcagaaatgttggagtattgtggggcgtgatgtggtgagagctgttcaaaaattcttcatgacaggggagtttgatcagagttgtagtaaagccaatattgtgttgattcctaaaaagaaaaatccagaagatatgactcaactaagaccgattgccctgtgtaatgttgtgtacaaaacaattactaaggtaatggtgaaccgtatgaagccttacatggatactattgttgccgatactcaaagtgcctttatcccgggacgcctaatctcagataatattttaatttccttcgaggtgctccactatctgaagagaaagaggaaaggaaaagaaggttttatggctctaaagttagacatgagtaaagcctacgacaggattgaatggccctttttagaagcgatgctaaggaagttaggctttgatcaatggtggatttctttattgatgaaatgtgtaacttcagctgaatacatggtggttcatgagaataaggagatagggccgattataccttcccggggtattcgacaaggggatccattatccccttacttgtttattctctgtgccgagggcctctcggctttattgaacaagtatgaacgggctgg

SEQ ID NO: 221259 - DNA, 1994 bp, Cannabis indica
agcagtaatggaagagtctttggcaaatctttctttaacaacttgtttaatatagtatcaccattagggcactactttgtagaattatataattgaccaaacacaacaaggactaataacaagaacaacaaagctcaaaatcactacacaattaatcttcatcatatatatatatatatatttatgtataggctaataataagctatgtaattcatcaaatgttgtgagctcatgtatatatagtgaaagattttagggtttgaaaatggggtcaagtaaaaaaaaagtcaaagaaacaatacaaaatggctagctataataatattatatatagtattattattatggacacattcgaacgtggtttatgagaatatatataagtttggataaattcatgcatgtgatttcacttatttattaataattgttaggtacatatatgattaaaaaaattatttgaattattgaaattaattcatccaattcaaaatgaagtgaaaagatgctttctttttattttttttttaaaaaaataataaaattgagaagaataattaagtgatcataatagtatttggatgttttgttaagttgtaatatatgtgctcaattatgttgtttggtttatataatataattatattaaattgtctattatacatatgaaatatttgtcatgatataattcataatatatccggccatggttttaacttttactccataaaaatatatatcattgaacctataatatatgtcaccttatgggaaatttgtaagaattaaaaaaaacaattggaaaaaatatttactaaaatattcttttacccgtttagtacgtgcattgcattacattgtattgtattgtattatattgtattggattgtattatatttgtattatttaatacaataatatattctggatattgacttatactaataaattctgtaaagttataatatatttttaatacactcgaccttaacaccaactacaggtaaggtcctgggtctaggtctggagtttgggggtctgggtctggattcggttctgggtccggatccgactttggagtccagatctaaatctgggtttgactcaaattggttttggagtgtattttttgatagaataatgattgtgacactaattagttacatatattctattcacaataatatataataatgaatcatacaattaaaagtgatatgatttcacttaaaattatatatgacataactaaataaatacattcacaaaataataaaaataaattgttaccatttagtaacaactgtttagtcacaatataattttttaaattttaacatatacattaataccacttttaatcgctataaaaaaaaattacatgaccctaaaaactattatttagatataaattatttatgatttaacttatttgttatactaaaaacacatttgattataataaattttaaattttgtgactaattaatacttttagcgcacgaatgctcttatgaaattactcatactagtaaatattagtacatatagcataattttaaaatgcggcccaaaatccctcaattttctctttctcgtcatttggtttattaattaataataacattataaaaaagagtaataatttttagtcacaacataaatttttgtgattaaatatgacttttaatcacaataaaaaattacttatgataaaacatagtatatagatacaaattgtcactaatttagttttagtcacatttttttatggggataattttaatcacaatttagttacaacaaaaattgtaatttttgtgactaataatgttagcaattatttttagtcacaacatagatttttttataatttaagtaaaacaagagtcattagcagtatatataaatggctcattttttatgtatagtaataatcatgttgttatcaatacaactcagttacatcaatgatacatttatttgttgtat

SEQ ID NO: 221260 - DNA, 2110 bp, Cannabis indica
taaatttggatcacttttgattatgtgaaattattacatcataatttagcacaccattagagtaaacttttaacaaagtgaactatactctacatttacatcagtacttttaattaatcataataatcttagtattttatttggatattttatgcttcataaaatatttagagaatcttttgattattgagtattaatagtatatataccatatagatacatcatacatacatatattagtattattattagtataatgtgtgtgatttgcataattgatgcagaaaatgtatccgaaaaatgctcaaatatcacgacaggcagaatgtgacatattacagctcataataaactaataataataataataataataataatttatggcctcattttttctgctacatacttgatccaaataattccaacataataataataataacacaccaaacaacaattaattattgagtatgattttttggatgttagtatcatccaatctgtttgtttgatattatcatccacttttgattattaatcggtctgctaattagactttttatcttatgactaagtatttgtctcgttcaatgaaatttacacttctaaatataatttatttaatacttacgcctattcaatcttaaatagaatgaaacgacgtatgaatccatatgtaaatatagcatttatttagatacgctcgaatcactccttctcataattagaatgtatatatataattctggtctagttcaatatggaatgaatttataatcatggaatcgactcgatcattagattatcaattataagttcataaccctaatccattccccttaagaaatatgttttagtaagatataatcagcttagttgttggcttcgattataataagattttctgttttatgaattctcttactatatataatatttgatttttatttttataagtttcatacaacatttaatttaaaagttaaaatattcaaaacaagagttggcaacttgtgttatattaatcgttaaggccaacacgtatggaatagaataacttgcaaagattcctaaaacctaaactaaaatctgtaatttattagggggaaatcttattagggtgtataaccataaactataactaacaagcatgcaatcaaataatcaaattggacaaaatccattatatgaaaatataacttaaacaacaaaattaacaataataaacttacctaaccgtttacaaaaacatgaaagaaaatcttaatagcaataagaagtatgaagtatattagatttctaaatcaaatggacacttaataatctttcagttaaaagtgggacaaataaccctattacttaaaagggatttttacaaaaaatattagattttgagtaaaagtttataattttactgcaacacggaattttttacaaaaatattgtctttttataaaataactgtaaaataacaaaacaaaacaattaaaataacagtagaacaactaaaaaataattgtggaacaactgtgaaaacttaacacagtacatattatttttgaaaaaaattctaccacacagtaaacaagtaaaaaagttagaaatttcaatatgtggtgtaaaaaccccttacttaaatcataaataaagaaaataataaaaccaactatgttatgatactcaaggtcgccaaacattgggagtttgggccattgtacaagactccattttttaccattttacatatataatataataaatatcttttttagaaaaaactacatgaaaaatacaaatattactcttttacccacacacggattggataattttttttgtctttattattgttttatttatcaaaatacatgtaacacacacattgcatgcattgatgatgtcatgtgtttagattgacactcaaccaattcttcctctcttttcttatcatgtttttttttgggtaaataccagtttagaccctgtgttttgcaaaaattacagattgaaccctgtgttttgttaaatgataaaattgaccctgtattttctaaaatagtaaaaataggaccctgagcttaatttttgacaacttttttttaaatac

SEQ ID NO: 221261 - DNA, 2371 bp, Cannabis indica
ttcgattttttttttaaaaaaagagaagatattagatatgatcttcaaatgatattagtgatctaatatcttttttaaagagatagaaaatggtgtttgaacatcgatcatattcatatctactatatgcatgttgctattaattattagaacacacaaaaatgatatttaatatataatatgatcatgtaatgtaaatatgtttcttactatattttttaatcgaggaattatccatgatcaaatcttaataagaatcttatgtaattatgtaagtgtcaatcaaatgtataaatttttgtatattcttaattaacaccacatttcaataaaatattgttgcttcttctctcctatctataatatttaattttgaatacacaatgactgattatttatataattaataatcagaattatatattctaacaaataataattattgttaataaaaaaattaaaataatatataataacatgactagtattcatcttcatcttacagacgcaatttgctaaagatatacagaatatacacacatgagattcaaaatgaatattatattttactaatatcattctcatcatcttcatttgaaatgaatattatttttttggaaaataaaaatataaatagaatattatttctagttgtatatatatatttggacttttcttaataatgattaaatgtcatgctttacttcactattttgttgactgttaacttaggtgcacgccaattaatttgagttgtaaacgtaactttgaacaacctcaacattaagaaaaaaaatatcatatatattaatattagaatatttaattaatgttctcttgaaaaataaataaagaaaaaattacattttcttctctcatcatatttgaacttaatttatatcatcggttacatttgcaatctatttcaacaaataataaataaatctatttcaatggtgatgatattaaaactaatatgtagataacatttaaaagtataattaatatatcataaattctaataaaagaaaaattctaataatttatatatatataggtaaaagaaaaatacaatatctatttctttataaaataatgtaatttttttttaaaaaaaaataaccttaaatgtaaaattataagatttttacaaaaattagtattttatgtaattaatccaaaacaaaattcttatattacaccagagctcctaatcgtaggctgtgtatatgaagctttaataattttaatgatttatttaaattaattaattagcaaagtaaatcatggtgatatattattagggcatgttgggtcaaacgacaaggagtctttcgcgtttaataatctaataattaagtaataactaatctaaatcaacctctctctcaaattcactcctccaaatatatctaatcaataaaaatttaatagtaccataatttaattaattaattaattttataaatttaggacaaaaggcatcatataattgcatggtaattttaataatatatactgtcatcaatcatgataaatgtgtagatttcatgctattaaatgataattaaatcaaacactgatgttttattaataaaatgtttttcattgcacttgcagatttttactctttgaattgttgtttgcttaagttgttgaaaactatcccattcgttgaaaatattgaccaatatactaatgttggagttaaaaaatattttaaaataatttttgacaagtaaacaatgagataattaaagtttgagcgatgtggtaatactacaaatttttttatatttaatcacaataaaatttataattaaaaatttaaaattgtaactaattaaaagtctgtgactaaagatattagagttaaaattgtaactaattaaaagtccgtgactaaagatattagtgataaaattgtaactaatatttttttgtgactaaaagtcacatttaattacaaaaaaattatgttgtgactaaaaatttatcactaaaggtagtttttttttgttgtacatatcgagattgattagtagttttttatattattttttaattaaaatatttaaaatttaatatatttaattgtataaataacaatatgttactttttatagtgtttactaattggtaacttaaggtgcctcttttttcttaaagtttttgttgacataatgtaaaaaagaaataaaagataaagatatgcactaattattggaatatgaggaaactccacatgaaattgtctagagactaagaacaagggaaggtagtatttttcatttggacctatgtggtaaggagttgttagtagtaagtagtgccaaaatataattataaatattattacatatttattaaa

SEQ ID NO: 221262 - DNA, 1174 bp, Cannabis indica
ttaaattataaatagccaaaactcagtatataatgagtttataaatagatagcggttcccaaaaaaaaataactagggttttgtaatctctctataaatttataatttagggttttatacaagaatatgtttaaatatgtgatatatatcttttttaagtattttataaatcttaacattataaattattattttagttgattttcattaataaaattcaattatttattaaaaaattaataaaataaacttataaatttcccataaattaatgtgtgatttttttaatgtaagttgccggtgaattttggtacaccatgttcattaccctcaaaatcgaggaaagggaatgactctcttacacctagtttgacatctttagtcggtaagacatagcccaaattattttaatatcttttttatttttttatgaaataaagttttaaatttttataagaggaaatatcaagtttgtttttctttcaaaaataaaaataaaaatatcaagtctgttttttttttttaaaaaaaaaaaatctgattcaggtttgttgtatatatttggtgtgaccttgtttcgttttctatatttgcggtgaggtggaacacagtgtagttaaagttcgtagtaaaaagaccctacagctcggacagagagatagaggacacgagaaaggagcaataaaaggttctcaaaggcttcctctttttctctcttctccaatttttaagccaaacataatatatttatatatatatttgataaaaaagattccacgagaaagctgaaaaattacacaaaagttgtgactgtccggagagagactgtactaccagtgcatgtctaatgccttcttcaacttggttgttcttcagtctcaacatagggatatcataaccaaccacattgaagcatcatattctaagcgtgaccaggtactaattattattattaatattattatttcttttaaattttatgtcaaaataatgactttcattggaaacccagatcattttttttttaaattcgagtttttcagtgatcctatacattttctaacatgttcaaaattttcatgagtcgaaagatgggatagtagagtttttttttttttggttctttattccattgttctgttgcttcttctggtacagattttgcaaattgatt

SEQ ID NO: 221263 - DNA, 1654 bp, Cannabis indica
caggagtcacacaaattcaagctagtatgatgtaatgtaagaagtgtcaagagatttgagatcaagtaaaacagaaaatacaaatggctttcttttttgtctttataaagatgaaaaacgtaaatctataaggaaatttgaagttaataaactataagcatagttctgtttgacaaacagatcagtactactctacaaatccactacaggggcctgaagtcagagcaacaccaaaaacactaccattggaatcataaaagaatagcaattaaaaaaagaaagagatgttttcccacactaccatatcagcagcagcaacaaacaaatttaagttctttaacttccaataaaaagaaaaaacacattaaacaaataataagaaaactaagaattgccgcaaatgagaaagatttgagaactggattatatacatatatagctgaaatccctaaagtagctttcttcatagttcatatcaactatcatgaccacataacacatcaaatctacaacaaccccaatagagatggagaaaactaatggtaacccagatgaaaattaacctcaaatacaaaaattccacatcgactttgacactagagattcaaataattgatcagataaattgcataaagggtgattgtacagtacaattctccttctcttcctagtccctaacttgcaatctcagtcaggtaccactgaattgttccttaatacatgacagatactgtatccagtgaacggggtcggtcttagattttctggatccgtctgaaaaatccagctaaacttagctggggatttaatgtttgaacttattgggggcttttacaaatataaatgtctgaaacagttaagtatctttttaaggaaaggttttaaaactaattatatacaaagattttcttatttaaaaatgattatgagagtgacacgtgttaaatgtctatttgctaatacatatatatttatgtttgcatagcttcaaacttaagttatgcctacaccaaatcattccttcccagatcaatgggttttgcattttttgagagatccgagttgctttgtttcaagtctgtgtgtttattttgactctggtttttcaaatagctaacatagtttaatggttacgaatttagatttatgtttaagtataatagggccatgtgttttgacctatattttattattataatttattctgttatagtgaatgtttttatgacaatagttaaactaatagtgggaatttgagatttttctttactatttaaaaaaaaaagatattttattagtgaaaaaatcatagcacatataatattatattttgtgtcaataattttctacttttcttacattctcaccactgacttgaatcatactattgttggattaggtgcaactctctcatgtgacaaaataatttgctttgcttatggtatactactatattctattgcattattatggttagggtccttatggagtttaaattttcaaatcttatgtctcctgttatttttccttactttctttgttttttttttttttcttagtaatctcctattattaattgttgattggtaagtgaagctttaacttttggggatctagtcattaatgcgaacatattggtcaacaatcaataggt

SEQ ID NO: 221264 - DNA, 2898 bp, Cannabis indica
acccactgtaaggtttctcataacttttatgtgtttaaattaaattgttttagaaattcatattaggatgttaaaaacatacatggtagtaaatctagatcttggtaaaatatattccaacaatttctttccttatgtgaataacgttctcttctatgcgacttggacggctgacttttcccatgtgttctccttgacccactaatttatgtgctcgatcctgtctctcgatgttaatctcaagttggccttcgcctttcaaagacatttacaacacaatctctactcaggtaagtgtacatactgcccttttcatttcagtttggacctcacgaaggacgtggagggcaatctgatctattcattgggtgctcatctagatctcaaattttttcgtcgagtttgtccaatattcccattcctgcaagacgacttagggtcatcgagtcgtgtttgcctgttattttcattcctgcaagttagctcaaggttatcaggtcatgtttgcctcgtgtttgtattattgggattttgaggattttctctgtgtattagaatttccctagtattccctggttgttcttcttggggattcgtagggtttccttgaacattctcttccacaagtatatccttattccttctagtccttgacccacacgaccttcctcaatgacctggtagtgcatctagctggtgcaacctctctttctttctctgaattccttcggttagattctgctaatttttatcggagttgcctattctcaagttccactaatggaatatagcgtgtaggatcgtatgcatcctagttatgtctctttaggatctcatcaattgttcttttgcatcccattcagtagagtctctcctagcgttttgattcttagtggtattcgctccatgagttctctgagtttcttttcgaggacgctggattgtttctcctggatgatcattgttgtcatgagaagaattttccctagttgggaaaaagacccaactaatattcaaaagaaatgcgtttgtcagatttttttttttaaaaagctctcaatgaaagcaccaaactgttaacatagattttcgttaactaaaatactaaacctttttgacaaataatctatacttaaataaatatgaataataaagacaaagagatttttacgtagttttgaatttaaattttcatagtccacgaatatatcttatttctaatttttgaattatataaaatacaagaataatatgatggttatacaagaatggttctcctcctctccccttgacctttctttggttttgggacccctcccttatttataggattttagaaattacagttattcctctttgatcttaactttgtaattattcatgaaacgtgaataattctcacgttttatatttacaacatgtcagataaattaaataacttataattgtttttattcttatctgaaacaattatttttctgagaggacatacttgttgcttgccttacgcattatggtgacaagatgacttatgcgagacaattgcttaaacattcttctcgcattagtcgttcatgattaagattggaaacttcttatataagctttagaataagcttttaagatatctcttgtgctccttacattggaaaccttcacaacattttttactcatatccttagttaactaaagaaagatttaaacacgtctacaattagtattctccgaggcgagttagccaaccttccatatttttataactacgagcaggttattgtccaattcttatattcgtgtcgtggctatattactgctcgaaatataagcatatagattctaaattatttaataattactttttacactaaattttacatgccatccttgtgaagatgattcatttgtgattatgtactctttttttttttttcgaataaaacttatgtttcaatagataagcaataaatacaaagcaaaagcaagttacataaaaggtagagaattattccaaactaacttattatctagtcttaaacctaacttagcaaccttacgagccacagtatttacatctctactaacatgactaataggtaagttagaactgaacgataacaagttcttaatacaacctaaaattttatcaagagaactattattccaggtacaaaatttaagtttatccacaatgatttaagttcgtgactatgtactcctgtacattataattttcacgacaatatgtaagattaattatgtcaaaagggaaataaatctaattttatatttctttcattttgccaagattgagcaaatttaatacttgaattcaccacaaagcaatgcagaaacttaattcttcattattattattattttcttttaagaaattcaaccgtatttttaacataaaagaagaaagtaaacatgttaatttgctaaaggaaatatttttgcatagtaaattatctaaattgtagaaacattgtagtttggtcatgagcactactactagcactttgaaggctatcatatgaaacctaaaaactacagctaataagaagtcaaagggagagtaacaattctgagatagtgaagattcatatgcagtcaaatccaaatagagtgagattaatttatatagagtcaaaatgcattgttaccaccacggtcacaaccactgccaccgccatcagtatgcatcattgcatcaatttggtcatcatctttcatcttcagctacatagtgaaaatccgtgcatcaacactttattaaatcagatctattaccatatcaattagttgcacaattttgacgacttaattaagaaaaatagttcaataagttgaatgattctattaaaattccattaagaaagaaaaaaaaaataagaaaa

SEQ ID NO: 221265 - DNA, 2649 bp, Cannabis indica
ataataactacaaactccctagagtcagtgatcatatatatgtcataggggtttattggagatatgtcccaatctaaatcaagatggctcgccctatctgtattagtaccgtattgctcgacaattctgaagaaggaactattgcaataaagttagacatgaaacttaggataccaattatcaaatctacgtgttatgcgatcaataaaaaaattatcccaagtataaaagttatactggctatcttgaaacttacctagcgaggtacactcggtcctaagcacagttggagaccatccacaattattaccttggggtgcttcttcttcagcttcccgaggggccactttattaaggtagtggatgcgagccacataatctctatcttcctcatgtggtggaattaggatttgttgccacttggaaaattttgggttcttataatcgcaggtggattgcttagtgcggacagtcttcaaattggtttcgttcagtagaaaatctactgatcgccctttatgtcgttctaccatctagggagtcgaaattttccttctcgtgatcgctgtcaatacaataagcaaaataaaagcatttaattaataaatcaaaaactcaaaaccaaggttttgagaaaagatgatagttacgtataaggcaaaatgctattgtattgatgagggagagacctgatgtccagaagaattcatccttgaattctattttattaggcaacctcataatgatcctgcggtcgtttgtgtgggtaccgaggtgataaaaaccttatgatcctcacttccttgcgggaaaaacttttacagaataaaagtacacaatttcaaggggagttggacactcccatcccataatgtggtatatgacctttaaataggccacaattttgtaagaactcagaattaacaaaggggcaattttgagataattacaaaattccataaagtactctctcagggggaatactactccagcactgatgtgctcgaggcttcaagcgcctattccaggcgagccactagtactagtcccacattcttctcgaattactctttttggtgggaaacagctaaactcccctaggatgacgggcctaacgcgacatcctctctcgtatttgatgccacaagcctttaatatattacccacaaagggagctatagatctaacctcgaattcaatcaattctacctcgaaggtaactgttggatcttgaggggtcattgatttacgagcttgaggagtcacgatttcaaaatttaagtcatctacttaaaagcaacagtgactcaaggtaaaaataaaggtctcgctagaggaatagaagataaaggttggggttaaggccaagctgcgtctcgaagataacgacatttacccttagttatttcttataaaaattgtctgtagcgattgaaaattttagcttgattggtttttattaaataatccctaatcttggcatcgtttatctcaagtatggcttcacgtatgtgagttttggattcaaatggaagggctaaatttttaggatatgcagtttctaggaattccagggttgaaattttaaagataaattgtgtcatatatgcaaacaagaataatcccaatttttggaagaaataaattcaacctaacccagaaatctatgaacctaaaaggcctaaaaattttccttaaccctaaaattatccaggcaaacaaaacgaaaattacctaaaataaccaaacacagaagataaatgaagcaatacattactaagacaagactacaattgtagaaaagaaaaatgttaggaacaagagaatgagccacttactgttttgaagaagatttctgagcattggaaaactttgcgattgggttttctacaactgaaacgatgaattttgagattctttaagaatggagatgtaatcaaatgaaatacgcaagaaataagttaaagacagtgagggcatgcaagtttaagggaattgatcgcaagttacaggagaaatttagaggtttaaaatttgaaaaatggcaaaatagactgataattttgatatttataccctattgagcaacgccgttagatcaaaaaagactaattaataaatagaaacactacagattggatgagacagaacatttaatgctaataatgtgcctcgaagttctgaaccgccaaaacccaaagcatgcaatttttcaaaattgggctaagataaaaatacacttataatcatttaaaaagtactttttgaggagcaattgttatacccaaaatttggctacacttcagaggttgacatgtgttcgatatcattaaatgcatattaaataacacgtttactaattaaaggttaaatagagaatattcaaaactcattgattttatagtcaatagtgagacaagaatattaactattgatctgagattaacaagacatatgcatgcctcggaatataaggataaaaaggatcattcatccatccgagtggagtgagtatatcaacataagatgcctcgcatttcatacagcaagaagataacctcgcattacaaatatcacaaagagaatgcaacgagatgggaaccttcccaacacttagaaaattttcttatcaagatggacaaggaagat

SEQ ID NO: 221266 - DNA, 1767 bp, Cannabis indica
aatttgtatgagcttctttatgctatatttttgtaaataaagtttggaataccatattttaagttttaacttttcttctttatttattatactaccccactactaaactaattctctatctatctagtctagagagaaagaaactttgcatcggcgattctattcagcttctctatcactagtcttgtaggtcaaacactattgagctggatccatctctacgagcctctctttggcccaaatcactgaagacacactgaatggtgatgtgcttgtggaggagcagtagtggatcaaacctggcctattactgacaactttcgtggctgatgggttctgatctacttggtaacacgtgtcaaccacctagtgcaacttgtggaagttgcaaaaatcttctaggaaaggccaaacttgatttgtcgttaggcctttcacttggactaaccttcccatttggattgaaatttttcgtccgccattgaaagccagtgaggctaaaagatgttgagaaactgatgtgattgtgtttgatgcacttttaaagtcttactgttgtggtattttcaacatacaagtatatgtatcgttaacaagtaatagactcacaaagagtaaggttgatcccataaggattgtagttaagaactgtaccccatgattctctggaagagtcctaaacttgagtaatacttgttaaaacgatacgtatacttgcatataaaattaccacaacacacaatgagagaaatcacttcaagagtgatactcccataacatccctccacacactctcactgtaatcttagactttatctttctctctctaaacttgactctgaaatttaaagtatgagcattggagattttcttgagagagtagagacacttctatttatagatgttggtgggacttcctttaagttggtgacaaagccaactgttataactaagaacagctttctttagattcatctaatgagtgataagatggatataatgattttgacaaattaagtgattttaatcctaacatgtatgaagataatgttgcatgtattgctcaaatgaaaggaagttccttcaaagatgttagaactaagaacatttccccaaaattctttttcacccatgagcttaagaagaaagaggatatagatgttcatcagatacgttcttgtgataattatttggcagacttatttacaaaagcccttcctacaataatatttgagaaattagtacatagaattggtgtgtatcgaatcaaagatttcatcaatgctgcaaagaaggagagataagaaaataatgtactctatctttatcagaattttgttcctacaaggtttttattattattattttttatagtaaagttttaatgaagcatatttttaatatacgatatttaaggagagagtgtcatgaaataataattaatggatgtctttatctatctatccttgctttattactattgattctccaatttattttatatatataactctagctcctagtaattttcttatgtaagtctagtaactattgattatttagtttatttaatttctatactttatgatcattatcctataaataaggtgatgatcatcttgtaaaaatatacatttataagtaataaaattcatctcttattttctcatattcttttaatatattagtcagggccggcccaagctggcccaagcattgggcagcttgggccattgcacaaggttcccatttttttaaggcccaatt

SEQ ID NO: 221267 - DNA, 1315 bp, Cannabis indica
aaaaatctcactataacagcgacaagtcactagccccgtacaagaagcctgcacccatgaaaaaagatgttagcaagagagacatgaccaagttttgtcgattccatggcggctacggccacgccaccaatgaatgcaacaatctgaagcgggaaattcaattcgtgataaggaaaaataacctgcatatatagaagtatgtcaaggccgatcagaatcagaggggtgataacaaccaagacttgctacctccgccggtggacggacatctgcaagtcatcattggaggcctgcacatagctggagattcaggcaacgctcaggagaggtatgcctgaactatacagcacgagcaagaagaagtgatcctggccgtagaagaaagaaagcttttgttattgaattccttaagtttttacatggtttgagtagtgatttcttgtattggtggctgtttgtgttagaaatccttagggttcgaattctatgcataatttgagttaattttagcctctagtagctggttttgttgtattgtgttggatttattcaagtttgagctttaaaacctaagctctgatctttaatggcatgttgtgtttcagagagattttctgtgaattactggttgtaaaatattctttatgcattgtttaggtattctggaaagtatggatgcatttggtggggttttgagcaagaaatggaattttttgagtgaactggtgcaaactgggtaaccggtactggcaaaactagttagtcgatttttgcagggttccccgaatgttccattttctcaatgctcctgcatttcagtaccttagttgggtgtttccctatttcctaacttattgtaatccctaaagagtataagagagcctagagtagtgggttcgggtttcccctattgtggtttttgatcaagtgatttacccggtttcgttatgtgattagggcatccatttagcgcaatactttccgttcaagtcggccagcacacttgaatctggaaagaaggtaagaactgtacatcatgtgtgatatcaatatgtgagtgtatgtatatgcatgcttatatgtttgttacactaccaacacttgtacagttatggtgcagaatgcattggtatagtgtgtattgttgaagagtacattacgtacgggaaagtacagggtgtctgtggtatatcactcagtggtactcgaggtacgaatcaaacttaccaacactcataaagcaaggtacgtactgtatgtggtatagtggctgtaccctagtatggaacgttcttactcatctattaagccttgt

SEQ ID NO: 221268 - DNA, 2961 bp, Cannabis indica
ataatattctattaataaaattaattcaccaaaaaaaataaattgtataaaaaattattcataacaaaaaagaaataaaaaattatataagattataaaaataaatggagaagttgatgtaaataaattgttattcaaaagaaaattaaaaaataaaattattaagaaaaactcatagaaattattgtgaaaaaaaattgtaatataaataaaattaacataaagacaaaagtaagtttttcatttttgtccttttgttttgggtaagatgcattcttctatgagcacccgtgacactttttagacagataactttgtaattggttagcgatactctttaaaagttattacattaaattacatgagatcttatacttaattgcatcaataaagatattaacatgtaggagagtgctagacaacactattttttaacatttcacttagggaaatttgactttttagtgtatcaatattgttagattagatcaattttttattaaacccaaaattacccctcccatttttcaactcactttctcccttcattcttgctcgctctcttcaagagaaccgaaccaccaagaccatcgccaacatccaagaccatcgccaccatccaacaccaccgccaccatccaagaccactcaacccactaaaagaccaatcgggctgaccctcttgactccatttcattctgtctgagcccacgctaatctccttcttcaatcgcgaacagagagaccatcaccacgaacggagagcacaaatgtagaccatgaaagaagaccacaaacgtagaccacgagcccacacctatctggcattctctataatttttctgctttttatttttttttttaatttttttgagccagtctgatggtgtctgatatatgttcaatagtaggtcccaaaatttaagttgttgaggttgatggagaaagtctgatagtggtctgatgtaggttcgatacttaataacaggttggtaggctttttgtgtccgatgggggtccgatataggttcaatggttgtctgatgcttagtgacagattagtagccttttcatgtccgaatggggtctgatactatccgatgggaatctggtcggatccccatcagacacgaaatacatccaccaatctgttagtaagtattagaccaccatcgaatctatatcagaccactatcggactttcaccatcaacctcaaaaacataaattttagaactttctatcgaacctatatcggacactatcagactaactcaaaaaaatgaaaaaaaaaccacaaaattacagagaatgtctttgttcgtgttctcttcattcttggtatatgtttttggtctctgttaatggcagtggtctctccattcgcagttgaggaagggattggcgaggtctcggtcggatggtggcgatggtcacagtcttggattctttagtggagtctcggtgggtatttcagtgagaacctgtgataggaaaaagagagagagagagagaggagcaaaagaaaaatagagagaaactagcaaatgttgatattagggtatacatcaaaattagcctaaacctatggttattaattttaaccaacaatatgcgtcaaatttcccaatcttatccgtacgtagacccgggtgcaccccaacatagaattttccagaaactaattggtctcagttgttaattaatagtttaatactgagagagagagatgtcgtacttgcttccacatttgcactctggatgggccgtagatcaggccatcctcgccgaggaagagcgtctcgtcatcatccgatttggccacgactgggatgagacctgtatgcaggtattattaatttatccccaaccaactctaaatcctaattctctctatttcttctctttattattattatctactaattgtatttctttttggattttactttttattttactgaattcagaactttttctattctccttgcttactggaattgttagttcagttggttgtttcatctagtcccattctttatagaaatttattaattttaaaactgattgtgtttttatttttgcacaacttgagggtttttggtctctttatagtactgctccactatataccagaatcagcagtgttttttttttctgctcgaatgcttcactttttctttttccttctctctcttttagttttcttattgtctgttctgttttgttgggttttccctttttttggcatttaaatccatgtcaaagttttaaacgtgcacaacagagagaagagaagagatgagaacttaggttgaatgtgcaatgttatatgttgtttcttgttcacttttcttgaataattttctcaagtgttgtaatttgtatcgcataccgttcaaataactagaaaagaaggataaatcattcaaaccaactgattctttgtatcgttagacaacactgcttgagaagttttcaactactactaattgttttgaaagctctgcttttagactatgtttctactgtggtgttttcttttctgtttctttatttgatctctgaatgaattgttttgttggtgatcagatggatgaagttttggcatcagttgctgagacaatcaaaaactttgcagtgatataccttgtcgacatcactgaggttccagatttcaacacaatgtacgagttgtatgacccatctacggtcatgtttttcttcaggaacaagcacattatgatcgatctcggaactggaaacaataataagatcaactgggccctcaaggataagcaagagttcattgacattgttgagactgtgtaccgtggagcaaggaagggacggggtcttgtgattgctcctaaggattactctaccaaatatcgctactaagttcttttgcaaaagaacaccatttctttgatggaattcactggaacttgtttctctagaa

SEQ ID NO: 221269 - DNA, 2525 bp, Cannabis indica
ttttgagctgaagtgtgaggacacgagtgatgaaaacctattccattttcaacaactgtgtcttgaaaagcttgatattctcctccccaatctgtcctaagtcttttgatttttctttcaaattgggtttcaacaaaggctttaaattgcaagaaggctgcactagcttcagctttggtttttaatggataaatccaagtgtagcgagtgcaatcatctatgaaatgtatgtggaatttaaaactattgtttgacactattggtgagggacgccataggtcactatgtacaagatcgaggacattggcagctttactattagaattttcaaaaggaagagcatgcgatttaccaaattgacaagcatcacagaaatgtatcatttcattcttggaaattttaacttgacaagagtttaaaacttgactcaagactcttggtgatgggtggcctaatctcctatgccacacatcacctttagacactaaagactcgtctattttagactgattggtactggtttttgtcttaacaacaacaccagagaacctgttacaattggctttatttgactcgatctgacttaagctttggacagtggttttggactgaggtgcttgaagttggtagaggccatccttaagcatcccttgaagaagaaccttccttgtttgcttgtccttcacaacacaataatctaagtaaaatttcattagcacatcattgtcacgggtgagtttagatacactcaacaaatttttagcaatctcaggaactaataacatttcctttaacagaatttgttgtcctgaatgagtaaataaaatgccatttccaagatgagagatagttagttgagtaccattacccactgtgactttctccttaccaccatagtcatgtttgtgtgtcattgatgcagagtctgaagtgatatggttgctggctctactgttagcaaaccatgcttcactctccagcagttcaggtgtggcaacaaaggctgagggattgttcttgtgttgtgtgctgttatttgggtctgaacccatgtattgctcatcaaagcgattataacaaatggctacagagtggccatacttgccacagacttggcaagtaggctttgaactattcgatctgccactgaatcttcccctgccacgacctcgatttggtcctcctctgtttgagtttctgccaccatagtgttgtgactgagtgttggagcctctgccatgtccactggtctgaggttttttagcgaaattagcctgcggttcagtcagatagttgctgaacttgttgttgttagatgacaaagcttgaagcctttctattttgctttcaaagctgagaagcaattcttgcagctcttgccatgaagtcctggatctggcttcaatctgtaaaacaattgttaagtagttaacatcaaggtcagaaagaacattagtgacaagttgtgattctgggtatggctctcctgcaagagcaagaaggttagcccaacttttcttttgcctaaggtattcgaccattggagtgttgccctttcttgttacttggatcaatgtcctggtttcatccattttggacttagagtgtgcaccatatagttgttccaaagcttgccataaaccagcagctgatgcaactcccatcacttcagttgctatagtctctgtcatagagctatatagccagcctatcaatagctggtcgtttataatccagttttcataagctgggttggtgacaagagagtctcctttgtcgatgctttccattacagtacctgcatccacaaactcagggggacaaacattagtgccgttaagaaaaccatccaaacgatggcctcttactatggtagagaccatagttttccatagactatagttatgtctatcgagtttcaaagagaaaggctgatttagtgtgttgaagtgatgtgtaactgggtttggaggctgagcactacttgagcttgcacccaaaactgttgatccagcagcagggattgaagattgagcaggggcattgatttctgggttttgtgatttggcagacatggtgaaaaaccttgctctgataccaagttgaaaaatagagatgattgaattgtgaaatctcagctcaagcaaaatggaaactgagcaaattctatttataaagcaggccaaagacctgtgtgtacaaagaggagcctaaatggctcattacagctgtaaccaattcataacagaaaagagaatctttagtacacctaatgattaacaaatcattgcaacgacaaagaaaatcttccttgggatcttcaatgttggctgctgaatagaaagaagccacctgtcaaggcaaaaggccaaacaaaccagcacatggaaaataagggaaatgaggctcatttcttcacattaaatatattaaacaaactaaccattttattgaactatttttttttctttgtcaaaagaaattcttgcaatattgaataacaccataatgaaatgatgatgcaa

SEQ ID NO: 221270 - DNA, 8313 bp, Cannabis indica
tttttattttttgttcttcacagctgtactcagctcatccactttatttatttatttatttattttttaaatatatatataaatatttctatttcacaaactaatctgttgttatatgtaacattttttcgtttgttgctattctaatcccataattgtacgtacgtctacacttatcatcactattatgacataacaaaacaaaacaaaacaaagcgaccgactttcctttcttcttctccaaattaacttttccttccaaattctaccttccattttctgatgggacgtttttttcttttagtatttaaagaaactataaattattttttatgtgagtgtatattaatattatagtaaatagtaatattatatattttgtaattttaaaaaaatttaaaaaattttaaataatttacaacactaaaaacaatatataaatatttaactgtatttatattcaatagcggagccaattcaaaatttaaccaagggacaatatatgtaaaaatataaaaaagaaaaaaaaaacgtaaaagttttctctctccttgctcttgcagttctttcgaactggtgctatggcaaaaacacgagtgaaattacagggaagctaaaagttactgcaaaaaagaagaaacgaggccctaattcaactgcagatgtaaggaaaacaaaatccatagaagaagttctcagtatcgaacctcttaaattctcagaagaagaagataaatgttctggtaaacattcttcaatggctccatattgcaagatatatttcaagcacctctatcttcaaggtcttctctgaaattaattcaacaagattatatttgagctgaatattctttcttcctaggggctaactagaattgctcgaagtctttaacgaaaggtctctctgcgacacctcctattcttaggtttgacagtgttgttaggaacctggcaacatcttttgaaaactcaagtaaggatagcaagatcaaaatcataatagaagacattaaagaggagatttctttttggaattcctctttaggtgccaatcctcccctctctgctctagaaggttttgcaaggcaattatagaaacaaaaaattgatgaggttggtatgctctcatatggaattttcctgatttgtttttattgtgttgaagatagaaatcgaatacttaagggggaatatactttctttaataagaggcatgtagttatgaaagctttggctcccaacattaatttcaagaaggaggacattcgagctattccaatttaggtgcagttgaatgacttcgaattgaaatattggggttaaaagtctttattcaagattattggctaagttagagaaccattaatagttgatgatgttaccaaagagagagacaaacttaactatctgagagttctaattgaagtaacacttcatcaagaattcttagatattatctactttgaagatgaacttagaagtaatgtttctgtagcagttaattatgaatgaaaacccatcatttgtagtgattgcaaaggaatggatcatgaataaaaggactgtcgcaggaaggagggtcgaaagcaagaatagattgttaaaaaagatagcaagaagcctgaggtggatcaaccagatgttatggcatctggttcagatgagttccaacttattaccaaagggcggaagttcaaagctaaagcacctatggaatgtcttaccactttgaatttgttccaagccttatcaataccatcaacaagtggagagaatcaagctggtgtaactgcacaaaaggactaggagcaaatgatgaatgaacagtacatcacaagaaggagggagtacttcctctctccaatggataagataataagctagaatgtgcgagggatcagtagccaacaaaaacagaaagaagttaagcaattcattgctaatcaaaaagttggtttagttggtctcctcaagacaagggttaatgctccaaaacttagagctttataccaacacatggtcatggggtggtgttttaaatcaaacattgtgtggcatagaggtggtaggattattgtttcttggaaccctttacagtttcatgtaagtattcttaaatgtgcaagccagctcatacatctatatgttgttactccaaataaaaaatatagattcctggtgacttttgtatatggttattgttatcctatttttttgcactatgatgtggtaagtagctgaatgacatgtgtctcatattttcttactttggcagaaggttacactcttagaagccctcaaagattggtagaaagatccatatcaaccgtacataggaggatgcccgagtagaaccataaggagacatctgaccaaagctcgattgtgtgatcaactcacatgtaccgaacaagatatgtgagttggcaatttcagagatggaggttgttgcttccaagacgcgaagataatccctattttcgtgagattagttcagagagtaaaggcaataagcctaggtttcctattctttgcattgtgattatagaattaacttagtttcttattttatttattatagattaatggaaaattcttcatgtaataagcctctataaatagtgatttaatctcactattcagggacacaaaattgatctatgagagaattactcaaagatccattgtaagagctttagagagaagacactttgttctttgtctctcaagtcaatacaacaaaaaagggtgtaggctattatcattctcacggggtcgaacctctaaaaattttggagttctctttatttactgtttttgctttttattatttattttatctagtcgctttattttgactctctgttgttggctagaagggaggttaatattttggtgctttcattaagagcaaaaacacgagcttttgtcttaaagtcttgacaggttaacggatggttgtaactcatgggggaatttagactaatccagtcgatccaatggtgactaatccaagcgtccagactcctagaaacgcaagagatccaccaaggacaaaccctgaataggttaatacacaaccaccaaggtaggccatggagtgacttccccctggcgagtacaggaaactgggaatactggtagagcggccgaaaaaatactcctagcactgagatctcgtccaccacaaacacttaaaggctggttggaaatgatactaagcttcaaaacctgtgagctgcgctaggacttatgcaagaccataataacatgttgcaccatgatcaacaagatctccagacagctatcaatttggcttttgatgagcaaagatgccaattcatagaatggatggattgggagatggaagtcatgaatcagtaggcagccactgacaattatttcaggaaagccaccatgctgatcagaagagcctactaaattaccgatcaacaaccagtatctgattctagcatccccttgggatcctagagctggtcaaaagagtataagaaataaccgtctaatccaaggccacaggttcaaactgtgggccaaacagtagatggctaaatcctaccaaaccgcccattgtgagcaaatactcagctaaataatcatacttcgacagagttatcaggttagtcaacctctcaatcaagttgattaaacccaaagacctcttggtacattagtgtttgatcggttaggtaccgtacatgacctcagaaataatctaaattgcagaaggggacttgggcaaaacattccaccagtcgcccaaccaaatatctatgaccaagatctagttcaaagagatcttaatgtgactcaagtcggtcaacaacctggcaaagttcatccacttgtgcaagcataaatagatcaacttaaaagcctcatacaaggcctgaccagcccaaaactcatagatcttgaactcgaatgggcaagaggatcacccttcttgcctgaattcaatgctcttgatctacccccaaagttcaaaatgtcagtatggaagttgtgcatagcgaaggaagatcctttatctcatttgaaatactttgagatgcaaatatatttgcaggggtgagaggcaatgtacggtgcagaatttttcttgccacatcagcaaaggcttcccaacaatgacatttcatgttacatccaggaaagtttaattcatggatttccttctcatctgagttccatgcacaatcttcctcctcttgttagcttccctcacacctagaagacctggtggaagtgaaacaaatggcaggagaacctctaagggcttacattagcaagttcatgactgaagcaacaaaagttaaggggctgactaaggaaggaaggttggctgcaatactggggggcattaagccactgggagaactgtggaaggatattaagagattaattgtgggatcaatgatagaatttctagattaagcttttggattcattaaactcgaagaggtagtacagcgtgtggacacagtgcgacagaagaaaaatcaataacacaccactacaactgctacatctgcccaaaattcacagcatcccaatagttcgaattaaaatagaaaaaggtcaaacaacagtaatagacaaggcaatagggaaaaaagcaagttcaacggtaaccccgaacaacatcccagggagaatacctcaaaattcattgttttctcagtcttaatagaagatatagaaacagtctatgcaactacccagtctatatatggtgccatacaagaaaccatctcccatgaaaaaggacatgagcaaatgaatgcaataatttgaagcgggagatcgagttcctaatcagaaaaaataaccaacacttacaaaaatatggaagaaactatacaaagctaatatcgactttaggagttggatgtcgtatgacaattggattattctataaaaattggaagcaagtcaaccctgaatttaaaaataaaatttggaaagttatacatgtaactggttctttgttataattttgatttgtgtttgattaattcaaatattaactctaataatatttgcttaccttaaaactagacgggttttatagtttggaatgatttcaaatatgattgcatggacatggccgggcagttaatgaaagatttcgagaacagaatgaccaaggacatcattatgcccgtattagaagaaaatgatttgtaatggttggctgacgtccctaaaaaacatcataaaattgacaaaaatgattagttgaaatttgttacaagtcgcctaactcctgaatttcaagtactaattatatatgttaagataaacttttaaatataagtacttgtagctaacatattatttttgcatggtaagaattgagtaaagtacaaagggaacgatcggtaaaaaactaattcagacatcaaaatggtcggagtagaatggtgaacgtaaaagaagatgtggtaagtaattaatataatgaatttctagcaatgtgcatcaaaatgtagtagtactcatttaagttttgtaaaataatgcagaaaaaggaacttgaggttcaagatctcccacgccaccgtatttggatcaaatctcagaccaagaaaataaaacttatcactgattacgacaagaaaattgccaattagatactaagtattaatctctgataaagtaataataagttaatatataaaaatcatatactaattgcttaaatatgtgcactaggctcaaatagaggagcaagttagccagggataaattaaggtccatggccaaaatgacattctgacgcaggctctcgggacactagagcatcctggacatgtcagggctgggtatgctagtacttgaatttttttaattatttcaatagttagacagaataaatattcattaactttatttatttatttgtaggttccttggcaaggcgtctaaatttattgataggaagaaaagggaagtttctgatgctgatgtattatatggtgttttgtatattgtctacttgcacaactaccatcaagacgtgttgtgccgaagggaaaaggtcccatgccttttcgaaaggtggtggtgatcaagctggtctattattcactctagagatcatggcgctaatctccagggaaatcagatggatggttgaagaatttttgagaataaaggagaaaaatgctataatttcaattcaggtaccacgtggattcatagcgccttgtacctagatcacgatatctggagaagatttacagcatgtggcattgtgtgacttcatcaaaaactaaggaataattttcggaatgatgtatactcttctttaacctaattaaccttatatatcaatttttattgaaattattataaaactttaatacttaacaatttaatccaggcatatttgggagaggttacatgatttgagacagattttcaagtttcacggctcatagcttctcgcagtgcacggtataaatgatatagagaaggaagagtcctttaaagttgcattaaaaaattggctcattggttatcattgatatacaccaaatattctttattccctagaatatggggtaaacactacttaagagataatttaaaattgttttatttattataacttgaagttatttttacactatcttatatacatatatatatattagtgtccattggatgctagaggtcgttgcgccaggaaaaaatatctatttagaccctatatatggccacaaagttccccaataaattcatgcgatgttgaaaatataataatttaattactaacaaatattttaattcactaacttatatatatgtatatgttaattaattaaaatactaatataatttttaaaacagtgcacacgagactttagggggatcaaatgaatttattagggcgtggttaggaatatcactagtaaattatccaaaataacctaaaaatcaagaatatggtttttatgtattgaaacatgagtgacatcgtcgcacgtgcaaaccctaaccattatttaaacgaaaaaactgtgagttttaattattaattatcttatttattatattaacaagtaatatatatactaatttaaatatttactttttaacagtttggggaaaagaagacatgcgatacaaaaactgaattgttaccgttacagcgacaatggatagaacaattgatagcggtgattcacgaaggcttggattgagttgaaatgtataagaatttttcttccctggcttatcttttttatgttaatttgtaatttttatatatttaattagatatattaacttgttaacactttaactaattttaaaatatttgtgtaatataattataatttttttaattgcttctatgaaattaattaagtatattggttagccatgaaattaatttaagttaattaatatttaatttaaataaattaaatttttgaaataatattaggttttaaaactgaaaaaataaattgatttttataccctatgtcgtcggttattgtacatatggcgtcagttgttatatcctatggcgtcggttattgtataataaccgatgtcatatggacattatgtcgtcagttattatacaataattgacgccataaagtttctctatggcgcccgttttatttgaccctatagggtcgcctagatcagcatctatagcaaattttgtcaaaattgacgctgaaagaccttaaaaattgcctttaaagcctagatttatagtagtatgcagtgtttgaatttgtgcaataaatttcttactcattcaccaaaaaaaaaggtgcatacttttaaattagttttcgtgtcattttcgagttaggcgtttaacatgaaaattacccatttaataaatgggttagtcatgtcaacccgaaaatgatccagacccatataaggaaaatctaaaaacccatcatttcgtacgaattttaaattgtgttatcgtatcttactcattttgccaccgtgaataacttacttctaaaaaataattgagcataaataattgacccatatacataaactatttggatgatttcaattatatacagtataaatttatagagtctttggtttcagtagtcatcaagatcaagatggtataacaaacaaatcaataacagttaaaacgtgaaaactaattactcccttctccgtctctggtcggcaattctctagaagtggaatcaatgaagggcgattgtaggaaaaccaatcgattgagcagtgtggctttcggtttcagttggattggagagagagagagagaga

SEQ ID NO: 221271 - DNA, 4443 bp, Cannabis indica
ataaatataattggatgactatttgatgatagttggatcgatttggtcggtcatccattggatcagatgtccaatccaacaaccgatccaatctgattggattttcaaaatttacatacaatttgatccaattatgattggatatctaattatattggatcagttgagattgaatcgatcggttgtagttggattggatgactttctccacacccctacttgtaacccagaagctaacatgggcacctagggttttaccgggtgcccaagttgacatcctcaaccaaggttcaagtaatagggaccgtcttagtgcaaaagggtcagcaatttacattgggacatcaactagacttaccatggacatatttgaggcaccacaattagaatcagagcaagttgattttttagcacccagagcacccagcgcataggttgacaatctatcgatctgggcaccttccaagtgtctgattgaagatcctacttttgcattgaattcatctttatcaaaaatgggaaaatatgtccttcgagagggaaacaacaattcttggacataaataataaggcccatcacctaggttgacacctagggctggccttgcacccaattgacaatttgccaacctgggccatagaaaatggagtttttaataattcttttgagcatcatctccatcttcagtatatattgagatttaacaatttttagggaccaaacagaatttttgaacaggaaaaattgggtcctagcgccccaagttgacacctggggctgggcccagcacccaggttgatattttgccaacctgggctatttccaattcagttcaacaaaaagtgctctaagaatttttaccatcatcataaataataaagatttaagtaaaatcgaggagaaaactacaaacctgagtccctgtttaacagggcataatgcccaacttgacctggtgctggcctagtagaattaataaacacgattatttgattgatgatattcaataaataaatctagtttatttgagcttaggattataggtccatggtccccggattgccactatcaaacactatcaaatgaaggaaaataaatgtgtgagagagtttggaaaaatctatattgaattgtcaaaatagtgattatctattttgtaataaataatttatttttcatattaattaaattaaataaattaggaaaagacaaaatttatcaggataaaagacacattcattatcttaatggagacaagggatgtgccacctacattctgtttagacacagtgtaggcgccacctacgtagggtgtctccactgattttgtatttttaaattaattattgtttaattaattttatagataaatatttatttaaatttgaatttgaaaagtaattatagatgtttccttatagttgagatattctattaatgtagttgagataattcttaaattggttatagaaaataaatatccataacagaatcagttatattaattattcaaataatttaatataatttaattaatagaattgaatttaaaataaaatatttattagtttttattttatatatattggttgacgatcaacttgggatgctaacttcaatttcttaaatgccaaatttgatgcaaccattgaatctctcatggtcaaaaacaggagagtcaaccccgttctcaagtttagaagccttggaagtatcaaaaatagaatcttgaaagctcggtttaaagggcctagcgcccatgtcaacaaatagtctggtttgttgggttttgcttatccaaatttgatgtcattttgacagtctatctagtttttcataagtacaatgatccatgaagttagaacaataaaattcacaacttcaatttttcggcaaattgactcacatggaaatcggaagtttcgagtcttccgtttctacaaaatagcaacatctctgagaactggtgaccaactttgccaagacctataaatggactaagtggtgtcaaactatcacttagacatctcaaaggacaccccttggacgtttctacacttatacagcgtctaggttgatgtcagatgtcaagctaggcgctgggatgtcaacctgggcactggatgtcaacctgggcgttgggacttgaacttcctttagtaaaatggctataactcactcaattttaataatttaacttgcagattgaagctatttaaacaacctatcaagtaatatcgcatgccccagatgtagttctaaagttatcgtcatccaaattcaccatcaaggaaattacaaaattaagctctaggtaatttgcagcgggacttgtcgggcaccaaaaattggccatcgctaccagaagctaattttcaccgttagataatcatcaacgagtttttgatatttagtctattgctataattaccatctcgtaaaaaataaaaactcaaagtagacgtagcccagatactatcgcgatataggagtaaactactataaactctgtgtgtctctctaaatcatttacttaaacttattaataatctcgccaatctagcaagctgatgttggtcactttttagtgtcaatagagatatattatgaatattaagttgaagtttttatttttactaaatattttttttaagaaaataataactgagacttaatcagggccttacacgtatacttttttcccatttgttttcttaaaaaaaaagaaaaattattggaaaaaaaatctaagatagcaaaaaaactaagatagatttaacaaaaataaatgcggatacaaaaagatttgttatattatatggtataatataatatagattaaagcaatatatgtgacatatatattaaagtatggttaatatatatgttggtgattagtcccaataaaaaaataccacatcaagacacttatcctagtcattaagggagttagttttgttaattggtctcctccattctaggactacctaactaactaatacctataaaaataaatcaccactcacccaatgagtagagtttcacttgagcctcacaacaggaaatatatctctctcttcctaattcattcctagattttgtgtgtattgaagatttataaacatgtctcttgtgtgtttcagtatgagattttgatttgtaatggtgttgatcaccttagctcactgaacattgtacactcagatagtaatgataaaaagtatactcaataaagatttaagatttattaattttcgagctaagttttattctttccttgtttccatttacatttagttttaattcttgtgactggttttaatttatgattatgtgttcttgaacgctactactattgtaacagtggtgttttgatggtgatctttcaccacaaatgggagctcaaggtttagtgttcaagaatcacatttaaccaattaagattcatctttaacctttcatgaactaaatttaggctatgaagaacctggtctgaatggttgcaacaagatttgaggtggacaagttcacaggttctaataatttcatcctatggagaattaaaatgaacgcatttcaagttcaccaagggatctaagaggctcttgaagcataagtaatgtcattgattgaagacaggaagatgaaacttgagattgaagccaatgcacatagtgacattctcctcagtcttggtgatgagattctgagagaagtttcagataaggacaaggccttgggtctgtagaacaagttatcttcaatctcatgaaaaaatatcttgcaaacaagttgtatcttaaaataatagaaaacacgtcatttaaagtatagtgacataagagcagagcttgaagaaagaaagaacatttttccaaaggagctagtagggaaagaaaatgcacaaggagaagcaggtgagaattaatacacgtggacaaataagagcatatagaaagagggaagctaacatatttttgcgcctataaataaaagattcccttgttcgaaaagacgaggaattctcaaccacactagactagtcaaaactcaatcgggatacatcttcaagaacacattcaagctcgagaattagcagacccataccaagttgagtgaattgagaagaaaacttataaaccgatagagattgtattttgattagatcaaactcgatgtaaagaattgaaagtaataatataattttattgtgaagctaatttttggcataagcaatattgttaagttattcagtccatttaattctaatcctaaacctaatgtctctctataaatacaatgtggtagcctttaattcaagtgactaacactttagactctctcttgtctaacaaactgaatcaaaagaaaggcaggatataaatattgttagtattaatattgtactaataaattaataataatatttactaattgaaatt

SEQ ID NO: 221272 - DNA, 2101 bp, Cannabis indica
aacagtaaggtggaggaagtcacctgagaattaaattctgccttgagggctcaatgtccagaggttttcagagtagatttctaggaaaaaatccttttaatgggaggataattgtaatgaccgcatagttatatcatgagaattagcaaataattaaggatttaattattaatttttgattattttcttcttagtagaaactaaggctctttgtcagaaattggccatatgaaaataatttctcaactatggagatatatttgaattttaggtgtaatatatatgttatatatgaaattttataattttcatattttacgctcggtaacagtggaacgcggtgattcggccaatagagtcacttagatgcggttaagtatcttaaaattaccgggacaagaatgatagaaatttagaatgtcgagattatttggggttataattttaaaaaaaaataggttatttcttagtgaagtaaatggcaaaatggtcttttgctctcatatgttttatttttaaaattaatagaatttctagtaaatccttcaacattaagtggataggtattagctgaattaaataagttttgtttaataaactagggaaagtcaaaaccaatacctcttcactttctctctcttctagtttggcgaaaccaaaaataaggagaaaaactagaccttcttccatcataatctaatcacaatcaagggatttcaacaagatttcaagtaattagagttagattcagctcaaggtaagctccttctctcttctctttgatttttgagtaaaaagttaagttttaacatgtaattttgaattttggctactgttgggtttaggtagtgttaaaactgagtttttaaacttgaattaggtttgtttgagctatttgatagttgtttggtgggttgtagcaagtttgaactagtttgagcttttaaagctcaaacttagctctttaatggtgaatttaaattttgagcttggttgatgcttttaattgttgaaatatgattattagacctaaattaggtgttctagaaagtttgggaatgttaagattcgatttgtggtagttttgaggtttgggaaaaatttactgtgaaaacggcatgtcgtttctgggaaaacggtctacctttttctaggcagaaaacccataaaaacggcctgccattttcttagggaatttttctcaaaatctcattttcgatgttttcttgttatttaggattttgccatgttgtttatcgatagagaaacttttagttttgagtttaagtccccaaaaatatattagcgaatcacttactagttttaacataaattgtgacttaaggtcttaaatcgttgagcagcatttttcactcagagttatcgatatacttgcattcagaatcaaggtaaaattagtataataattgtatatgtgctcacatgtttagcgtacatgtttatgaatacttattagataatatatcagtaatagcagtattagtgtacatagagttgcactgaatactgacggatatatatttcgcatagtacagattgacgctatcacatcgctgtgactagagtaccgagtattcgctaatattatggtcagtaatactgtcgtacgaacgtttcagacttagatgtggggtacgggataggattgttattgaatggattggcacctagttataatcatgtatatgtttatgattatgattatgtttttcttactgagtctatcgattcacggttattatgtttatgtgcaagtaagagctagaaccgaacatggatgagtctcgagctggatagagattgtacatatcaagacagttcgacctggagtgttcagagtcttcgggatagtttaggcttacttttgatagttgttaaacgattgattttatagtacaagtattatgcaaacttatgtaacttttaaaacaggatcccagattatgtaaattattatatatatttaagattaaaatttaactatgcgaattttaattattcatgttttttaataaatcttttgatcagtaagagagtgcacaatacttagaaaatacgataatgtgcctaatctagtagg

SEQ ID NO: 221273 - DNA, 1308 bp, Cannabis indica
acagttaagctttatcaagtccagtggtaaggggggccttaccaggcgctcatctgacgcggaggcacgtctggaaagaaaaggtatgataaattgcaaagagcgaacattgttaatacatttaaatacatcaatcagaccattattatggaccttatcattacgtaacctccagatagcatccaccgtaagtgatgcatataggaagatctcatccgcattgatgcctttatttttaagatactttaccgtatttaagtgactctattggtcaaaccgtcgcattctatcgttaccagacataaaacatgaaaatcataaaatttcatatacagtatatatataatacatcttgaatttgaatatatctccgtaattgagaatatattttcctaagacctatttttgacaataatcctaatttctactaaaaagtacataatcatacattaatatttaaattattaattatctgctaattaaaggctctggatttgaccttgcgacagtctctgttgaagctgtgtgcttcttggtttgcttggaggaaccggaggggctacacaagacatcttcaaagtccagatccatatttgtgagacaaaagatgaaataccaaacacttgtacaattaaaataggaaaaaggtggtgagatgatctcccactaaacaatattaccagaatcatcagatgaggaagaagagctatataaattactaaatttcctagagccagtaatcatgaaaagatcaaagaattgagtggagacaagtcccaatctgaacttccagccctatcaaaattggtaccgtattggctagcgatcctatagtaagaactattatagctcaacttgacgtgatgtttaggtaccaactatcaaacctaatgacgatgaggtctacataggtctagatatagaagttatattagctatctttaaattgaactaatgttgttcgttcagtcctaagaacagttggggaccatccacaagcaccaaaattattacatcaggacgcatcatcttcaacttcccaagggtcacgttccttagatagaggctgcgagccacataatccctatcctccttgtcagcaagaactagaacttgttgctagtctaaaaatttggggatcttaaaattatttgtagatttttctttgccaagaagggcacaagcctttaggttgttctcatgcaataagaagtcaggtgctcatacctgtagggaaggccaaggagaatcttgtgccttttctcgatctcaagagttgcgacgagtctcttggtgatcactgttaat

SEQ ID NO: 221274 - DNA, 1713 bp, Cannabis indica
ttttcgtacaacatattaatttgattttagaggtttactagaattagttgagtcgaggggttagtttgtcaattactttgacttgagggggcttagtattaaaaggtcataattctcttgctctttattatatataagataataagataattatattacttttagcttatggctgcgttaacgtatctatatttatatttatataaataaaataattgttttttttatttggtttttactgagtgtatgtttgtgacaaaatggtttggttgaaattttgccacaaattaattaatggtatgatgtgttggctgaaagagaaagttattggtttgacgtttgaccaaacgagacttcttcagtcttgtcataatttgaataattcttttaactcccaagagatcgggccaagatttgtaccggtcaatttagttggttcagtttcctctacaactatattatttggattttgttgaatggttaattttaagcagttgaaattaaaattttgaattagacaagatgagggtacttcaactcacaagtatatggacttcaaccttagcttagccaccactataataagcccactagaaatttttatagtgctctttatggtgataataataaattatacattgtatgcatgtccattaataaaaacgtgggtcataaatctttaaccttagcccagccatctgagtttcacctagggtagctactagctagcagatcaattacaagaactgaatgcaaattttataggttagggtcaagaaaatacatgttagttgaaattaggtcaaaattgaatgatacaattattatttggatggggttaattaagatattaacgcatgtaatacaaaaacgacacgaattaacccgtttatatccagtatgttataaaaattattaaattataattaaattgttattattttcttagaaaaatatataaattaccaataaaattcttacaagaatataagatagataattgaatttttttttgatgataactacttgatattaagaatcttatttattgtattaataattttgtaataaattactttttataaaattttaaatatgcgatactaatcatatttgtaaacataagtatatagtcgacacgaaaacacaacaggtcagattagagttgagatttcttgacacaaaatatatatgaatcgaattagaattgatcaactaaacatgtcaatctgcataacatgaacacaaatataatacgacaacacgaattgtcacccctaatttcaccaaggtttgttgaatatgaatgttctccatactataagaattaagtggcgcttgattggtaaaattgaaaaaaaaaaataataagaatagaaataagaataataatagaattaaagttaaaacacataaataaaaaaagatttattaaatgttttctctattttatattgaaaaagccttttctcttcatttttaaaaattaaaatagtcattctacaaataaagtttattccttgctaaactttttttttttttttgtaaaatactaaacttaagacttaattatctgtatctctcttattcattcctccttattcctgtatcttcttcaagctttttatgggggccattacaaaaaccgacaatttttaagcattccacaaaacataatagaaaaagttttaaaaagaacatttcattaccatt

SEQ ID NO: 221275 - DNA, 3006 bp, Cannabis indica
gctggacgttcgtacgccgtggaggggggctggagatttggtgctgcgcggtggagagggggctggggcttcggtcgtacgaggtggagaggggtcgggtctgctcatccgtgcgtttgggcgaaatttggtttgagagaataggggacgaagagagagagagagtgacttttcaaatgaggggggtaaaattgggttttagtaaaatgtatcccactttacaaattatgtctactattgtattaggtatccaattttattatttattaagtatacaatttcaaatttcccttacaattaaagaacacgaataatgagcataaaagtataggtcgaagatgcctacaaaaattttcgataagaaatgttacgcaaaatatctaaaattgtattatttttttcttttacaaatttattttatataaaaagtaattttgtaaatttataagctttttacttttattatgtttttaaaaaataatcgctcgtatttttataaatattttattatttttgagtatttatgaaaataaataatccacttcaactcgtaagaagacctcactttggtccctcaaacttgagaaatattcaaatcaaacaatttaaagacattaattgcagtaatttgttaagaaaaccctcttaaaaaaaggtaccctatgataattatttgaaaaaaaaaataagaagatacaaagaaaataagaaaagactaggatttcatttaactgcaagatcaaaaagtattgaaatacaattaataaaaataccttatgtatgttagttccctaaataattattttacactctccctcaaattcatgatgctgctgcaagcgtcgataatttgcttaaaagaaaacaaaaacaagaaatcctatgtgacttagtaaaaaagtcagcaagctgcaacaaggaaggaataaaaggcaaagtaatggtgtccacttttagatggtgatgagtacaatggcaatcaatctcaatatgcttggtgtgttcgtgaaaaactgaattgtgagcaatctgaatggtacgttggttgtcacaatacatatgagtaggataagagtgaatgacacccatatctacaagtaaccatctcaaccaaacagttagtagtagacgctatggcacgatactcagcttccgtagaagattgagaaacaatggaatatttattgctcttccaataaataagggaatctcccaagaagatacaaaaactagtgatagatggtaccccgaagataccgtagaatgcgaagaacagcaacccaaagaatagtagtaggagaagtaacaaactgactaacaatatgaacaacatatgcaatgtctggatgagtaatagtgagataaaccaaactgccaacgatggtgcaatacaaagtaggatcttcaaaaggagagccatcagaaggagaatactaaacattcaactcagagggagtgtcaacaactctagtatcagtaagatgagcacactcaataatgtcagtagtgtacttagactaagaaagaggataatcttttggagaaaaggcaacttcaatacccaaaaaatagcgcagagaacccaaatatttcatctcaaattgagaagctaattctaactttaacactccaattccttgtaaattatctcctgcaataatcatatcatcgacatataaagaaagcagaatacgacatgtagatgtgaattttacaaataaacttgaatcatgatcacttgagataaaactaagagataaaataacagtacataacttctgaaaccatgcccaatgggcctgtttaagatcatacaaggtcttttttagcttgcaaacctcttcttgcttatgagaaacaccaggaggagaaaccatgtagaccttctcatgtaagtcaccattcaaaaaggcattcttaacatccatttgagatatagtccattggcgaatggatgccattgctataagagtgtgaaaagtagtcatttttgcaacaggagcaaaagtttcctcaaagtccataccatattgttgtgaaaaacccttagccactaatcgagccttgcaccgttccatggacccatcaacatgtttaccaggaggcaaaagtaccaaatcccaagtatgagtcttttgcaaagcctagagttcctcattcgtagcacgctgccaaagaggattaataactgcctctctataggacaaaggctcataaggacaatgaatagatgccaaaaaacaaagtaaaagaagcaaaataagaagagtatgtaaaatttggttggcgagtagacttacaaatgcgcgaggatagcgacaaggagggtccataggctcaggaggatatgtaataactgcaagaggagggggaggagtgtttttaggttgtgaagtaccaatatctaatgtaggaacgatttcaggttgtaaagtgctagtatctaattcttgagacctatcaacaagatgttgcgaaagtaatgaagaggaaaaggaactgtagaattagtggatgatttagactcagactcagagaatgagtcaatgtgaataagatctaattttgtcaaattatgagaattaccaggaatagaaaagaaaggtatatgcttaagaaaaataacatgatgagatacatacaatttttgagaaactggatcaaaataacgataaccatttttcccttccccataattgagaaacacacaaagaacagagtgtgatgacaactttgtacgctctacactaggacgaagtacaaaacaagtagaactaaagattcttaaagaagaatagtcaagaatacaaaaatatagtttttcaaaaggagacaaacccaaaatgacagaagacggaatcatattaattaggtgaactgcagtaaaaacagccttcccccaaaactgactaggaacagaagatgacaacaaaacagaacgagcaattttaataatgtgtctatgatttttttcagccacaccattttgtttaggcgtatctatac

SEQ ID NO: 221276 - DNA, 2587 bp, Cannabis indica
aaacaagaaacagaggaatatatggaaagaatgaagattgttaattttcttaattgattgatacaatatcgtatattatggtacatatataatacaaaaggaataaaaatatctgtaacagaaaagattctcttgcaatatgattgactccctaaagattagaaattacagaattctagataattgtagaatgtaggaggacaggtgtgaatgtgggaaataattaagtgtgcactgctccactatttttgacaggatccctcaagcttggcgtggctggagagattacaacaagcttgtttttcaaatagttgaattggctgattgaggtggccttagtgaatacatctcctctctgttcagatgttagagtaaaacgtacttcgatcagccctcgattgatcatgtctctgatgtaatgaacattaacttctatgtgttttgtcttgctgtgaaagaccggatttgaggatagttgttttgctccaacattatcacaccagattacagcaggagttttgtgaaacaggttgagttctgcaaacaatgagtgtagccaagaaatttctgtggcagcctgaaataaggcgcggtactccgcttctgtagaggaccttgcaacaaccttttgttttttggagcaccatgtgatcaagttaccacctagatatacacagtaactggtagtagatttcctattgtcgatggagccaacctaatcagcgtcactaaaacattcaatggaccactggtgagatggtttaaagatgaggcctcggctgattgtgccctttaggtatcgtaatagccttttccaaatgttccagtgacgttgagttgatttgtgcataaactgacttaatttgttgactgtgaacgcaatatcgggtcggctaagagtgagatattataggccaccaataacacttctataaacaatgattgatcaaatggtttgctatcatcaatgcttaacttgacaccttgagagattggtgttgggcttggcttggagtgcagcatgttggttcttttgagtaaatcagtcgtgtactttgcttgagagagatggattccataggcccccgagtgatttcaaaacttagaaaatagttaatcgaactgagagttttgagtgaaaagaactgctgaagctgatgtatgattgcatgaacattaccagcatgactaccagtgagaaggatgtcgtcgacatagaccaataggtatagttcaacccttgacttgcggtagtagaagagagaaggatcagagattgagtgttgaaaccaagggtgagtagtacctgtgttagacggtcaaactaggcacgcggagcttgacggaggccgtaaagggccttgtttaacttgcagacatagttatgatgggcagagtcaatgtagccaattggttgtgacacatagacagtttcagataggttgccattaagaaaagcattgtcgatgtcgacttgttggatgtcccacttgttggttgcggtaagagtgaggataacatggatagtggagcttttgacaacgggactaaacgtctcgaaaaagtcgatcctgggttgttgttggaatcccttagccacgagacgcgctttcaagcactgaaccgtgccatccgcattcaatttaatgcggaagagccaccgattatcgatgacactcatgtcgggagtccgaggaacaagagtccaggagttgttccgtttaatggcaaagtattcggtgtccattgcacccttccaccgtggatttttcaatgcagcagccacattatctagttaaaattcagtcaagaaggcaagaggtgaaagggaaaaggcagtgaacacacgaggtttgtgaatgtcggctttggcccgtgtgatcatgggatgggagggttgtggttgtgcttgtatatgtggagttgggcgggttggaagaggggatgatatactggtggaggagtgtgatgtagtgggtgagatagggagataaatatgaagcaaaacagtggggtaggattgggtgggtcgtggtgtaaaaggacttgttggacttgaagtgggatgtggtgtagtcggcatggattggtgtgatgtagtcaatggattcaatggactcacttcttgagttggagagcaagaggttgtatcaatgtttactccaggtgcatgttctggtgtcacagtaggaaaatagggtaaccattgtgggtattagctgggagttagtgtagaattggtgtgtgctgatggataggtaaaaccgtgagcaaatggaaactcattttcatcaaaggagacactactagcaatatagacacgacccgaactatggagacacaagtagcctttgtgttgaggactatatcctatgaacacacattttgcggatcgaaattgtaacttgttagagttgtattgccgaagataaggataacaagcacatccaaaaacttttagaaacttgagatttggtgttaggttaaagagtttttgaataggacatttgtagtgtaggaccggggtggctaagtgatttatgaggaatgtggcagtttgaaatgcctcccaccagaatctttgtgg

SEQ ID NO: 221277 - DNA, 2563 bp, Cannabis indica
agaaactaattttaaatgaatgaaatttattatttttaaccatatataaacaaaatcctctctctaatttgccataaacttaatttatttttttaaatatattgatatgaagaagtaaaacatacataaatacgatcattaactatatcttaactatcacaacaacaataattaattattattattattattattaaatgaaaataaaaaaaattcaaaataataaaaaataatttttaatattaatatttattatctccgtatctgtatattgtgtgtgctaaaggattgtcctctctgatcaaacactatgaagccaaccgtctacttacggggtgcaaggtggctaggagtgcgcctcctatctctcacttactatttgcggatgatagttatgtgtattgccaagcaacagaggaagaagcaactcgtgtcctctcgctattacatacttttgaagaagcttcaggccaaaaagtgaatctcaatagatcctcggcatttttcagctctaacacccgaagagacattaggagtcggatatgcggtttgatgaatatacaagaagcaggggctgataacatgtacctgggcctcccgagtattgttggccgtaataaaaatgctgtgttgggcttcctgaaggagaaaatgaggacaagaatcaatggatgggagggtaaattcctctcgcgagccggaaaagaagtgcttattaagtctgtggttcaatcgcttccgtcttatgctatgagtgtcttccttttacccattggtacttgcaaagaaatagagcgaatgatggcgagtttctggtggaaatccaataactctaatggtaacgggagcggtatagtttggatgaactgggataggatgactaaacacaaagcggaaggcggtatggggtttcgcaatctgagagatttcaatcttgcaatgttgggaaaacaaggatggagacttcttcttagacatgattccctagctagcaaagtcttcaaagctagatattatcccaatggtacatacttgactgctgaactgggttctaatccgagtttcatctggagtagcatttttgctgctaaggacacagtcaaacttggtcttaggaaacaaattgggactggcttgaccgtgcagattacatcagatccatggttacctgtcatggataaacctactccttctccgattgttcctgggcttgaaaactttactgtcaatagcttgtttcaaataggacagcgaagttgggatccggatgttgtgtgtgatttattttcgcctactgaagctgcaattattcttggtattcccatctctcagtcaggtgggggcgatacttggtactggatcgcagagaaaaatggtttttactctattcgtagtgcatataggatgctacaagaccaaaaacctcatttggacaaccccgagggtcatttgttttggaagaaactttgggctttgaaggtaccacctaagactaaggacctggtgtggagagcagcttcaagttgccttgcaacaaaggtgaatttttgtattaaaaaggttttgaatgataacacttgtcctatgtgtggtgtcttcgtggaaacggaattgcatcttttagtttcttgtccatttgcttggtcttgttgggagttttcgggccttactgttgctggcagggagtcacgaactttactgtcatggctggaatcctctactaccagtgtgaacagcgaggtgttatgcaaaattgtgatgatttgctgggccatttggtcagcaagaaatgatctcatatggcagcagcgtgtccgaacagttcgggatgtggttgtctttgtcgctattctccggcaaacaaaacttcctcataaatttcccaactctcctttccatcctcaaatacttaactccatcaccaccaccaccattctcatcctccggcctccgtcgttctctggcaaccaccaaaacaccgccgtcctccacctgaactttgatctgagaaggcttaattccgggcatgtccaccacaatagcgtaggcgtcagcgtactcgatcacgtcggccggggtggccgccatggccttggcatctctcacataagctctggttgggttgttgttttgaaactttccggcaccggcaccggcgccgggtccggtgacggcggcggaagagtggtggtcggaattttctgggaattctaagatgttttctaggattgagaagaggggttgggaaattaatctgatgttgttgttgtttgtgaaatccattgaagaacaaagattgaaactttgtgtgtttgagatctttctgagtgttatgggtttgatattagttgaatcactgagaatggtatatatatatatttgtatatataggaatgggaagagagtgttctggagattagtagagtgatcaggtgaacacagaatggttttgtctatagactctagaatggtgaagaacatagttgaaagttcctaagggaaattattattttgcccatttaatttgtctgtatttttctttacgagaaaaaaatttacaaaa

SEQ ID NO: 221278 - DNA, 1871 bp, Cannabis indica
aaaagttgtcactaaaaataacaattttttgtagtggctctttggggttgtcgtgcaaacacagaagtgtggaaaaaattgtgagctatgggaggacataaaaaagttcaaaacatctgacatataataacatacttggataatttggttaaggtatggtctgctgaaatgtttgagttttttgtgcttttttcttgggaatctttggtctattagaaataattttctacacgggggagttgcgcctaacgcaattgatattttggaatggtgtgggaagtatgttgctgaactaagagaggctaatccacgcaagaagcttaaacaccagcgggaattagctagatggcagctgcctcccgaaggccattgtaccataaatgtcgatgctggagtaagcaatgccgaaggactttcaagtgtggggctggtcatctgaaatgagtatggtagtgttgtttatgctgctgccaaagtgaagtatcaggccagttctccacttttagccgagcttcgggctatccgagatggaattaaagtcgggctacaacgccagttagggaggtttatcataaagttagattgccaagaagctatacaattgatccgaggacagctgtagagatgaagatgagatattgcaacagattagaactatagattcaaactttatttctaggcttacttttgtgtatagagaggtaaatcaggtggctcatgtttagccaattatgttttgaaattcaaagttagagctatgtaaattgggattgtaccctcttgtgctcgtcgtgcgattattaattgaattaatgaattctctttcaaaaaaaatccattatactaatttgatttacttattaaaaaaaatgactgttttacaaaaaaaaaaatagtgtcacactacttctttgttttcatatagtgcatatataaatatataattaaatatacagaattatttcctaatatgggttttcatcatattttaatttggtatttgcgttctaaaaccagacacgacagcaagtcaaactcagcatatacttcattggacctcactatattggatcatagtaattattaaattagtttttctttttcaaaaaaaatatattaaaatcatgacagtttatgtaactagtttatataaacttttggaagacaaaaggttgagtcataccgaaatttttttattaaaaagaactatttttagtattgaagctagaaaaaagtttaaatccatatccttaagaattaaatgaaaagaaaaaacaattcacattgttaactgttagtcgatctatataatatgtacaaattatatgaatatgataacgaaagtggtaatctcaatatttatttctattttctctataaactataattattggaagattggatttttttttttttttttattaaatcaacaagtttattattaatccacaacactttgtacaatcatttacaataaagatcatcatgttaaagacctcatgaacaatatctctcttttcctttcttttcttttttttctacaaagaatgaaaccaatctctagcttgttggccaattttttttggccaaaacaattatatcctatgtttaacactatttttgattctttgtacaattgcctctttactttctaagtgactatttcaaatttggtcatttctacatgctaaatggagtaaaccaaattcgcaacagctgctgctataatattccttctaaacttactgatttttgttttatgtatccacttgagtagttgagagaggttgttggttcatgctctccatgtcaaccatccttttacctatattcagtaaagggatagctaaaaataagtgctcatgtgtctc

SEQ ID NO: 221279 - DNA, 2599 bp, Cannabis indica
gttctgctactgggtgcgccagtgcatctcgacgacaacctttaacttgcatcttaaggggggaaaagtttgcagcttaatgctagtgtgtgggttaagacagggggatcccctttccccgtatctttttatttgggctgcaaaaatcctctcccgccttctggaaagagctttagactcgggtaacctaaggggaattaagctgagtagaaatgggccgagactctctcacgtattctttgccgatgatctcattcttgtgggtagggcaaccattgccgaagccaagggcttctggcagtgcttggaaaagttctgtgagtggtcaggacaacgtgtcaataagcttaagacctcaatttttttcagtaaaaacaccagtgaaggtatgagaagagggatcatgcatgaactgggcataagcatggccgaatcaaacatcaattatctaggcctcccgttgtttagatccaggcaaaaaaatgccgattttaatttcattattgagaaccttgtctcgaagcttcatggatggaaattgaaacccctatctaagtctgggcgtgctacgttgatcaaatctgtaggaatggccttaccaatttacacgatgcaaactaccaagctttctaagaagctggcctcgagaattgatggtatgtttagagatttttggtggggatgcgagcaaggtaatcgaggtctttgcctgaaggcgtgggaccgtttgtgtcttccaaagtctagaggtggcctgggtttccgtaaaattttggagatgaaccaggcactcctagcaaagtgtggttgggacctcttgaatgacaagcaatcgctttgctgtggagtgctgaaggccaaatatctgaaaggaaaaccgttccttgagggggcctataagggctctgattcttggttttggaaaaatgtggtgagatgcaaagacgtattgttgaaaggagcgtgcaaactaatcactgacgggaaggattctaatgtctggttagagtcttgggtgctgcatagcaagaatttctacgccaaacctagtgtttcatcctcgggaagtgtgactaaggtcgctgaacttattacggaggatggggagtgggatattcctaaaatccagactcattttgattcgaaaacagtgcgtgatatcaaaggaggtacacctggtggagtaggtggggaccggtgggtatggactaaggagtagaattggatcttctcgactaaatcggcttacttggttcaggccttaggtagagctcctgactatgtcgttgcgctaggcctttggaataaactctggagttccaagatcctggagcggcataaggtcatgtggtggagcatcttgtcaaatgctctccccattaggggtctcctggtgaaaagaatcaacatagacgagctatcgtgtcccctttgtggggtagatgaggaatctatggagcatctgtttctccattgtgattttgcgtaccatctgtggagagcttccccgtggggaatatttccggtccccgactctcggggcagggtctgggattgggtaacatttatttggaacctgaagacgaaaggggtagatacggacaagctgtttctttatgcctcgatcgttgtggatactatatggagaactcgaaatgagaaagttcataacttttctccgtgtaacattaaaactgctattgactccatctctaattgttttacagattatgctacctgcttgctttccctgacagtcgcggtgactcctcatggctggtcgacccatcctgaaggttggatcaaaattaaatgtgatgtgaaggttgggggtgagtccatgtgcatagttgctttggctagggatcatttgggaacggttttgtggggtgtggccaacttcctcaacttcactgatcctttgattggcgaggtggcggcgtgtcagcttgctctgaaaactgctcctttcaggtggttataaacgctattaaaggtgtccaatccaattggaagattgttaactatttgtctacttgtaatcaactctctaagaagtttttatctttaatttttcttttatttctagaagttgtaactttgcggctcataatgtcgctagatgggcttatgctcagaatatctcgggtattgtagaaccctctgctatacctaacactatcctgtgtaatgaccgtaaggtctaagtttatggttttcaatcaacgttttctttttacaaaaaaaaaaaaaataacagtagaacaactaaaaaataacagtgaaaatttaacacagtacacagcataaaaacttacaaagtatttttgaaaaaaaattcgcctcacaagataaaagtaaattatcccgtaaatgaatgagctagacaaaaatttagtgaataaataataaaattgcaagctaaaattttaccatccaatgctttactgttaatttatttgcctaaaaattttaccattatcgatgcaatcacatctttcattaaaatttcaagtaacattttgatttcttaaaatactaaagcatattcttggtaagattgttaccaggattaggtgtgccattttttttttttttt

SEQ ID NO: 221280 - DNA, 3470 bp, Cannabis indica
tttttttttctatacatttaagaaaaacaagaaatggggtttttccatttttcttttttaagaagtttaattctcaagatttttaatatgtttgtgaaaatgcaataaaatcagttaattcattttatttgtaacataataagtctaattagtttttactgtgttttacaatgtagatagagagttagagctgaaccaattgttagatcatattgtattgtattaaattatgttaagcatatcatatttttatttatgtaatattatgttatatgcatatacaataacaaatataatagtatataaaaatatcatatataatacaattcaataatataataatatacaatataatacggtgtagcagaacagatcttaaagaatagtctcaattcaaattcattagtacagattgtgacaatgtttaaactagattgtatgatcaaattattcattaattattttcttgaatgtttctattaggcttagtttctataagtttacaccaatgtgtttgaatagaaaaaactaaactttttagttatcttagctaatagttgagacattactcaactgggctttgatcataattttcagttgtgttttgacagttccacagcaagaataagaagtgaagtcctcaccccatttcgctcagttcgaatgttcttctacatagctttcatggccagtgctggtctaggaggactcatagcgacaacccagttgataggcgcgttaacaaacccttctagagcagcagaagtgaccgaaatctcaaagggtctggccatagatttgggagcagtactagtctttgctttcctttattcaagagaaaacaatgccaaaaatctacagttggctaggctgtcccgagaggaaagcctttctaatctgaaactgagagtggacgagaaaagagtgattcctctaagctcattgagaggcattgctaggcttgtgatatgtgctggacccgagtcttatctcactgagtcttttagactgagccagcctttcaccgaagggcttttggaacgtggagtgctcgttgtgccattttgtagcgacgggaatgtgcctagttttgagtttgaagagagcaatgaaaatgaagttactattcctaacaggaagaggctatggcagctgagaacttttgatgtgtctgcatggtctgagtaagtaaaaaagtaatcgattttgctgttgttgatttttgtttgttgctctcattttgttttgtttttctttctattttgttatgtgtattgttaggtggttagatgagcagaagaagatggctaatgtctcccctgactcccctgtgtaagtgtttgtttgttttttcattttttcgaaataacttaaacccgaaatgaacaacagaatttatagaggttcggccaagaagggcctaagctgtctttgaacttccatttaatggttacattatgtttggtagaaaaggaaaaaaaatggagggaaagaaaatttctaagagggaaaagaaagttcttcaatttttctatgatttttgtgagtaagaatatattagtaatttagtcttctcattaatttgaaaaagatttcctttcatttttattatgattttggtgagatttagtaaattttttccattctcttttctctcataccaaacatccattttctttgtttttcctttctcttcacttttctctccaaaagtttctttcctctcactttttccactttaccaaacaatgatgaattgagcagttcaaacaatggagtctctctcactcaagttcttggagctttctctttctttgagtgactaaagatattacaacacattctaactatattaacaataaaagtagaacaattaagttagtttattccagtaattaacacttttcaacacataggaactgatcatcatagttttccctttctttctttctgtcttttgggatttctacaggtacttatctctacgactagacggtcgagttcgtgggagtggcgtcggttacccaccttggaatgcttttgtagcacagttacctccagtgaaaggattatggtcaggtctccttgatggaatggatggaagagtcctttgacaaaaaatatgttcttattctttttggtgtttacacaggttagttctctatgcttttcgattaagttaaaccatgtaatcattggttgggggaacaccctttatagcagattctctcctattatcttcttcaatttctgttttgataatttgtgcagaatattcaagcaaagcagagatttttggctcacatacacacctttatgtatacatggttttcaccaatttggccaataagagggctcttattatccatccttacatttgattctacacaccttgacaagttactgttattcagcttcatagtcaatacaatttcaatatagataaatacagcttactaatctggtttggtgtacaatgtatctctagcagcataaacctcaagaaagataaaatcatttttgtatgttttgttaatataaatctgagtaaatatcattttggacgttgtgttaccgatcgaatcctcaattttttttaacttaaaagaaatgcaaacaacctggtcataacacctcctactcataacattttaagcccaggtttcgaagtaataatatgtttcattatttaataaaacaaagagtccaatcataatttttgatatacaattgccttcttcaatggattagatacatgtttttcaaactaatgcatcagagtaatacatagcagaagaagaagctgttatgttgccctttttacttggttttgaagaaagtgctataaattagagtttcttcacttgtgttaaaatatagattttgtatagtttttacaatcaataaaattaagctaagactctcctgaattggatggtaagaaatattctcattaacttgggagaaagagaagaagaagaaacaaatcacagtatgatacacattccttagaggaagaagaaaaaagactagaaaatatagagcaaagagagaagtgagaattacaataatgataataataacaatttacattggaaaaacactaaaatcatttaacttcttcaatctcatccaatgcatagttatttgtagatacactggcatagttaaccttgctgaatcgaacaacaactgggtaacgtgtctttgggtcctgtttattttgtcaaacaaacataacacaatttcattaacttcataattaatataatgaaacacttaatttattcagttaagataaaactgtgtgagctaacctggtcaacagctacaacattcccaacatccttgtaccagtaggattcccttctaagaatcctaacctgtgtatacacataaatcaaaccattaaaaagaaagcttcaaatgaattatgaactgcccatttcaatgaactgggatttctctca

SEQ ID NO: 221281 - DNA, 1739 bp, Cannabis indica
caaaccgtaaatttgaaaaaataatttaaaaaatagcatataaagtaattccccttaatttttccactatcataaaggtaatatttttatcctatataattgataatgttgaaaattcaatcaactccaatctcaactttgtgcatacacactcataatatagtgcaacaaatacacggataaactataaataaataaaaatcaaaattaagtaaagaataacaccaaaattaaatttacactactacaaaaaatattattcttttcagtcctcaaatcggttttttttttcgaaaaatgttgttaataaaagtgagtgtttaaaaccgatgcctataataaaaaatacttgtcggttttaaaaagtccttacgcattggcatcaatttaaaatagttattgggttaaaattgaaacgatatgtttaaagagcaatatagtcattagttttgaatcctctagtatactactatatacactcgatggtttaaaaccgttgactatagtagagttatattaaaacccccaaatctcaaattagatattaatttcttctttaaccttgatccatctttctctgtaggcaattttcgccacatcaacgaccaccacaaccacctcgatcatcctccctcctgtgtcttgtcactctctccctcttgtcgaagaccacccacaaccacctcgtctccctctctctctcgtcttgctctcgaccctctcgtcttgtctctctccctctccatcatcgaggcccacggcagtctcgaactcaaaggaacatcgagcgctacaactccgtccatccttcacacccccaccggagaggaatatatatttatttattaatttgtaaatatatattttttaaaattttaatatatatttatagaaatttaagtgtctacatatttttatgtgtattttattttttaaatttagggaaataaatgatttatttaatttgtaagtaaaaaataattccttgtaattgtgtatgttctttttaggtttaggtaaataatttaggataatgtttcactatatgtagagttattttttttttaatatatgtcattattttattgtatgttcattaaatattatttcttatttatttttctttcatatataattatttgttaaaaacactattattctctttaaacaaaaaagaaaaatagaagttattaagaatgtgttagtttttacatatataattattttttctccctcctcttttttctctaaaagttcttaaaaatttcttatcaaagaacctaaactatatacaaccaaaactaacaactttgatattttttcttttaaaagaaaaatagaggttactaaaaatgtgttagttaagtcggttaggttagttaaattagtttagtgagttagtctttctctccatgcctatatatacatctattcctctcctccctttccaatgtaacaaacacttgatattcattttttcttttcaatgaaaattactctgtttcttggtcactaatgtggtatcagacgattcctccttcttcaaccttcaagaattcaattgaagcatcttttatcttcaacaatggtgcgtacacgagctaccacctcagctacttccactgcacaaaatcctccagtggtcgatgctgcaatcgctccacaaccacaaaatgaatccgctgacgatttacaaccagaaatagatcatattcctgctcctcaacccaatccagtcg

SEQ ID NO: 221282 - DNA, 2253 bp, Cannabis indica
ataaaaacctaataattttttttattttgaacccccggaaagtgtgggccctaggcacgggcctagctcgcctatgtctagggctggccctgtatataacattggccaaatttcatatcgaataagtatcttttttttatttattcttttatcaaatataattaatgccaaccctataattaatcactatttgtattttatttatatatttagtagaatttttatgtactttcaataaaaatttaatattttttttgattttttatacatttctattaattaaaggtaaatttttatccctaatagattagagcatggttgtaaaatttgagtcaaatatatattgactcattttctcagcaaaatttaattcaaattatacatcgcattgaatattgtctaagagctaatttgagaagagttgagaatattagggtatcttttaattatgcccagactaagcatgactcatgagtgctctttattgttgtgaggtatagtatttttgttggtataatttaatattaggtctcacttattttacgttacagtatttttataaaataccaaggttcttagtacctctatgacatggcgtttaattatttgttagtggttccttataacatttattaaattaaaataagttaaacccaatattaaattgtaccaataaagattctaggcattaaaagtaccttttagtatttttctttattttaataaaaattacaaaaattactaaataattattagacatcgcgccataatggtactaggaacttagagcgagatgcaaatataaaatattgctcattttgttaagagtctattccaatagtatgctaaattctgatgtaaaaatttcaaataatcaaaattgatctgaatttgcatcacaatataacacgatgcaaaatttgtatcacaataaattatatgtttttatcattatgtcatctttaatattttttattaaattttagctaacatattaaatgacttgcattattattattattttattattaaatgttatattttacattaaactttgtattattattattgttattttatattgttttaataaattattaagtaagtattaaataaattgctaaagagatacttgtgtcaaaagatagttaatcttttcctctaaccagaaaatatcaaaagttatttttaattagtaaaaaaaacatactgaattacattactaaagtactatatgtattgtatacatatattggtcttgtcttttgacatggtacgatattctctctaaaagttcatgtttggtcttatacgtggggtatactttgtccttatttgtcatggagcctggtaatcaatctgagcctaccattgaagagcagtatgcgaatgttcgaatagaagatgaggaagaagatagcctgatttatgtgggagacgctgatgatttgacggaaattgatgatagatggtgtctagtgggtcgcttcttgactaatagaggtgtggattttcaagcaatgcagaacaagatggcaacgctatggcaaccgggaaggggtatgtatgttaaggaacttgatagtaatctattcctattccagttttaccatgaagtcgatatcgatcgagtgatcgaagggagtccatggacatttgatcgggtgccgttgatatttgaacgattgaaacaaggtgaggacccaagaatgatcacgttgaacaagttggacttttgggtgcaaatacacaacttaacaactggttttatgttggaacgggtggtgcgcgacctaggcaactatgtgggtacattcatcaaaactgatccgaataacttcatcggagtttggcgcgactatcttcgggttcgtgtcaagatcaatattgagtgcccgttaaaacgcaggaagaaggttgagaaacaaggaggggttcactgttatgcgaactttaaatatgagggcctatccacattctgttttatttgtggcatccttgggcattcggagagattttgtgaacagcttttccataccccactcgatcagatacagaagccatacacactggaattgaaagctactcctcgacggaagaactacgcaatcggggagagatggttaaggtccgaagctgcttctagagccggcggaatggcgttttccgagcaagctacgactggcgagagatctacgcccatcaatggcaatcagaccaacaacaatcctgggaggcaatcacggctgaatc

SEQ ID NO: 221283 - DNA, 1869 bp, Cannabis indica
acatcaccatcaattataataactaattattctatttatcaattaacttttttttcaatgtaaacatatatataattatttattatcatgatgttttgttctattttcttacttgtaatgttgttttaattattttaaattttaagttacattacacttgtaacaatgatatttttacgaagtattatacttaaataaatggtaatattttatttttacatatttttctttatattttaagttaatattaaaacttatgtgtgtaattggatatctaatttaaaaagccaatcaaattcaattaataattgaattaaattggatttgaggtataattgaattggatcgaattatgacttttcaaatataataactaatttaattggatcagatgagtaaaaaaagttgaattagatcggatgcccaaccctaactttggggttggttggatagcacgtcatagtggtggtaatgtagttgaggcccagggccgaccatttatctttatagtaaggatcccaaaaaaaaaatttacctatggtccatttcaactcagggtcgaccctgttgaggccgagtcaaaattgttgcttggttatgttcagccgagtatagctgaagttgtaggtgtcaaagctcatccaactattttttttagccaatttgcttaattaataatatatcaaatctttattaaatatatataggtgattattgaatggtcacgtcaaatatgtaactacgatggttacactaattttgactattggatcattattgaatggttatgaataattaaaaaaataataaaaaataacatattagctgtaacttgaaactaccttttatttataattatgttttgtttccttataaaatactaattaagattatttttttttattaaaggagagattttattaatcaaaacagaataaatgctacaaagaccagcatgtccaaaacaacaaaagatagacttatttacatgttacaaacaaaatcaaaaatctgttggtcccttttagagagattcctcctttcaacaagtaataatcttgctttaagagctactctaatcaaattattcacataagaaaacataaaaatattttgttcaataatataagtattttgatttcaccaaataaaatttattacagctgcacaaactaccacaacaaccctatgaagaagactacgatctcggtgatcattcaaccacagaagcaattttgaatcagccaaataatattactaagccaagaatgaataatatgcatgagttgcttagaaaaagaacaatcaaagaaaatgtgattatcatgatagtcatcaccaatctcataaaaataggcaactagtagaattaatggcatacctcttgccaacaagtgttatgagaggcttgctaacaagtgatctcataaattattattttttgacacatttttttaaaatacaataacaagattttttgtttttttaattgatatgatgtgtagtagtagacattgacacattaattatatattacccattatattatatatcatattttgaaatcgtaagattttattatttctattattaatataactatttatttaagataaattattattttaactatcactaacttaaaaagaaaaaaggaaaaaaattgaaagaataaagttgtaatactaaattctatgaaaaaaaaaataatgtaatagtagaaaaagataaatcaagttgccaaaactaagtaaaaaaaaatcgtaacacaaaaatatattgaggagttgatattgttttcttattgtaattaggttaatattttgttattttttctattaatttgcagttatctttttgttgcttcca

SEQ ID NO: 221284 - DNA, 2477 bp, Cannabis indica
ttagggcacaaaacccagcaataacttcatccaagcttacagttctggccaacccaccggtcaaaccagtcaaacactgaggccacctggtgcttcagtattcaatagattgggtgtagcccatgatctcaggaatgatttgaacagaagaagaggtttggacgaacaatacgttcaactggccactcagctgggtattcacatccaagacccagctctaagagatccttacgtgacacaggtgggtcaggaggctaaactagttcacccatctttgcaagcacggttagatgaactaaaaaatatatttcaaggcctgaccgacccaaaactcattgatctcgagctggaccgagcacgcggatcacccttcacccccgagatcaacgtccttaagctacccttaaagtttaagatgcctacctggaagatgtacaccaggaaagaagatcccttgtcacatcttaaatattttgagatgcaaatggatttgcaaggagtacggggtgatgtgcggtgtatggtattccctgccacactttcagaagtcgcacaacaatggtatttcaagctaccatcaggaagatttaattcatggaaagctttttcctcataattccatgcgcaattctcctcttctcgccaactcccattacatctagaagacttggttgaagtaaaacaaagaccaggagagtccctcagagcctacataagcagttccatgacagaagctacgaaagtagcaagattaactgaagaggggaggttggccgccaactggaggcattgaggtacttggagaactgttgaaatatattaaaaaaagtggccccacggggtctatggcagagtttttggaccaagcagatggatttatcaagctcaaagaggccattcagcgagcagatgttgagcctaaggcgggccaaccacatttccctcagcaggagcacctgctcaaagcccacaatatgctagcagctcaacttcgagcggaaaaacgtctaataacaatggcaggcagggcaacaagaagaagggaaagttcacaggcaaagtcgaacacacccctagagaaaatacctctaaattcactgccttctctgtcctaactgacgacctagagacaatctacatggcaacccagtctatggtcccgtacaaaagacctactccgatgaagaaggacgtaagtaagagagacgcgtccaagttttgccatttccatggagactacggccacgacatgaatgaatgcaacaacctgaagcaagaaattgaattcttaattggaaaaaataacccacacttgtaaaaatacgtcaaggccgatcagaatcaacgggccgcccaaactgacaataatcaagatctactaatgccgccaccaatggatgggcatttacaagtcattattgggggcccacacctagctggagactcgggaaaagcttgagaaaggtatgccccaaccttacagcacgagcaaaaataaagtagttttggccgtagaggagagaagccaaaaatgccacggataggggaacccactataacattcactgaagcagatgatgtccatgctcgcttcccgcacaacgatcccttggttgtggaaatacagatagcaaataaaatagtggcccggaccatgatagataatggagcctttgcaaatatcttgttcaagacaccatatgagaagatgggactccaactcaaagatctgatcccttgtacccaaccagtttatggtttctccggccaaagtgttgcacctttaaggaaaattcgtctacccctcactgttggacaggctccggagagcataactatgatggcacaatttctgataattgatgttccataataagctttcaacgtcatgttaagtcgaccagccttatatgacctgaaagctgtcacatcaataatctattcatgcatcaagttcccaacaaagaatagggtagggtgcctcaaagggaatcaacaaattgcacgagagtgctataacattaccctgaccaaggcaaaaaaggaaaattcctctggccagagttcggacaaggggaaaagtattgcccaataggaagtcacccaaggcgggcatgaggatgtggatccccaacttgggaaccaaatacaaatgttgggccggtgaaagaattggaagagatagaaatcgacccaaatgtccagaccaggaaactcaaaattggcaaatgtttgttgcttgaagtaaaattagctttaataaaaattttaagagcaaacttagacattttttcttggtcacacgaggacatggtcggtatcaatccttctataatatctcacgccctaaacattgatctaaacttatgtcccgttcaacaaaaagaagattattagacaaagaacgagcacaatcattaaaagaagaggtagaaaagctacgtaagaacaagatcatcattgaagctttctatcca

SEQ ID NO: 221285 - DNA, 6097 bp, Cannabis indica
ttgaagcatgtttatgtttttttcgacagtgcaatataaattcaaatattaaatttagttgctttagaataatttataataattacatgtactcataaattttcacaatttattaaatgcctttgtttttcttcttttgtcgttgcatatctatttatttctatttttaagtatttttatttatttttcaatattaataacctttcaaattattttgataataaatcacttaaagaattttaaatataaagatttttattttaaaaattaaattgatttcaaagttagattaaaaaaaatataaacatataaaaaacaaaaaaaattattcgagttaactatattaaataaaaattttcacgatatataatttgaattcaataaaaactctaaataatttacacatacctaagataaatttcaatttaaagtaatgatgatagatttcaatttacagtaatgatgactacaagtgagatacggtgatgataccaactttgaatgtaatggtaattacaagtgaattacagtaataacaacgattttacaattatatgaaagcattctatagatttattttattgtttttcttatagagatctctattttgtgggaaaatttagttttaatattcattttttcactataaatttcatcgaaagctctttgtgtgcttttttgttagataagtatgagtgaaaagagagtatgagagaaaagctttgaaaatgctttattaatctctatagtatatctgatcattacaacataaatgaggaaggtaacatatataggtagggagctaagttagttagtaaaataactaactcggctgctacaacagaaaaataacagaaccagggatggttcaagatgaaagtggtgaggtgttgatcaggggtagtatcataatagcccccttaagctgtagtgtagatgttcgaaatgctcagcttggacacaatgctattgaaggaggaggggagcaaagcttttgtgaatatgtcagccaggttgttttgctaatcgaacgtgaagtagtttgaggatgccttgctggaccttttctctaatgaaatggaagtcgatttcaacatgtttaatgcgctcgtggtagactggtttttactgatgtgaatggctgcagtgttgtcacagtagagagaggcaggtttgttaagtgaaatgccaaagtctttgagtaaggcaaggatccatgtaacttcggaggtggcattggccatggctctgtactcggcttcagctgaagatcgtaaaacaacctcttgtttttttttttaattccaagagactagagcttggccaagaaagacacagtagccagaaatggagcgccttgtgtcttgacatgctccccagtatgtatcagcaaaaaaggagagttgtacatttgtgggagacaagctcgtttctgcatatgctgatatttggggagtagtattggcagggaagaaaagagcctttcttggggtgcattttaagtataggagaacccggtgagtagcctgaacatgtggtactcgaggacatgtgaggaattgacttaggtgattcactacataagtgatatcatgccttgaaatggtgagataaattagtttgccaataaggcttctgtagacaatgggatcgggtaatggttgtcatttatctttgctaagtttgagattaggttcaatttaagttgaagcaagtttagctccaaggtaccttgtatcagttagtaattgcaaagtaaaaggtctttgagatataaatatgcctttctttgatttaccaatttcaagtccaagaaagaacctgagggttcctatgtctttgagtttcaattttttagataaaaattatttgaaataggtgattgtcattccatttgtagctagctatgattatgtcatagacatatattgatatagctagaaatattgtgcttgtgtttttgataaagagagaattgtcatagagagatcgggtgaagccttcatttgtgagtgtggtgctgagttcttcataccactgtctccaggcttgtttaagtccataaattctcttgttgagcttgcatactaagttgggaggtgcattgtatcctgggggtaatttcatgtatacttcttcatggagatcaacatgaggaaatgcattattgatatcaagtcggtgtatattccaattgttcatggctggaagggccagcaatatcttgagtgtattagtcttggctactggtgcataagtgtgcaagtagtcaatcccttgtttctgagtgaagcctttggctacaaggcgagccttgaattgttcaacctccccttattcattgtatttgaccttgtatacccacttgaatccaatggctttatggccaagaggtaattttgttactatccaagttttgttttttttttttcaaggggccgagtttcactatccatagccaggagccaatgcttgaatgtgaggcttcactataggattgaggctggattttggagtaaactgctaacacaacaaccctgaattgggggctgagtttagcataggaaatgaattcctcaattggataggcaatggaatgggtatggcaaacataatcctttaggtgggatggtttggttatttgacggccagtttttgatgtttgtattggggccttggaatgaatggttggtatgggaatgacaccagtgttgtcttggtgagacttactagatgcatctagtgtaggaatggtaccagtattgtttttgtgagattcagtagaagcatcttgtgtgtgaattgcaccagtagcttttgagggtgatttaatatcaatagctagtgcgtgaacttcaataactattttggattgtagttgaattgtggtgtgggaacaacaccagtggtagtaggtgcatttggtgtgaaagcagtgccatctattgttgagtgaggctcaactagagctgctggtgttggttcaggaagtgtgggaagtcgagattgtgttccctgtgtggtgttggtgtgtaaatttgtattaatgtgattgtgggcagatatgcaatgctactggaaaagcacttttatttcattgcttgagccttggccaagaaaaggaaagatatgttcatggaaaattacatctcgtgaatgatatatttgttttgtttcaatatcaagaatggtgtaagccttcatgccatgtggatatccaataaagattgatgcacgacttcttaggggaaaatttatgcctggtagatgtaagtgtagaggcatatgcaagacatccgaagctcctgagatggtcataattaggggggtttaaagtgtagtttttcataagatgtgatgccatgaaatagagcagaaggtgttatattcatgaagtaggtgggagtattaattaggtatgcatgcgcaatagagaagaggtaaatgtaactgaaagcataaggctcttgcaatgttgagtatgttttggtatttttgttcggcaacatagttttgttgtggacactcaacatacaaatgatagtgaattatacccttagaggcatagaatgttgacatggcaagttccttagcattattagatcgaatgactttaattggtgtagagtattgggtgcaaaccatgttgtaaaacacgggaatgacagtgtggacatcagctttagtcttaagtataaatgtccaagtgaatcgagatgcgtcatccccaatagtgagaaaatacatatatccttctatgctagtgacatggaagggtccccaaatgttcaaatggattagagcaaatgtattttcagcaaaattattattggatatgaatggtaattttttttgttttgcaagatggcaaacatgacaatattgatttgcttgaatggaaaaaccagaattgatttttttattgaatgtattagagacatacattgaaggatggccaaggtgtgtatgccattgttctacattattatgtaaagaaaaagaacaactagattaaactatagggctgcactcttgatgtagaacatagagtttctcgagtcttttagctgtcccaatcaccatcctcggagaaagagcctgtattgaacaagaattatgggcaaacacaaccatattagaactgttttcaaggaatacagtgattgaaaagaggtgtatgtgaaatgtgggaacaaataacacattgtgaagagtgatgtgtttgtgtatttggacaattctaatgccttcgacaagtatattaattccattaggtaacacaacgaattgaggaaaagcattgctagagaaagatagaaagcaagatctggtggcacacatgtgatgtatggccccactgtcaatgatccaagtaaaaggctgagaagagaaatgcttaccagccatgttggatgcaactggaatgttgtttgtatcatcacgagaagtggcttggctcaattgctgactgagaagagaattaaggtgttggcactcggcagacaagtctgtatgagttcaagagcgaagaatcacattcgacctggtgctgacttgattagcagctggtttagatttgtctggtttctttttatcatcataccctgaaggaaagtcgtgtataaaataacacttatccacgtaatggctaggtttgccacaattggtacaagagggccttggcttcttggatcttgggggaggattgttggaagatgatcaagctgatgctgccagagatgaaacatctgaagaactaagagtgcgttgcctctcttcttgaacaatcataacaaacacccgtgaaagattagggatgggttcattaaggagaatttgagcacgaatggatgcataggactcattcaagccagtaagaaactgtaagacttgattttgattgtaatattcaaaaaacaatttcatggcaccacaggtgcaagtggtgtttggttggaattcttttagctcatcccagatggatttgagcttggtaaagtatgaggtgacgtactgatcaccttgtcggaaacgtgttaattgtgtttgaagctaaaagattcgaggtccattgccctcattgaatctttcttgcaaatcatgccacatatttgtagcaagatcaaagtgcataatactttgtgctatctcagacaaaacgaaatttcgaagccaagacacgaccatgttattgcaacgaattcaagaatggagaaggggattaccaataataggtcaaggaagagagccatcaatgaacgcgaatttgttctttgcagtaagggcaattgtaattcctcttttccaagattggtaattagctccattaagaacggtggaaaccaagaccaagcgaggatgatccgtgatgctgaggaagaaaggacttgagacatcttcatgaccaatctatcgactggtgatgaacgacgagtctgaacagggggttgaggaatgtcaaaaattggatcagaggacgaatgagctggtgcaagattgtcttgttcattctgaattcgtgttcttggattgggattccatcgaggtgccacagaggtatatacgattggtggtgtggaagtagtatcgggattggattccaattggtggttctcggaggtggatggggaatgccatcctaagaacgagtgatgggtctcgtcattgaaaaagtggcttgaatttcttctgacaccatatgagtgaaaatagagtagtagagaaaagctttgaaaatgctttcttaatctgtatagtatctagtcattacaacataaataaggaaggtaatatgtataggtagggagctgagttagttcggaaaataactaactcggctgctacaacagaaaaataacagaaccaaggatggttcaagatgacagtggtgaggtgctgattgggggtagtatcgtaataataagaaatagtatgatgaatttttagggaaattactcgatatactattttcttaactttttttttcaaatttacggtttgggttgctctagtggtttctatgtaggttgctatacggattttggttgcaatttaggttgctccgttagtttctatgagtgtttttgtgtggaatttt

SEQ ID NO: 221286 - DNA, 1996 bp, Cannabis indica
aaatatctaattttaatttaaattttatctttttttaatatctaaatatataataagataagtttaaatataatatcaaagatttaaaggatattttaaactttaataattttgatacttaaaatatctgatcttataatttatactaaaagataaaaaataaaattaactaaacttaaaatataccatttaaatatcaagttaaaaagatcttaaaatctaaatgatattttattatttaaaaaatcaataaaaaaagttactctgattttacaattttaaacttgaaaaatttattaagaaaagaattttaaaactcaagatatgccaaaatcaattttggctttcaaattgcatgtttggaacaggcacctagtccgtgtttctcggaccctgtccgagaaataggggcgtttgcataatcttgcgcccagcatgcttagcatacatctcctgcactcgcgcgtcccccaagccatggccaagaaatctgggcattccctttctcatccttacgcatcactcggtgtcacccgagtgatactggcagccaagggtgcaatctttcaaactttcataactttcttaatttttatcgaaatcaagttccataaaaagcaaacttccataattttttaaatttttctaaactttcattctgaaataattctaaaataaaattccatgtattttttatagaaaaattcacaataacaatcattcatcaaagcatataagactaacatgaaacatccaaatctcaccaaaaaaaaaagaacatataaaattgtttaaaaaggatctaaggctagttgtgggaaacttattttatcacgaccttatttacttttcatgtatgttaaattatgtttaatcttatatcctaaatatgaatttcttacaacaataatataacacataaatggatgtggaaatccttacaatggctgcaacataaattattgactccttttcaattttctaattcttgttcctttttgtcgcagagtattaccaagaactgaacttggatctttttctccttcgatcgtgttcatcacagtcttccacaaaggcctgagtatcacaccagatattttacatgattttaagttaaaatctacatactccacgagtctgtattattagggatatttatttgaatacagagaataattctcaataatgataaataatagaattctctctcaatattgccatcccttttcccatagattttgtccctatttataggtgtatatgttgacatttatttttattaggatctatttactcacaactgcttatgaaacgtgacattccccatgtttcatttatatacacatgtgataatatctaataactacccaaatttttcttatttttatcctttaaaatgttatgctgactaagaaggtcgtttctcgcggaatgtaagttatccttcttatctgtcttttgaggaaaaaatgctaagtatagttattcttcttattgcaatgttcttcatattataaagttatttgcgaggtggcgttgagagcgagatggatgaacgtaatcttctccatgtacaattgcgtgagtcaatgagttgcaagcttttattcccaagtatgtgggtcaataacctgcaagattcttgatgcctcgttttgtacattcttattatatactttgtttatcccgaggtgcacatattgtctcgtcaattaaattagtgaatagttattattcttattttgcatatgcctatgtagttagcgagtttgaatatttctatcaacatataattaatattgaaatgagttgtattaaattgtatttaataatgtaatttaattattatattctttgagctgattcatattccttttgtaggacagctgtcagcttatgattaatagcagaatttagggtacaacaactctgatatggaccataagaccatctctaatgagagatgtaagaagtgtgctatatttaacacaaaaag

SEQ ID NO: 221287 - DNA, 1081 bp, Cannabis indica
aagaggttaccacatcaataaatataggttcttttttaaattgagagatgcatgagtattttttttttttatctatttaacttatttatttttaaagctttcttgttattattttaagatccattctccgaatcaccttcttggcctcttgcgagccgtttaattactggcaatagcggatctatcgccatgattgtcaatctcaaagagtacacaattattctctcttattagcttcacttgacctggcatcgtttccagcaaaagcatcgacatagatcgttgccaaaagcaacaaaggggttgataacaatggcagtggccagggcgaaggtgagaattttgctggagaaaaacttcttgagcttggagtacttgacgcggtggctactgttgtaatttttgttaagcttagaagtggtgattagtgtggtgtgttagagtgcgtaatgatctagatggaaagttccaaccccaccatacactccctatatatttcaaaaaaaatctcttcattttattgctttaaactactaagtttagtcttttttatccttccctaagactgctagagttataaccactaattcaaagcacaataaaactatactaaaaagggggagcaataaaaaatttaaaactgagaccgaaaaaaaaaaaatagagagaacagaaagtttgcataccctgtgttctgattaatattgaattacatcgtacttcagtaaatgtcaaaatcaaataagactataaattaaataatgaaagctaaaatttataaaatctcatctctgtaaaccgatgaatctcatttctttgttccaggtcgagcaggtccaaagtaattcgtcacaagtcccataatagcaaacctgtgtcgagcatataaattaaaatcactaataaaacaaaatgcacataaccacgggattactaaaagcattacttgtatgaaaattacccctaccagagataaaacctatattccaattatggggacattttacagcctgttcggcaccttcggtccttaattgaagaactgttttataaaactgaaaaatgttttaagaaaaaaaaa

SEQ ID NO: 221288 - DNA, 1900 bp, Cannabis indica
taaatgattaaataaagcgtaatttattaattacggagattttaatggaatatatgagtatcgtggataccatttttggaataaaatatttttgggcccaatgaccatgggaactcggcggagtgattggatatgtcacgaaaataaactatggattgtgttggaagcattccggactagtttagaattttaggttattggtgtggcagttggttagaattaccaaaatacccctaagatttattttaggttgagagaaccttgtgaggggtaaaagggtcatttaaggtttatttctagcttattattacttggtttattagctggaagtttagatttatttaattaaagacttaataatataagttagtgatgagttagataaggatagcactcaactctctctcttttcctttctccttgcccgaaccctaagtgagggtgcaaccaagggattttcttctccaattgtcaaatttcagctagtttatcaaggcttagggactgttcaagctttgaggtaagccttctttgtgaatatttaaggattttataagtttaaatttaggtttgggttagagttctagaaatttgggactgtgatgttaaattaagattagattatgtttttaggtttgttttagggtttgtaggaattcagattgggattttaggggctgtttagttaggtttggtttagttgagaatttttgaatttaatttcacttgagtgttcaattttgagttaatggatgaattgctgtgaattagtgcttcgaatacattatatttatggtattgtactgttgtgggaagtttgagcaagtttggaggagatttgtgtggttttggggtgaaaaccaatttttttcgtttctgctagctgaaaaaccgattaatatgttttataggtgttataaaactggtcaaccaatttttctagcaggggaaaatttttggttttagcctccaaaccagtttttgctcggggtgtttttcagaacttaaattagggtaatttaacaatattttaattgttcaaatccagtgggagttagatgtccggttatggagattagggtttgatttcagagttttggaaagttatttattggattttgttgtcatgacataggaccggaatctcccagcttattttccactcaagtcagcccgcacacttgagttttggaccaaggtaagaaaagtgttatgtaacacttaggattaagtgattaacaattgaattgtatagtctcgattatgatcgagatccagattatttgtttattaagcctcagtaatgattgagggttgggaaatggtcattaccgttacaagtaattactcctgaaaccgcggatatgtttcttactttttgtttgctttattgggcaacgatagtgacatattcagctcatggttaacgagtggtaagggtactttatgtaccaggactgtgattacaatgtgtaaaagtttaagcatgttaattcaagtgtaatcgataaatgttataaggattatcgttttattcacttttcttgctgagtctctgtgactcacgggtgctacatggtccaggtaaagagaaggccaaagctgagcaaccatgagtttaaaggtcatagcagcaatgtacatatcggccgcggtgttacagcccagtgattagggtgttccattttgattgtattttgaaatataaacttacattgtaaaagcattgttaaactggttgtaaatattttgaaaaacagagattagtaattacctttaatgaatgttttgtatttatttaaattaaaaagttttaattaacctcactttttggtattattatacttatgtagcaagtgtaaattttataaaactacacatgtggcgtccctgttggaca

SEQ ID NO: 221289 - DNA, 1260 bp, Cannabis indica
tatatagaatagatatatatgactgtactagtatccaataatagtagtctttgtcgtgagtatttttttttcttctgtaacaaattaattgatggtacctcctaatatagaaaagatttatatatactactcatttcattttttcctttctcaattcttacacgctacatctaattattttcaggtcatatatatatatatatataaatatatatataagatatgtctatgtaccttaattttgttccaatagtaggtatatatttagagctataaatatttaatctgacagtcataaattgatgagttgcatataaataattaatacttagaatgtattaaattatttctaaaattattttttaataatatattcaatagagaatgcaaagaaattcgcactagtcaaggtatgtttaacacttgtcttttatttttcaatgcatgtatttcacttgagattcaaccatgcgtaactctttaagatttttgttctattttgatttagttttataattgttggaactgttttttttttttttcaagttggagtctttttgccatttgagtctagctcgagttgtggctcacttgagtctagctcatgatgattaaacacacaccagttttgtacatccctcctctcttttcttagttaaagagtgaatagaaatccactcttatttagctaaatctaatgaatgaatgagctggacaattactaatggaaaaatctctcacttaagtgtttagggccagtttggtacagttgtgttgtagaaaaaagcagttgtagttgtgctgtgaggaaaaacagctgtagcagaactgtggaaaaaagctgaggtgagtgtttggtaaattataatttttaaagtgtttagggccagtttggcacagttgtgttttgaaaaaaagcagttgtagttgtgctgtgagaaaaagcagctgtagcaaaactgtggaaaaaatctgaggtgaatgtttggtaaattataatttttaaagtgctgcgacttgttaagattttattataataatgataatattttaatctagttcattataatcacaaatatatataaaaaaatatgttatataaaatttttattttttatatatttttaatattttttatagtataaatttatatgcatttgataataataatttttaatatttttaaattatatttttatcaacttgtaaaaaataaaattgtagtttaatagaaacctaaattgatattgtttgttaata

SEQ ID NO: 221290 - DNA, 3900 bp, Cannabis indica
aaaatgaggaaattacattatacacccactttacctaacatgttttaatttttacctttatttttatatttttttaagatatacccacatttatagatgatgtctctattataccttttaggttaatgcaaattatatactagatttaagtagaatgtgaaagtatattgggcaaccctcccacaaaaatgagtatatttcaatgaaatataagataaatatattttttaattaatagagtattactcaacttatcccactaaaattaaattagaggaaattacatggtatactcactttactttacttgttttaatttttacctttatttttatatccttttacccacttttataggtgatgtccccattagatcccttaggttaatgtaaattatatgctacacttaagtagaaaatgagagtgtattgaacaatctactcagaaaaacgggtatatattaataaaatataataggaaggtatttttgatcaatggatacaaaaaaaaagtggtatttttcaacttatccccaaaaatgtgttagttagcccactacgagaagcccaattttaaaccaaagatccttggaaagtcagcagcacaacttcctttttggctctatctctctatcggccttttcccgttctgtcacttaactaatcagcgaagaaatattatcatcctcgttcactaactgatcggagatcggagatcggagaggaggaattccctgttcactcactggccactggataaagatttatttcactcacaacaggtactgtgcttatggttttgagttttctcaagtggtcctctctgctgctatgtatgttgttctacattggcaatctacatggatatgctttagctattatccatttctcttttctttttcgtattagttaggtttttcattattagttcataatgttcagttctaagatttagaaattgtgtatataattaccatttgaaacgttataatatgaatgtgttcataattattgagtttgttctaatctggatggttccgagattttgctctcaatctttttccatttgaaatgtaagagccaggaccaaagaaacttacataattttctgattttggttcgataaaaaaattctgtttctttcatgtgaatcccatttgtatggtatttgttcctacatatattttattgcagtgctgtgttaagtttgggataattcgtttggtgaatggtgacattgataaacttaatcaaatctaatttatgttgtttcaaggctatttgaattgtaattattttaactactcatagttacctagatagaacaatgttgtgttgtcgattggagagataatttggacaatgctttattgaatagctcccatcccaactaataacctgtttagagaagctggtagaccgagtggcaacccctgtcatacatctgctttatgcagatgactgcaccctatttttagaaaacttatagacttttttaaaatattctgttaagccacaagaaattctgttagataggcatttattatataggtaagaaatggtttgttgtgggaagcatatacaaaccgtaaaatttattcaatagtttatgcaatttatattatcataattccagtcttatattctggacattgtcaaataagcatactgctcagtttcctttgttcttttggttattatcattccacagatggagggtgaccttcgaatttctcagaaatggggttctcctacagatagtgatgaagcgaagtatgtctctgggcttagtacattactggttgctacaattcaggaagcaaaagatagaatttctcaaattgaagacatattttgcagtcatctcttcccaacttttcaatcgaaatcagaacttctgcagaagttatactccaacgctcgaagggctgcatatagtgaatagaaagagaaggaaagtgagcttcaattggagctcaaacaaaagaacgaagaagtagttaaagggaatgagctgagagaaaatttactcaaaaagatcgaatcaaaagacaaggagatggtgaattatgagcagcggttgcacgatcaagaaatagagaaacaagtactagtagccaaactggaaagtttggaagaaaacttttgtgagtttcaaaaggagctaggtccacagattgaagaaattgaggaaaagaggttgcaaagtctgaagttacatctgaatggctctgaattatcaaagctgttggatgaaagtgagaaagagaaaaaacttcttctggagaaaataaacggtttagaagagacagttaatgaactacaggtacagcttagaggcaggacaagtgaaatgactgaggttaaggatttgtatcacaagtcacttgaacaaattcaaacaaattcctctgagttactgactgagaagaaaaaaagaagggacgtcattgatgcttacaaaaggcttaaatctcagtttaattttttgtgttcaaagtttggtgttactagggaaagtttgtcctcccaacataaattacaagatgcagctgattcattgacgcctaatctagatcaaagaacttcccccagtaagatttggttttgttttcctttcatttacggaaagtgtgtaaataagcacattataaataagcacattattatgctcattaaacttccttgctatgtagatacaatttccttggttttatattgtttacttttgaaaaatcggtttcgatttaactctgctctgatattttttgaacacttttcacctgtaaatttggctgagctgaattcttttgtgcttaaattcttcccttagatcatggagtgaggttttatctgttgcctgcagttcttgatgacaaaaatcaagatacttctggagctgcgtgtgacatcaatgtgaagaatgaaatcactgtcaacaaaatttggaggatttgaaaggggacacaccacttcaatcagtgagctgcccctctcctactcgcactttccctatctcacctaattgtcctgtcgctgtgaaatcagccccattaataggccgaaagcggcctgcttcttcctggagagaaactaggtctcatcaaggtcaaaaagggcctgacccacatgatgattttctcgatactcctttggagaacatcagaggaaacctaaacaaatccacaagggaagaggaactttgcaatgccccgttccaagttcaaaagacatgattgttgatttttcagatgatgagacgcaggatatgactgctgatcttattcaacaaaagcagcatcagataccacttccaaatactggggataaaggtttcaaatttgtggagcctgtaagaaagaaagcggagcgggagaatttgaaaggagttgaatgcaagcaatgtaagaagttctatgacgctgttctttgcaatgataaaggcgataatgctaatcataattttcgctgtgaacaccatgatggtgtttctaggcatcggtacaagtatgttcctcctatgacccctgaaggattttggaatattggatttgagtcagaaatgtaaattcttaaaagaacttctatttgagcggcaaatggctttaatatgacaaattaatttttctagcttcatgggaattagggaataggattcatgtacctcctaccagtaccgggtacttatctgaatgagtgaaactatttcacctgttcttaaccccctactgcaatgtgctgagtcaaattaccttgtcatgggtttaaactaaattatttcaggagaaacagatagtaataagttaagatggtgttttgataacaaagataaagagagtatgtgcaaaaaaaaaaggcaaaaaaaaaaaaaaaggaaaaaatactagcacacattcaaaat

SEQ ID NO: 221291 - DNA, 2437 bp, Cannabis indica
ctttttggtgataacaaggacatagtgaagtgggtaaccgatgtcactttatctttgtcatcatcaccacaagaagatccaacaaaaagaagccatgatgattcaggcagtagtactaatccttggaaatttcttgatcaacttgttgacccaaggatggatttaaccactagtgattatgaggagatagagaaggttttggatgtggctcttatgtgtacctctaggattccccttagtagaccttctatgagaaaggtggtggaattgctcaaactcaaggaccagaaattggctcgctccaaaaccatcaactagttaattacttaattagtacagtttggtgaaagaaataggcaaaacaagttttcctttttaccatgttgtaattattcggattagctagtcattcagtttttgtttgattttagaagaactgcacaaagttcagtcggaaattagacaaactttggtgttttctctttttccattattattactataaattatgttttcagggtaagaatttgaaaaaagctataacaatcatataaattattattttaataaatgttagaatttaagaataagatgaatgaggttccatcttaaaattaattggcaataagaaaagtagtccattcatcttatatatcttaaattatttctacacattaacaatgtggtattaactcttaatacaaaaaaaaaaagaagtaaaaatttctacttataatttgatgaaaatcgtcctttgtttttttttctttttcgtatttcttttacatttgtaaaaagttacggtaccaatggagtgtggatttataaatcatatgtagctataaaatgtaagagattattattaatagccctaatcattcaaccaataacataatctttatttttctcaattatacaagttatatctctagcaatatgcatcgccatattatatgcttcagtttgactatcgattagtataacccaggctgatctcatagactggtcacgggctataccaacaaataatgcaaggctagtaaccaaaatggttattaaaatggttggtgtcaaatgtcacagctatgtcatccaaaatttaattcctccgttttttatttcttctattataaagtctccccctccaattaaaaaatttctcaaaattattacaatttaataaaaaaattgattatgggggctactgttaatcaattgatgctttgtgaggagatcaaatgggatgtggatgtggtaaatgatttgtttgaggacagagataaagatctcattctaagcattccattaagtacaaccagaatagaagatcaatggtattggcttcatgagaatactggctgttattcggtcaaatctagctacaaatggatacaagagaataaagggcagtggtctactgctatggaatcaagcttctggcgtgttttttggaaaactaaagtccctccgaaggtgctgcactttgcttggaaagctgtatgtggctgtctccctacacgtgttcagctccaaacaaaacatgtccctgttcagctgcaatgtgtgttctgcaacagggaagaggagtcgatcatgcatgttctggtacattgccagtttgctcgttcgtgctggtctcgatctgccgtctctctcggtcaagttgcagctgcaacatttggtgattggctccaggatgttttgagtcgtggtcatgtaagcatgtttgaggaagcgctaatgatttcttggtccatttggaaagcgcgaaacgacttgctttggaataaaaaggttcaagttgcagctgatgttgttttttctgcacgaacagtccttaaccattggaataatgctcgctcaaaccgttttgagccgctgcctgcaatagttaatacactttgcaccagcgagcattggattgcaccagagttgaattgggttaaggtaaatgtggatggggcaacatttgcatctacacagtcctatggcgttggtggtatagcccgtggaagtgatggcaggcttatcgaagccttttgtctacataaggccggctgtgtgcaaccatctttagtggaagcaattggtgtgaaagaggcgttgagctggataaaggaaaaaggatggcagcgcataatactagaaacagattcactggtggtggttcaagcccttgaaagcaatgttgaaatgcaatctgtttttggttcagtgattattgactgtattaatcttcttaattctttggtcaatgtttatgtccgttttgttaagcgatctgctaacaataccgcccattgtctggctcgcggtgcttgttattggtcagattgtatttttgttagtagcaatgttcctagtgctattaacactgctgtaagtgccgatttggcatttctatcttaatgaagttttctacttttcattcaaaaaa

SEQ ID NO: 221292 - DNA, 1582 bp, Cannabis indica
ggttccccaaaccccgtgcattctagctcaagattttcatgatgaattgcggggttgccttgcaacctccgcactagagtcattggagaagctagaatcctcaaagtcagaaaccaacgtctcaatatcatcctctcttgacaatggagaagatgacgaatcttgggcattacggcttcttttcagtattttcctcatggatagcaagatcattttgtcttttgaaggtggcggttggtggctgattttctttgaaagtggacaaagctgtagcagtgtatgtggggagtggagttatggactgtgtttgagaaatagaggaaagataagtgtttatggggatgggtgttaacattggaggataagtggcgaaggtgttgctatcgagggcaggcatataaatatgagtaagatcaatgacagagacttttggtgaagaaagaggttcagagttgggtttgattgctgttggggatgaggaattactggtgtgtgattgcagctccttatttttggagtttttggtctcaagaaatggaggctggctatcgagattgttgggaagagtggtagttttgttgaaaacgttgctggtgtgtttgggttgatgttggttgaacacgtttgtggttttacatgaggttgatgagtaagtggaaggagtggggacattgcttaaagtgctactagagtgattattttgttctgtagaggaggatggaaagttgtgagcatcgggttggctaaaggagtgggagtgtagttttggatgtaagggggaactgtgatcaggttgggaaaggggtgaattggtgttagaatcttaggtattattaccgccaaaaatttaacttaggtatttatttgcaactgcgagttaaacttaggtatttatgccgcaaattactaaaaaaaaaagtcgttttctctctgtaatggctgctctagccttgcaatatactatcttttgactcttttactatgattggtttgatcttattaggatttatggtatttctggatacgagagacagtagaggacatagtctgacaaacaagttgatagtagataatgaagaagattgggaagaagtctttgattggtcatgttatagctcgaaatctcatcaatggaaatttcttcaaaactgttttcggtagaatatggaaaactctagtcaattggaaagtgaaaattttgaaagaacgggcgaccaaaaacttgttaaaatattatttgatagcagggaagtgcaaaagctatacttgataaacaactatggatgtttgggggagggttggttttttctagaagattggtcggtctctggacaatggcaggaggccaagcttagcattgttagttgctggatacagatgaggggtttttcgctgaaggcattcacgtataataatgtccagagaatgaggaacattacgggatctgtagaagaaacacgatggacaaacgctcaataggttctgttagggtccatatgttgggttttatgccctaaataaaactcatttcaatataatcagatttactaattaatatagatcagaaataacatttaatgtt

SEQ ID NO: 221293 - DNA, 1695 bp, Cannabis indica
taatactcacattttactttagacacacactcaataaattttttgggcccattattactccaggccgaccctggttattttgtcttactagacttatttttatattagtgtgttacaacacgatacttatctcatatcagtagtattaaacaagagaaagagaataaaaaacgaaagatcaatgaagtaattattttaccttgagaaaaacgggaagagggcggtgtttggtgtgattagaagtatgatcttcgatatcaatttcagagtacctactattcctaagataagcttgagacatgaactcaatgctatgaccaaatccattggttgctgcaatttgcttagacatgtcttcaatctcatcctctcttctaatttccatccttagcttaattaatgaagctaatttagttgttttaatgaaattaatcatccataaataagaaccataattagtttggctttattataatgatgcagaagatggtttggttagccacattcttcctatgcaatatctataaatttatttataaataattatataatatttatttggaattataaggaaaaagattggttttagttctcacacacccttgtaactttttctttatagacatgccaagaacatgactatattattcataataattataataattggattgaacttcacttaaacttgtttttcttaattttatttctagtttgaaggtttaaatatggacacaatgtagctacttgattaattagttttttctgaaattttctaaacaaacaaattcaacaaaaaaacatcattttatgatagttgtcgttttcatttgtttttagtgattattatcatttttttaaagaagttgtcgttttcatcaatttttattatttttgtttttttatttatgaaatgtgtcgtttttccaaattttcacttatttttattaattttttcgatttcttttcttttctagacaaaaaaaattatagttattatattatataaatttatgcttgtaaaagttatgatggttaatcaatcagttttaagattttcataggcatctgttttctgtctttccataattattgtcgtttttatcgttttccttattttcttgatttcctctacaatacctgtcgtttttataaattattgtcgtttatcataatttgtgtcgtttctaaaaattattgtcgtttctcatagttgtggttttgactatttatagtcgtcattagaagttgtgtcgtttccaataaaacctgtcgtttttatcatttttcttaatttcctgatttcctataaagtaacttgtcgttttcataaatattgtcgtttatctttatttgtgtcgtttataaaaatattgtcgtttttcatcaatgcggctgacaaattatggtcgtttccagcaaaacctatcgttttataattttatttgcaaaaacctgtcgttttcaaatattattgtcgtttatcataatttgtgtcgtttattagaattattgtcgttttttagtttcaaacagattatgatctagaatttgtgtcgtttccaacaaaacctgtcgtttttccattattttcacataaatttgtgtcgttttatcaaatattgtcgtttttaataatttttgttgttttatcaaacatttgcgtttttccccttctctgactcgttttcatcg

SEQ ID NO: 221294 - DNA, 1689 bp, Cannabis indica
aaaggtgaagttgaaagatataaggctcctttagttacgaaaggttataaccagcagcatggcattgactatgttgaaaccttaacatcagttgcaaaatttaataccctaaaactcttccttgcacttactaccataaacaactggaatctacaccaaatggacataaaaaacacttttttacatagtgatttaaaaggacatgtctatatgtccattcctaaaggttatgtgcacgaaggggagctgcccccaaatgtagtttgcaaactcaacaagagcctaaatggtttgaaacagtcttccaggcaatggcttatcaagctaagctccactttccttagcggattcaaacaaccacgtaatgaccattctctcttcataaggtcatctcctaatgccttcctgaccctcttagtctatgtcgatgacataataattaccaacaataatgacacaaatgcctctgcatttaaaattttcctacacttaaagttccaacttaaagaccttggctatccttgattctttcttgacctagaaattgctacatcaaaaataggcgtagttgtgtctcaaaagcctttcactctacaaatctaaactgaatctggctcccttagcacaaaggctatatccacaccaatggatgccaacatatatctctcagtaaggacattggggctcccatttcagatcccacctcttataggagtctcattggaaaacttctatacttaacaataacccagcctaacataacatatgttattgattgtctaattcagtttctaagtgatccatgacaactccacatgaaggatcctacaatatcttaaaggaacacctggacaaggccttctcttcaactcctctattcctaaataagataatgctttccacctccatgcctttactgatacggattggggtacatgtccagatacaaggtgatcgatcactagtttctgcattatcctaggtaattctctcatatcatgaaagtgcaagaagcaaaccattgtgtcaaaatcctctatagaagcttaatacaagtccttggctaacacaatgtgcaaactcctctagctcttcaacatacttaagactttggcatctctcattcaactctagctactctctattatgacaaccaagataccctgcttatctctgagaatgcaatatttcatgagcgcaccaagcacatagacattgactgccatatggttcgagaccaaatcactaaaaccaaatcaagttcatacatgtcctttctcggcataatattacagatatcatgaccaaagcacaatttccaacccaacacaactttctcttaaccaaaataagtgtaataaacctctacagctcatcttatggggcgtattagaatccactgttttacatagttagttatgttggttaggaattagttatagagagagaacccttttttgttattttattagtaatagactttgactactgcacttgtatatatacttgattgatcatataaaacatagtttacttctaatatctagtctatgccttcttttttccaaaggacggtgacatttcacctctcctaaaagtaaacgctacctattcatttttttcctagtaacgaaccctacggaggggcaaatagaactgagataaaaaaaactaaaataaaaataaaag

SEQ ID NO: 221295 - DNA, 1306 bp, Cannabis indica
ttttttaaaaaaaaaaatcacaatataatatgtatcatattatccaataacttttggtaactttaatataactaagaagttattttagtaatcacaaattatttttttagtaacgttcttctaaataatatatatttgatttttattgtttttaaggtacaaatttgcaaatcaatttttcttaaaaaagttattttatgaaaaatatcaaaaaaaatatgacgaaaacaagaaacttattacactaagaaggcccttaaaattgattgaaaaataaaatcatactttttataaaactcataaaatatttgtaatttcttcaaaattactttcacctttcgatatttaccactctcattagtcattaggttaggcccaattgccctggtccaatttcgaagcccattacgagcccgcctcttccggaagaactctctacaagaacagagcagaagctaaaagctcagctaaagactcttccagaaaccgttagaactgagtagagtgatcactcacagtcaccgatcggagaagacacaaccaactttccttccataccagaaaatatctatgtctgaggaagacaaaggtagaagaaggatcatgctcttactctactgtccttcactctccaacctacttcagctcgctgtttgtgaggatcaacgaatagatttgggttacatagccacagcatttgggttagacccattaacactcagaatcaatggccacttcatcgctacaggaatcgacttcatctcctcctatcttacttggaactcactcttttctttcttctctgctaaacgactctccactggtaaataccctgcttctgacccattaatcgtccatggaaagctctccagactcggaaccaagagtaagtatttctttgtttggtttcggagaaaaatcatcagttgctgcagctgatgacgtatttattcatatcttttgcaggagcgcatgatcctcaggatgatcgtagtaggccagaggttgaagatgatattgttttaccaagcaataataagaagatgagagaagctgattcaggtatgaaacaagtttttaagtataatatatgtatttgtgtgtatgtatagtgtataatacaaagttggtaatgtagtattttgagttttatataattaaatccaatatagtacttattatagagatatttaagagataagtaattaaagttttgagcttgtaatcaaactcatcattttttgattggcataagtttgaaattgtaatttttgcctaatttcattagtatagacttcttaatata

SEQ ID NO: 221296 - DNA, 3479 bp, Cannabis indica
ttttttttaaaaaaaaaagactagaactattaatattctatgaaaattttattatgggtttttttatgtatatagtaaagggataattagataaagtaatattttttaaaatatatatatttttatgtttaaagatttttttttatatttttacaattttctataaaaacaataagaaaattacataaaaataacaggaaaataacatccaaataatatcaaaacaacaagaaaataacacacagagataataaaaaatcaacaacatattaacaagaatacaatataaaaagacagtattttctataaataaaatcataaaaatcgtaaaaatatttaaaattctgtacaaccgtatttttgtaattttttgttgtttttgtgtatttgtaaaataatccctatattagaatggcaaaaatgttacacaaatatattgggaaggccttataaacatttatacaactcagcaacacaaatttataaaagtacttcttgctctaaccattcagcatcacgaactaccttcttcaacaacgacagcttccaacaaccaaaccagtaggctaatcgaaaagaaacaaagccagacagagaattaccataaattatggcgacttcacctgagaagaagatcgtaagaaatccaaacacatacaattttagatttatgcataatcaggcagaaaaactggttcaaaactaaaattcaatcctgaattacaattaaaattgcagaaaactaatcttcctaatatcaatgttcagattcataaaatgtagatcaatctaaaataggtttagagttcttgattaatccaaattaggtataaattgaaaaagaaaatgtatcaatacactagctaatatttctcctgttgcatcaacgttattttctagatttttaatggtggatttattcatatcaaatcacgaataatcaagaaaatttgaatttatctagagccacgtacatagaaatattgctctaatttttaagtttctgagtagttgtattgcagttgcattaatattttactaatgctctgaaactagacatatcaatgattacaaactgtcaacgatacaataatttttatgatatttgcaggtatttcatatccacaatccaatacaaagctctttaaaaaaattataacatggttatttatttatatattcatttggttgttataaagttggtttataaaattctaacagttgtttcttcacataatattattaagatacaattgattattgttgattagtgacaaaaaaaacactgataaatttttcatgtcgatgcacattcaaattttctatatttaattgcatttaagttgtatattagttgaataataattatgctactatattttattgttttaaaaaaacatagttcagaattaacaatacacgactcgtatagagaaaattcgattatggtaagttttgtttgtattacataagtgcattattagttattttaaagtttaatattagttgcctcacaacaaatataactgtcgcattacagtttcatgacagttatcccatagttgacttacaatgcttaaattttcaaactgttaagaaaaagacgcaattccgtttctcatatttgcaatgaacagtttgatcaaggaacgaattatgtaaattacaaatgtactaaccattacatttcaatagattacaaatatgaagaactagtacataagttgaaataggtgctggaatgcaactaagaaaatattcaactgcaacttaaataccaaacgaaagaaggataccaaccatttaggataaatgacgatccaaggctatttttctacatacaagtaaaattaaaagaaccttacttcataagatatccattgtgtgtgtgtgaacatggtcagcaacacaataacaaccaacaacacctccttctttgcaatgagcaactcattagttgcccaacaattattttaaggttgtatgtcatatccaaaatattaacaaaagcataaagcattatcaacatcatatatgaaaccttaatgtgaagttctaaaacttttcttattacattgaaaattctgttgaatcttcaaaagtttcttatcactaaaatagcataatttttaacgcccaagataagtgttaccatggggacttgaactccaaagaacaatcaaatgaggaaccttacgcaaggcattccaaccagctacaccacacattcggtggtacaattaatcagtcatttaaaaaataaaaaataatctgtacttttgtataaaaaaaaaacctataatccttagagatatttaaaaataaaataaataggattttttctcctaaagaaagtagtaataagaaaagttagggcaatgttagggaaaaactataaagtaagtagaaagaaaccttcagactctcattagcttggttcttccctttcttaactttagggaggaaaatattttcaacaacattaaccttcaatttcttcttaaccaaacaacgatcaccttttttggtagtggagcaaagtctgtatcatcatcttcaatacggactgtttacctttagatttatttgcaagagatttaacacccacttttgaagattttttcaacaatggtgatgggaagatgaagaccagtaatggccatttatagaacagaaaaaaattgaaaaaacgtggtcagatgatgaaggaagatagtcgaggaagatggacgaaaataattttctctaataaaaaatggttgatcgtgggagaagttttcaaacagaatgcttgcaatgaaaaatgaaataaactaaaaaaaatgatagaaaatgagagaaatagatagtgtgtgaaggtggtataatgacatcatgcatgtgcaagaggtattagtgtaaataaaattaaattaaaggtaaatatgttggagtagtcttgtaaaggtatatgagtaatatttttggatttttaaatttttcatgtaaattttccttttattatttggtttggctttaaaaactgcaatatccaataataaaaaaaataatttttttgcttaacataattaaaaaaaatatatttgtaatatctttaccatataactaccatcatataattctatatgaataagtattacaattttttatttataaaactgtttacacaaatttattttgatgatagcaacgtgataaaaataatgacatgtggcacgagatatcagaattaaattgatcaagaatgtgtaaagtcatgaccgatggtcatcaccgattgtaataaccgttggaagagaagtatgatagtcaccttttccctagcttaagcaaggtgactctccctagggagaaggtggactagctccctcatggtcgggataaacgatcaccacacctaagagagtcaaagcaatctagggagtacatacgactacccctacttcaaatgtaatgatctactcaaaaggtaatgaagt

SEQ ID NO: 221297 - DNA, 2137 bp, Cannabis indica
ttattatataattcttacaattaattatgctaatttcttttataaaaaaatgtaatataaaatagcaaagggtggtaaaattaacaaaactagtagattagttaaacaaaactataataagttgaacaattagtataaaatgtttttaccatttttattacaatttaggaggtccaatataaattaagagaaaatcttatgcaaaagtttttttttttattaaaagcgtactcatcataaattaaaaagcgattagacctcacggtcgttacaaaataggttttccggtaatgagggaatcggaatagagccgaacatctggtgggtgaaagctcacttagccacaatatggacaacaaaattacaagtcttaatattatgcaaaagttcatatataattcttctacctctttccttgcatagtcttcagactcataatgataatggtttatttactataaatgatcaattgaaaaaaaaaaatccttattatatggcttgtttagtaacaagtcttgttcttaagattttcctcaagatttttcctgaagggctttttgggatttcttctatgaaaaataccttactaattctcttgtaaaataccacctgaaatatttccacaaaattaaaccaatgtgaaataaaataaaaaatgttaataataattatttgttatactattttaaagagtgaaaatagaattaatgaatatttggaaaaagaataatgcaacagatatgttaataaaatctaacaattaaaatttttgagcattttaaatggatttttttttatctttcataattgttgggcaatataatattgaaaaattggtcatgcaagatatatatctatgattaattaatgtttctattggcacccatatttatataaaagagaattaaaatatttatataaaaaaaaattaatatctatagcttatttatacttatttgtgtaaatttacaataaaagtatgattggaaacaaataaaaattaattatgaaaatatgtaaggagataaaaaaagtgggatgataattgatgtgtgtgtggtaatgatataacctttcaactactaaaataagattaatcaatatgaattaaatgcataaattttattagataactataactagatgtatgtttattattaagtcatttaatctataaaatttgtactaaaattaattttacctgttttgagatatattgtttgatatcatcctcagtgatttttgaaccatttgatgttacaacaaatgcaacaggaacctctcctgcagcttcatctttcattctgaattatcataccaaacattaatagtcataatatttttatatactagaatacgtaatgttcgaaggaatgaaaaacataagaatatgaatgagaacaaaaatatcgttattagccaaaagagagtacttacggaacaacagcagcatcagaaatgttgggatgggcaatgagtagagactcgagctcggctggggctacttgaaagcctttgtatttgatgagttcctttaatcgatcgacaatgaagagttcatcgtcgttgtcaacaaaccctatgtcaccggtgtggagccatcctttttcatctatagtagcctttgtggcctccacatcattcaagtaacctgaattttacagtccttttcaatatcttatatcaacataaaatgcacaaaatttttctttttcaccaaaataattagttaaagaaatatgattaataaatactaatatccaaaattttataatagacacatcacttttccctttattgacataattttagcacctacagaaattatgattttgtaattatgagaggtactcaatttattttcgaacttttgtgaataatttataatatcaaaatcaggattcaattatacagttgtacttgtgcaaaaagaaacaagcaagcctaaaactgaatgtttaaattttatttttgacattataaattatttaaaataaaaataaaaaaaacaagtaaaatttctattatatataatattaactatcaaataaaaaaattagattataaatttttcaaaataaccaaaacataaatataatatccttattaataagaacaaaaacaacgtccgcactat

SEQ ID NO: 221298 - DNA, 1192 bp, Cannabis indica
gccagtgttcgataatttgcatggtagttggtagtccgtacaaagtgatagggatcctttggtccccattttagacgttatttagcttagctgcatccttgatggcctagaatttgatgttgatcttagacgaaagtggtcctacactctactaatactatgtcacaagaagagggcattcaagattagatccttccaagtatagaaagatagctttactagaatatacaacaattgaaaagttattagttcgcctgtattgtgtttttgatgaataatacaattaagctactttgcttaattcaactacaaaatataaaaaacaaaaggggcttctttattggttgaaatatagtgagccaggtcaattataatccaggcaagagaaaagtaattttgatggtctttatcagttgattgaattgtaatgttatgctggctttctatcatcataatatttgcttgtaaagtagaataaagaacagtatgaaatctataaagaaggttaaattgattgaactggagagagggcctcaattcatttgatcaaacattttttttttgtataagccgaaaacattgacccaagaaatccatacacaataactataagagaaaaacaagatgtaacatccaaatcaaacctcatcaagttcctcccatgtagaaacactaatatatatgtgcgcaaaaattacttatcgtcctgaaactcccctgtaacatgagctttcagaaagctctaaatacataaatgaacatgttgcaggaagccattccgctggtggggcttaccggtaaatgccctcgaatcataatgctaccccttccctcaaaacccctttctctaagtctgtttttcccttttaccataaatactgaagcattcagttccatactcaactacaagaatgaaataggataagcaacaatagtcaatgttggagaatacagaccacttattccctagctggacaggcaaccaaggcagtaaaggatggtggacgttatgcagatttctctttcttcaatgatgtttgaccctccaaatgaatgacattgtttcttttccccccaagaaaatagtagcaaaatgacttggcaagtttgacatttggtgcccagtttactcgtttgtactatcaaagctaccacccactgcatttgctcgctttttttctcgccagttctc

SEQ ID NO: 221299 - DNA, 3977 bp, Cannabis indica
tacgggagcccaccccttttcccatctcttgtttgccgatgatagcatgttattctcccaagtcactcatcattctagtgacgcccttaatgctattctccaactctataatagagctaccggtcaactggttaatagggataagtcttctattcttttctccccaaacacctctgatgaatcacagcatcaattctgacatgctttacatcttactggggagggttttgttaacaagtatgtaggtgaccctatttgtgtgggtagggttacaaattccatttttcattatcttctccaaagtgtttcctcccgtttgaatacttggaatgataagtttttctctagagcaggaaaggaaactcttataaaggtcgtggttcaagccatcccctcttttgctatgtcctgttttaaggtgcctaaatctatttgcctaaaaatctagagtgtcatagctaggttttggtggggttctctgggcactaacaaagtccattggaaaaattggtctgccatctcggtctctaagttctttggtggattgggctttcgtaccttttcttttcataatcaagctcttctggccaagcaagcttggagagtgtggagtgatacgggttccctccttcattccattcttaaagctcgttattttaaacactctgatttattgaatgctcctgttggacataattcttctttcacctggagaagtcttctttggggccgtcaattactcaagaagggtctggtttggaagattggtgttggtaccaatgttcctttattagcttcaaactggattcctggccttcccagtccaactatcctgcatccaattgacccctctcaggctttcgtctctttttttataaaccacaataccacttggaatgtgcctaaactcaatcatttctttccttcttaccaggttgatagtattcttcgaattcccctggacccaaccctggccgattctctgatatggggattccacccttctggccttatcactgtcaaatcatcttatcaccttgcttcttcccttgcatctattgatgttccttcttcttccaaccctaacccttttcaacaatggtggaaaaagctctggtctctttctgttccccccaaaattaagcatttcacttggaaagcttttaaccatattttgccatgtgccttaaatttatctcaaaaaaagattcttcctcatccgacttgctcaatttgtagtaacagtaccgaatctgtcactcatgcccttatgggttgccccagagcaaagaacatttggaagctttcaagattcaaacaattttactatgattattgtagaatagacattaaggaatttcatcttcaggcattgcaaaatatctcaaaacaggattttccaatctttattgctcttatctggcatatatggaatactcacaactcaattttacttaacagatatggtattcctaacaatgtggaagagtttgttattaattatttacaggaatacaatgagggtcaacaaagctatcatgcggatcaattggattcagaggccactcccatcactcatctttctcaacggctgcaagctattagcttctaagaggattctccatctctttatgtggatgcagcccttgatcacaagaatagtttaacagggactgattttatcttcaagattggacatcatcgtgttgtagcctctcactatcgccttctgcctggtgcttccactcctatatttgctgaagggcaggctctgttgcagagtttattgtggtgtttggactctcaattgagtcctaagttcattttctcggattgcttaaatttggtctacaaagttaacagttcttggcaagaccactctgctctttctggtcttgtgtctcagattcgtatgctcttctccaacttccctgaagcatctttgcatttcctgcctcgtcagttcaatatggacgcccatggtcttgcaaaagaagctatcagatcaagggaagaagtttaggagggattgctctgttccttctctgctgcttggtgttcttaatttcttgttcttgcagcttgtattctttcaaaaaaaaaaaaaagagtctgcatatttacacctctcattaatatatgtgcatttatataatatattctttttatttgttcttaattatttctttttattttttttaccataattctttttatttattatttttttaatattaattgttaaaagaaattgaaattatacttatatattataaaactctttaatcaaaaaaattttataatataataaccgcattctttaactttaaattttatatatcctagattaatattaatatttataatacttaaattataatatttaaaaaaatttctactcaaagtcgtgagttaaagtaaataattgttatagccaaaatttggctataccagaagctgatacgtgtccaacagaaaaaatttgaatcaactcaataatataataatgacattacatcattaaatgcaatttaaaataactcgttacaattaagtacaagtttgatagaaaatattcaaactcattaactgcttaatcttatgcaagacaagaataataactaactgagattgaggagacacatgtttacctcaggtagacagagtaataaaatgtacatgacgagacaatcaagaacctcgtgaatcattaaccatctcctgagaaaagaagaacttatgacgctcaaccgcctcccgttactcgcagcatgatgaacatctcacattaataatacaaatgaagggatataacgagatgaaatatttctaacggataaaaataaagagcggttgggtagttattacatattatcccgtgtgtgaataaatgaaacgtgaggaatgtccacgtttcattaacagttgtaaatgaattaatcctaaaagaataactgccaacctatatccctataaataggggcgaaatccatgggaaaaaggacgacaaatttgagaaagaaaatcttattatttcaaatattgagattgtattttgcatccagaaaatatccctaataataagaactcgtggagtatgtagattttaactacaaagtcacataaaatatttggtgttattattatcatttatttctatagtgtatttattgcaaaaaagactatttatttagttaacaaaaatctgtgttaacaatttggtggtttcattgagagccttggtgataaaaaactcataaaaattcctcctcattaacataatctacctatattaaatggctgatagcgatcaacataacgataatcgtcctaaggaagcaacccgtcgtcctggcaaagaacctatgtgatctcaaagacccaacacatctaaaacaccacgttcagggaggaaaaaaggtattttcaatgctgatggtgatcaaatcctaaaaaagaagagtgaggatgactatgatcctaccagatacgtaccattggtagaattagagaacatgcaacttcaacaacgtttggcagaattaaactgacgaaacactgagttggagagagaagctgcagcagccagggcaacacatgggatagttcctcaaaaccaacctgatcttactgtaaggggaccgcgatattgggctttatgccctaaataaaactctatttcaatgtaatctctatcatttaaatatcaataaagagacagaagtattttcatcacttatttatgtgtcatttggttcatgttatcatttatatgtttatttgatttataaattcatccaaatccttatcacatttatgtttttgattattgtgtcatcagcacactggaaagtaatcaagattatgtaattaaatatatattcctagatttatcagtacactaggtttaactgatatgataatttacaacatagtttacttgcaccttggataagtgctatgtcctttccaaggca

SEQ ID NO: 221300 - DNA, 1282 bp, Cannabis indica
ttattttttttccttttcaattttaatattcattgttcatcaaaaatttaatattcattgtacaacataattcattaaattaattatcgtgagaataaataaaatatttaatgaaatttctatctcaatattaatataaatttcttatctctgcttcaattcccaccatacaaaaacttgaaatttatatttatattaatatatatagccctttataatttaaaccacatcgaggttttacgtacgagattatttttctaggttgtaatatcattataaattagtaataaatcaaacaattaatcatattttgaaccattcatgattgttaggatctccttaattttacttttattaaattatatatattatgctatatttagcctaacaaccaattagaacttctaattataaattcaagttaataacaaccttacattatttacttaatttgcattagaagaacatataaatacattataagcatattaaaaatactataacaaaaagacaacacaattttccctctctaccctaacgacaagatatacatctccccccccaaaaaaaaaaaaaaaaccaaaaaaaacaaaaaaattatgattcatcaaaaacaaactttgtgtttgtggttgatgatgatttcatcattaatattattaatatttatcaccatggcaaagagtgaagataccaaaatgtcaacacaaattttgggagaagtttctttagagaaaacaactgttgaaatctacaacaaattagacaatggtactttacttacggttcattgcaaatctaaagacgatgatttagggtctcatgatttaagtgagaatcaaagttttaggtggaaatttagaattaatatctatggaactactttgttttattgtcgttttacatggaaaggtggatcaaaaacttttaatatttttgatgcaaaaagagatgaaaatagatgccctccaacatgcatttggagagtgagaaatgatggagtacatgcatatcatgatgtaaatcaaaaagatgatcaagatgatattttttttaaatgggatcaaccagactcatcacctgttatactttgatgattaaaaacaaaatcattctatgatgtacttttaactttgtttgatgtactttaattgcggtggaatgtactttaatagcagaaacatgagtagtaatagaagatttgttttttttttgttctaaccactcgaggctagctcaagtggccatagggggtgcgtgtgtattgaaggtcctgggtttg

SEQ ID NO: 221301 - DNA, 2870 bp, Cannabis indica
aacataactcatatggacatctaaaaagaagggaaatttcaattcaaaatcaaaaaactcaccacgcaatcaaggattcggtccaaaccaatagaggatttgatatatccttcttattgactcacatctgaatatcaccgccatcttcattagcggcctaaaggatcaatgcaccaaagataatcaaaagctgtatctcttataattccaccctcctccccaagaataaggtgatctccaaagtttttttcacacgtactcccttgtctatctatcctagggtaaagggatttgaattttaatttagacaagagatgtgaaattaaccaattattctatttaactactatgtatatatgaaaataataattgtatattaatatatttttaaatctcaggatgggctttagccctccctcaacacccctaagtccgcctatgccaatacccctacacggctcttactatttttttttcctttttatagtgttttatttatacaaataccatttacacactctactagcatgcatgatgacatttgacaagttttacactcaatttatttttcctccctttttatcatcattttctttttattttcagtttcttttttattttttattttttatttttgttttctgtttgaaaatttctcccattatcaaaatcctcttttcatcaaaaataaaaaactaatgttatccattatcttcaatttccttcctccatcaactgccaacattgttccttctttttttcttcttgttttataaatagccattactcgatcttcatttgttcccatcactattgctgaaaaaaccttcaaaaataggtattaaatctctcaccaacaaatctaaggcaaatggcccattgttgaagatgatgattcacactttgctttgcctacgaataaacgtggttgtcgttctgttaagaagaaatcgaagagtaatgttgctgaaaacatttttctccctgaaattaagaaagggacgaatcaagctgatgagagtccgaaggtttttttctagtttctttattgttttgctctaactttgcaattttttttgggttgtgcatattcttttgattttgttctagggtttagattgtttagttgttttaatgttttgtagtgttattttatcatttgtgccaatgttgaattctcacctttctcaacttgtaatgaaagttttaaatataatgaatttgacatacaacttaaggaaaaacgttatgcaactcttaaaaaaccaatatagtaggaattttagtagcaatgtattttgaacatggcatacaattatctagaaattgttatgcaactttaaaaaaatcattccagtatgggaaattaatagaaatctatcaaagtagctttgtcatgcagtaagagttctcatagaaatttaaagaattcaaataaaagtcctctatttcagttgcagttgagtattttcttgggtttagggtgcagcctccacacgaccgcttcttgtaccaacattggtcccaattgtacggacccttcgccccacaaggaagagccttcttaggggcctaatagtcaatattcttatgtatttttaccccaatagagggtgggctttttgcaaaaaaccctaggcaggtcatgggtatgcccatacccgtactttagcctatataaactcctttatttcctcacaaaggggaccaaaaaatttacatagtctatgctttgctaatatactctctaagctttcattttcttcaagagaaacctagagaaccagagttagggttttattgtaaacaccacttgtaatacatttatatgcctataagactaatatattgactcatcaactaaggataattaatgcctgaaccacgtaaaatccttcgtctcatttacttaacagtcatttaatttctaaagccttcatttaattagtttccaaaaatatcagtgaacattcaatgatctgctttgacttctctatatatgtcgtatcagaataatggaagaacacatctcttcaacaaaaaaaaaattcttctcttcaaaacttctatcgaatttttcagagcaatttgctggggtgtaatagagcgatatcgttcgatgtagaacaattcgtacagaggctattttatcgtggggatgtcgtggttgcgagactgtcatgcacacttcaggcagagctgcaaaatgtctaaaagaaagtttggttcgcgattcagctagaatcttcactcggtaattctttccaattttattttccaattttaagacagtctattctgctatggctgctactaatgatttttctggttttgcttctaacgatattaacaagacttttcattttgagggattaaattgtaagcgatggaaatagaagatgttgctctacaaagatgaagaaaaaggttctttctttctcactgctctgaagcctgtcgtctctgaaccttttaccaataaggacaaagaggctgaacacgagaagcaacaaaaatatttggactcctaggtcgaaaataaatgtatacgtgaactttattcttaacggtttatatgactgtttgtatgattatatgtttcaaaagtttatgtcccatgatttgtcagtacactggatttacactgacataataatcatcgataaagtttacttacaccttggatacgtgttatgtcctttccagggcattggtaaagtatgttaggattggatgtatggaatatacatcggactggaccgatattgacattagataagatatcataaatttgccgttatatctatctaagtcaatatcagttagttgatcttaggtcaatagatcttaatcctgagatggttatgttc

SEQ ID NO: 221302 - DNA, 2796 bp, Cannabis indica
ttgaattctgggtgttcattttatatcacaccaaataaatcttggtttgaagaattcaaacctggaaactatgagattgtgtaacttggttttataagtcttgtaagatggtaggaattggaactataagattatagcttcatgatggtatggaaagggtactaaaagatgtcagattagtgttgaatcttaaaaggaatttgatcttagttggaatattagatgatcaaggatttcttgtcaaggttgggaatagattcataaaagtttgtagaggttctatgatggtgatgagaggaagaaaatcaaacgggatttattctctggacgacaccatgatgacaaacacaaagggttgtgttttaagcaaacacagaaattaaactaaaatatggcacaagagacttggtcatgtaagtgaaagggggttgcgttattggtaagtcttgtagagtcaagtttgaaactggaaaaaagagtaccaagggaacactggactacattcatagtgagttgtggggaccctctagaatagaatcacactccggaagcaggtactttcacttcatagttgatgatttttcaagaaaattatgggtgcttatttttgaagagtaagacagaagttcttgaaaattttaaactccgtaaaaatgatagaatagttagacacaagactgtgaggaagactcctcagcagaatgcgcttgtggaaaggtttaacagaactattctggaaggagtaaggtgcatgctattgagtgttggtttacctgaagtgttatgggcggtagttgtgtctactgtaacttatttgatcaacaagtgtccttcaacaacactaaatttcaagacatcggataagatgtggttgaaaaaaccaacaagttatgaacacttgaaggtatttggatatgtctgctatgcacccatcaggcaagataaacttgaggcaagatccttgaagtgtattttcttggggtatccaaaaggagtcaaaggatatagattgtggtatctagaacccaaaatgagaaattgtataatttatagggatgtgacatttaataaatttgttatgggatttattgataaacctgctagtagtcaagccggacatgactagacagaaattgcagcacaagaaactgagcttgaggtggagcgtccaacaagagtgcagactaaaatgcttgttgatcatgaaagtgatgattcagaagatgattctagaaatgatgatctaaaaaattataagctggctagaggcaggagacagaaggctccaaacagatatggacatgttgatctaattgcatcagtatttcatgttgcaaatcagattgtgtaagaagagctcacgagctatgcacaagcaataagaagcaaatactagaagaaatggaatagagctatgtcggaggagatgtattccttgaaaaagaactgaacttgggacttagtactaattctgaaagatggtaaagtcatcagatgcaaattggtatacagatgaaaggaagacatttcgagtatacaagaggcacaatataaaataaggttcgttgctaaggaattttctcaaatggaaagagtcgactataacgatgtattttctccggttgttaagcatagatcaattagaattttgctggaacttgtagcatgacaagaccttgaattggaatagtgagatgtcaagactgccttcttatatggacatctagaagaaagaattctaatgaaacaacctgaaagatttgaggaggttggaaaagattacatggtgcgcttgttaagaaagtctctgtacattttaaaacaatctccaagacaatagaataggagatttgatgattatacaaccaagataggtctgaagagaagtaagtttgatctatgtatatattttagagaaaaaaatggaggtgcactgtatctgttgttgtatgtagatgatattctgattgccaacaagagtatgcaggaaatcaaacacttgaaactccagtttaagaaagagtttgaaataaaggattttggtctggcaaagtaaaattttaggcatggatataagaagggataagggaaaaaggctattgtacttgaattaaaagagttacatcaaaaaggttctagatacctttgaaatgagtaactcaaaggcagtgagcactctacttgcacaacattttaaattgagtgctactcatatgcctaaatatgaaactgagaggtccgagatgacaaaggttctgtatgccagtgttgttggctccctcatgtatgtcatggtctgtactagaccggatatagcatatacactgagcatggtgagtagattcatgaaaaaccccagaaaggagcattgggaggccttgaagtggattttgatatacttaaagggatatgttgaaaaatgattggtatttggcatgaacaaacagagtgaagacttagatgttatcaatggttatgtggactctgattatgcaggatgtattgatacccgaaaattattaattggctatgtgtttaatatgttcggaacgactatcagttggaaagcaaactttcaaaaagtggtggcattgtcgacaactgaaactgagtatatggccttgacggaagccatcaaggaggcactttggttgagtgtattgatggaagagttaaaactcaactagaaggttatcaatgtgcatagtgataatcaaagtacaattcaattgactaagaattgtgtgcaccataaacgtactgaacacatagttataaagcttcatttcataagag

SEQ ID NO: 221303 - DNA, 1578 bp, Cannabis indica
gtaatatacaacagtttcccctataaacaaataaactattatatatacttttcattccgccagcttcatttctacatgaccatttgattcaaatattgtaattatatgaaatatggtttagaaagtaggatatgtggtaataagaataagtttctatttcaaaattaattagcggtggtaagtagagtacccatgctattatactattttattaatacaaaactaaatcctctctcaaattgtgtgagcctttctaacatcttttaagttttatttttgctcactaatttttgacagctcaaacacaagagatgatctttttgtcccttctttttgcatcgttcttttttaaattgaatcaagtatttgactcttgatattatgttagaatatcatgaaaatgtaatttagaaattagtattacaagttcattggtaatgagagtttaactctaacaagtatgtatacaaaatcatgttatatatattatgactaattttggcagttggatgagatcagttcaaggaataactttcgacagtcatgggatgttactgaacaagatcatcatcaccatcatcagcagcagcaagctatatcttacggtcatcagcatggtcaacctcaaggcttgattttccaacccttagattgcaatcccactttgcagatagggtaacttgcaattattatctctttatacacatataaatatatattagttatatatagctaatgttatgtctttctgtttgggttgaaacaataaataaataaataaaaactctataggtataacgcagcagtaacagagcagatgagcaacaataatcatggtcaacaagtcaacggattcatccctgggtggatgctttgactcttcattacattacaaagatgatctgatcatgacattgcatgatgaagcataacaacctatgtgctttgttttgtgtgtgctatatatatatttatttatgtaaaactagtttcttgagcctaattaatgtaactcttctcatatatatatataaataaatatatatatatatagatatattaaacaataaaatcagctgagactgatgaatttcgaatgaccatcaaagaacattatgcaatgcaagtttacatatgtatttgctttgtaagaaatttgatcatatactaatattttgaagccttttttttcttggcttaaatagtaatgatctttcaattcaatatatgtattttcgaatcttttcttccatgaatagtatttatctgtcagctcctccaataagtaattaatcctcatttttgtaaaaggctgaaacatatactttgaaggcttctcacatttttataccggaaaaagttctattttctaaacaaagctttgggctatatccacataaaaaaaaacaagaaaaaacgttttgggctatttttgttaaaggtccgaagtatgagaagggctttttagtgggccgaacagcccaacatcaatgctctttaagcaataagaaacgaacaaaaatgtatatttgggaactatacacatctatacatctaacataaaataataacaaatat

SEQ ID NO: 221304 - DNA, 2711 bp, Cannabis indica
ttacacagttacagtgtaattatgtagtcaaataaatgtaacactatgtaaaccttcaattgcacctaattacaatttcatattagctttccaaacgtgcccaaatcttgtaccaaaatacccaagaatatatatttgttggtagtaattaagcaagtagggttgttatttttgtctctaatatagtagtactttcttatgagtattttagagaaattttaatttaaattgaggggcatgccttttttttgtaaaggagggtgcgtatttttttataagtacttttttttgtaagggatagggcatactttattttctatgtggcataacatgttaaaattgatacaatcttatactttatgatattaaatatagtctaaagtaagaaaaaataatactaaaaaagttggctttaatgattaagttattagatataagttttattggtatatgttcaaaaaatatattttaaatgtttagaatttaaacccttgaactttgttgacctcgcttttagccaacgataatgagtcaaatgaaagtgattgagaataaattaaataatagaatataaacaatataaagcaaagaaaatactagaatttatagatgttcggccccttatagttgataatagtctactcccctttgattgtattgacttatgagaagatgaacaagaatgccttgatatctcttgaaagctcttacaatgatctctgagtaatttactctttgattaaagtttttctcttaagtgttttttctttgaatttgtccctgaatagtgagatgagaacactatttatagggattaattacatgaaattagtttccttaaatcaataagaaaaaatgggaaactagtttaactttcataattacaataaggaagtaagaaacttaggttgattgcctttcttctctgaagatacaaatctatcccatgaatttaggaattatgctgtgacttgcaagcttggagatatttgagatatatctctgaaattactaacttgcatctcctggtccatgcatgcaaacaacctgtgtgatggaagctggtcggatatacattcttactttgctcagatatcacaacttctatctgtgagctttagaatcaattcctcctgtacgactaactaagagtagaattatctgcccaagttaggaaatgtactccgcgtgtcacctagatagatgccatgtcattgtcaagaaatttgggtaacattttccctgcaagtccacgaggaatctttatggtcgcatgtggacttcctcggccacaaagctgatcgaatgggtgacgtgtgtcttgtttccatctttgatccgacatgatttgatcgtgcatctattcgatgtctgggacatttaattctatcttgaaagttgtaccttaaattacgcattgacagttgcacgacactgcatgtgtgacgtctataccatttgcaatgagtctaacgttcaatttttaggagaaacccaaaaaattcaaattttggattaattatccctcccacatgcctataaaaggggtttcaagcttcagtgggactcttttagccatttcatttttcaaaaaaccagagcaaaaatttctttctgcattctcaaatgtttgaagaaaacattattggaatcttcatcgctgaaaccctccaagcacattcagaaagcttcaaacagtgagcaagttatctttttctttctttatgcaatttctattgaatatatgcattatttttcagaattttgtgttgcaaaatttttgtgttctgagcatggagaagttttgccagcatttctgcagcaacataatcatttcccagaaggcaatatagtctatcacacctaagactactaatagtattaatcacaagccaaataaatcctaatttcattcggaagagaacatgcaaatcctacattccatagtggatttaaaaacgcaattaaaggcgagaaggtagacaaatacaaacctgttaattgaatcgaagtcaccaaattgatcttcgctggttctggttgaggtaagcgagcacacctggcacgaatacgattggctagggaaatcagtgagtcaatttcagagtgaaaatagatgtttgccaactcactcctctggaaatgattgatcacaaggggtgaataatttggatgataatttctcagacaaaagggaatttaaagagggttgtcgaaggctgggttcattaagtgctaaaactcttcaggctctcaagaaaatttgaattcaaacgaccgaaaatctgaaattgggagaaaattgggagaaaagtggtaaatggtatcttcagggtatttatacctaaggtggctatccacgtgaagaagaatgaatgatccaagatcgtatctctaaaattataaaaacatccaacgactcggaggtttagaagcctagcatgtcaagtaattattgcactctagaatcgaggcacaaatcaatgataaaaatgcttttcttaactttcatgccaataatgaacaaccgttgaagtaaaagctttcttggaaagaaactcttcagtttatgtgctcctccaccactagatgactaccatgtttatttctaaaattaaaggcagaactttgcctttcgtgaccaattaacacctagaaagtaacaagaatattatttttaaacctccacatgttcactcatatggattagg

SEQ ID NO: 221305 - DNA, 2518 bp, Cannabis indica
aaatttagtgtcaaaaatattttcactccaaccacaacgctaaaatttacaccaaaaatatattttattattatattaataaaatataaaatattttaatattaaacaaaaatcaactattaaatattaataataataataaaaaaaaagatgcacttgctaaagtgctactgcatatatgcagtgcactgtagcaaagacggcatatattacctcaaaatgatactacgttggagaagattagtcactgcaacctcaaatttgaggactccttgaagttactcttataaattagatattattttcgtcaaaaattaaacttaataaacttaaatatttaggtcacaaattattgtaacaataatatcaatactattttggcttctgcaaacatcaacatgcacgtgaaacctaacctttttgacttaatgaagcatcaaatttattaaagaagagggtgaataacaatgactgagctgtgtggtgtggtgtgttggtcacgggagctagagttgcactacaccggtttctgtcaaagtagtgatgagatgatcatgatacagattacagaggcagcttctatttcccgtgaatttttttttgtagcctgccaatcttatatgcctccttcccaagactctacattttatcttttttactactgaaatcaaaatattccctctttctctttctctctcttaagaaaagataaaagaaaacatctgtacttaaataaagtttaaaagggtgtttaatgctttatccattcaagctggcacccgacaacaacataattatccaactttattacagacaaaccattgtagtagtagcatacaggaagaagaagtgaccaagtaacctaactatcagcctcaaaacagaacagaagtaatactttgcttttcataagagaaagtcagaaacaagaaattaaaaaacaaaacaatattttagtaaaactgtaaagttcacaaactcacatgtctatacaaaaatttttaggataatcccagttgagaaaaatcaccatcaagcaaaaatcatatgcttctgtgtggtcccaaggtgttttagcttgattaatcatatgcttctggtgcaccatagcattttattttattttgttcaaacttttttttaagcatcctcatacacgctgtttctttttctctggagtcgcatgcacttgcgttttgattccgtatgtttttaattggaaattttcaaaagcatccgagatagctcccacctatacaaaatgaatgtacaaggatagaagaattaaaaatagttagagaatgaaagattgtgttcatattggctgtgagatagtttgattgagacacacaccaattcaggctttttggagtacaccctcactatcagatcttggtaagatgtcggcaacaagtgactaatacgttcattaggtatacataatttctcctcactttcataatcctgagtaaataacaaataatcattaaaaatggcagctttcatatgtatgagactgaacaataatttctccaatttgtgttaaattctgatcacatatatatatatatagatatgtatattaatatttaataagatattctctaatcaaaaaattatgcataaccatgtccaaagattgataaaatatgatccactgaacctagactcaaccaagtttcttcagaaaatataataaccaagttccaatgaggtagaagtatattatattcataattcagaaaattgatgcatacctggaaaaaatggatgctggaacagacgtgcaagaaaaaaaacaaagaggggtgagaaaagttagtaacagaagaatctatgctgttcaattttttagtggtatgggataggtaaagggccttacttttcaaatggattgtaccttccacgagtcaaatcaatcttaacattgcacacgacaagatcctcctccctgagtataactccaccatttatctggaaaatgtaaatcacaaaatatttgatgtaagagattggagtttattgacttgaaaagatgctttcaaagtggacagatacaaagtttgaacaagaacctgagagcaaataatatcttgtgctgtgacatttttgaagttgtctagcttgtccttaggtaccgcatattcgttgcagaactgccattaaaggtaaaatgatgatgataataataataatgataaatacaaccaacaaatagtaacaatgcatacaaataaagggaggaaagaaatggacaaggacacaatcagccttatcactacacaaagagctttgccaaattacatcatttattgctcaaagatgtagcgacaatcaccaaaaggtctggtattctacctggtaaagatttcgccttcgtatgcgttggattaaatctctagattcttgcaattcttgatgagaagaaatctcaatggttttaattattgtgtcatccaactgcgttccaagaatgaagaaaaaaatcaatacgacatttcatgaactgtgacaatga

SEQ ID NO: 221306 - DNA, 2398 bp, Cannabis indica
atatttgccctaagtcaactttacactcgggtggagttgacttgatgagatgatccgagttcattttgcttgaaactactacatgtgcatcaattttgatattattaggcaattgtatttgttcgtcaagcattcccaattgaaataagactttgaactcttttgtttagtccttggaaatttcaaaaatcaattaacaaagaaaaggaaaaaaaaatattttttttacttaccttatacatttttctttggaaatttaattttttttgtcatgacattaggattaattgacttggaatcctaatcctagtagtagttgccattcgaaattagagagagaaaagaaagatttttttttttttgatattttgcttatcatatatctttttcttttaattctccaatttttccttaatcttaatagcattaagatttcgtgttaccttttaaatttagattcctattcctattggtataggaatttctaaatctagtaaaaaggagaaaggaagagatataattatatcttttacttgtcatttactgtaataccctaagattaaggaaaaagattagcaaactctaactagttaattgtgtataattgtggaattatattattatataatttattatatgtaaattgttatgatttataatatgttaagactccgttggtgagccatgggcattttggtaattttgacctaagaggggtaaaactgagaaatttatattatgatgtgctatggaactatattattatatagtatgcatgttttattcttttacaggtgtgttctgataagttggcgcggtatagtcacaaccgaatattttgggccgaaccgggtttagggcagaaatacaattttaggatgatttattgactttttaattatgtgttaacaatttgaaattatttgaataatgtgtgtctaaggacatgcttgcccttggaatgtatgtatatatgttatttggccctaagggtatttgagtaattttgggtatatatgctattcttaattaaagcaatttctagtaaatgaaatggaaatttttagtttattttcacacccccataactgaccctctccctctccctctccctatactcctcattctttcacttgataattggtgtgggagtggtttgatttaagcttggtgtgtgtggaattttgtgcttgatctttggaagagtttaaggtagtgtttctaccatttctatattgagtttattgctgtactttatagtaaaatatatgtgaatcatggtttatgttcttgaaaatgcatgcttgtgagatgtagattgattatggtgtttgtggccatagttgtgttgtaagttatggatattgtgtatgctttggattatgaatttgagaatttttagttgctgaatttgagttagttggttgaataagcatgctgagttttgatttattttagtgactttcttgtgtagcttctttaggtgagaatatgtgaattcttgcttatagtttggagcttagtttggatgttgctaaatctgaacttagagggttatgttattggattttaatgcatgaatttgtgttttaactctctgtgttgttgagttaaaattatggagtatgattttgagttttgattatagtttgggttgaattgagtgtgaattgggcttgatttttcgaagctgaaattgggtttttctgggtttggaacctaggggtcgcggcccagctccatgggcggcgcggcccgcctctggtttgtggcctgagaatcgaacccaggtgccgcggccccatgtgggggtgccgcaacctgcccccttgtttctgggcagattcgaacgcgatattcgaatattcatagctttgtgatatggactccgtttcgggagttctatatatcattggaaagctcgtttcgagctctatgtgattatctgtgatttgaatgccaattttatattatgtgaaagtggaattagggattaaccctatacttgtaaatcttagaattggtgactaggattaccggtacttggtcaggagtacctggggatttggaatcttcacgttttgcaggacatcaagtaagacagttgttagcacgcagagttatgcgcggtggcgcttatattgaaaatgatacatgtgagtaattaaaaactggaattagggttattactctaacataagcggtttcatggcctagggttattaccctagagaattattattatgtaattgttatgccatgagattacaatatatgaacagattcagggttatgcgttcaaggcataatcaggttggactcagtacctagaaccgagatgaaccattctaaggccttattgtatatagacgtgtgagcgtaacacgtaggtctatgc

SEQ ID NO: 221307 - DNA, 3019 bp, Cannabis indica
actgtttatattttctgtatctgttcatgttaagaattgctttgaagttggtcatattaaaaacaaattgtcaaaaattaagctcatgatcctatttttatcattttacaaaatataatgtctattttgttatttaacgtaacttttacaaaatacgaggtccaaatcagtatttaccttatataaatcaaactttaaggtctcatgattttatttttcgtcactttcttaaaagacctcatagtaaacatccttatatatccatgatgttttttatttctaactaatgtaaaattttagttgcacaactaatagtgtctaattggtataatttaatatcgagttttatatattttactttaataaagattatagaaaatcgctaacgaattataaagcaccatctcataatgatgctagatattttagtatcccataacagatgctctttaataaataaagactcatcttaaataaaaattaatgaaaattacttatcatgtattaaatttgtatataattgtcttaactttatataaatatatatttagagctagaccgaaaagcccaacacatgcaaacatgtaaaacatatttaatttatttttttaattatcgtttacagatcaatttaaaaaaaaattaagaaaatttgggaggtcatggtactctctggcccctacctcgtcaatgttgagtgtgtatttagggttactcttttttttaaaaaaaagaactacatgttcattgattaagaaagtcgatgggaatcacagggggattaccctccccttgatacaaaacagccaactcactagcaattctagcattttagctacaccatccgccaaggtattaaaactacggttaataaaaaaagaagcgaactacagagagtactttaattacattgacaatagaataaaataagcttgacaccttccaatctggggccccttttcttgcaattaaggattgaactgcaatctttgaatttgaaagaatatgcacttcttgccaaccacccttgactgcccagttcagagcaaggagaattgcactgagttcagcttccagagctgattgtgcttgaattttttgagccttgacataccggctaccagtggaggagttaacagcaattgctgcaataccagcagttccacgcacccatgaagcatcagtgaagaaaacatgactaacctgcgtgatatggggattcaaaggcactgcaattcctaggcctactggtgtcgaaattggctcaaaatcctcacctctggatggtggattcgagtgttgaaactcctgaaaactgttatcgattcttgccaaagcagagatggggttagcaggattgttgttaatgcttaaggcatttctctgttgccagattccagagaaaagacaaccaatataatatggtgtaattgtataatctattatttttggtatggtaattctaatgattcaatactaaatattacactaattatgataccaaataaaaataatctgttttataaatttcacattttatattatttacattaataattaataataactaacttatgatataattatagatattgtcaataaataatttatgattaaattttaaaacaattaaaacattaaataataagagagtatgctgaaataatgtttagtatagtagtggagagtgttatttgaaagtaggtggtgacgagaataattcccaaactctatttttttattttgtttttaagaaatattaaatttgtgtttttggaggattgaaccttttttaagatttttttttaaaaaaattactactactctaaagtactagaattattattttaataattattaaactatttatatagggtccaaaaatttagtttcattttaaaggaataagtcctctagatatgattagtaccattaatttctaatagcaatgctcctatcaaattgagcaacaatatatttacattttgtgcatttaattatcaaattattattttagaagcatgcttaaagtttttttttttttttttttttttttttttgtatatatgtagttggttactttatttgcaatatatagattataatttcactcctaaaaaaataatttaatactttttttagagaaatataatttccatttataatagagatgataaagttcaaatacaatatttaaagaatatgaacaccggcacaaaaccattataattcgaagactcaccaagaaatttctaatggttttcctactaaaatctaaacaaaaaaacaaacttaaaaacctcacaacaatgagaagaaaccaaattatttagagtaaaaattagacagtctaaccattaaaatgacacaaacaaatcccttttagaggataagaagtggctaagcactcaccaagcttgatggagagcaccgaccaatagcctaaaggctaagttgtccttgaggcagtggaaacaaaatctcgagacaataaacactaagaaacaacactaaagaaaattcatctcaacgatgaacaagaaattaacactgattataggttattacacaaagtaaaaataaaaaataaaaacacccaaaaacccaaaacaagatcttcttgcttcgaacaatcacctaactttgggtgaagctcataaaaatacaatctttaaggatcctgactaaaaaggaataaagaatcaaatctaggattccattcacgatttgggatcccaatccaaggagaaaaatgacggtactacattggaggaactattgtctcattagtcaagatagaactagtggacgcttagtaagactctccactgctccaactagaactgtaaatatgggccaaactttttgacacggcacgaaattggcacgagcacgacccaacacgaaaaatatgaacttgggcacgacatagcacgacacaaaaaatataagcttaagcatgacacgcacgacaacaaacctgaatgcacgacacatgagcacgaatagactaacccaa

SEQ ID NO: 221308 - DNA, 1321 bp, Cannabis indica
atatatatatatatgcatgtctcgtactttgtttaattgtttacgtacgtagcgcttataattaatctctttctttgtataaatatatatatatatagagagagagagagagagagagagaaagagagagctagcattaggaatattgaagttgtatacgtacgagctacagttacgtaaaattaataataataatatatatatatataataatgatatattattgcttcatatatcattacatgaacaaatcacagttaatccttttttcattagtaatattacgtatatgtacacaaaattatgggttcccatcattctactacctctttcctcattagtgtcatattttccatagcattattagtaataatattattattgttcatcatcaaatttaaactactatttaataataataataagcaaatgcttcctccgggtcccaccccatggcctatcctcggaaacataccggaattcttgcaaaataggccgtcgtaccggtggctccaccatctcatgaaggagctaaacacagacattgcatgtattcgcctcggaaaagctactcatctcatcactgtcacctctccgaagatagccagagagtttttgaagaaacacgacgcagtgtttgcttcgagaccccacacaatggtcacaactctcctcagcaacaattacaaggccattgtagtgtcaccgtacgacaaacaatggaagaaaatgaggagagttgtgtgtgatgttctcagccactccaaactcacttggcttctcgagaagagaacccaagaagctgacaatctggttcgttttgtttataaccaagcgaaccagattgggggtggagtggtgaatgtgagagttgcggcacaacaatactcggtgggagtgttgaggagaatgattttgggtagaagatattttgggaggggaagagaggacggtgggcctggtaaagaagaggaagagcatgtggaggctttgcttagtatattgtcacatgcttatgcttattctgtatcggacattcttccatggctacgttggtttgacttagatggtcatcaaacaagtgttcgtaaagccatggaagtggtcaacaagtaccaaggctccttagtgaaggagaggattcaagaatggagagatagtaataataataagaaagcagaagacttgcttgatattcttatctcccttaaagactctgatggaaacccacttttgtctgaggatgaaatccaagcacaaatcacagtgagtactgtatacatgatctcatatatatgatctcatattagcatttctcgtt

SEQ ID NO: 221309 - DNA, 1737 bp, Cannabis indica
ggcgccttgaggattggtccatggacgtatgggagtccttgggcaatgaggaaaactgttcggacagtatcgaatggggcatgatagaagcgttgatacgttgacttggtgttggcatcttgccacacatgctaccttggtcacgagtgacaaggtgagcatcagtgttggaatttgccttatcatagtgggaacctatggacagtgcgagtatcttggcttgagagcctcgatgcatggatgcactcatggatgcttgcgagcatgactcggcgggagttgtttgagagacgaaagtgtgcacgagttacacggtggcgtgaaaaatgaacccattgttactcagatggttggaatgctgaccttggcttagagaagtcaaggtgctgcacgggtgttccgctgcttgaaaaggtgagcccgtgacacataacagcaaaacttatattttaatttttatatactgatttttattttattttattttatggccatacctttttaagtttatttttgtttgtaaatttaaaacgctaattaaattttaccattaaatgccaattaagattgccgctataaacacttgtatacaaataacattaaaatttcaaatccaatgaaaatatggtatgtatacacaagtgtacataattacaattcaattagaatttaaaattgaactagcacctttcatttataaataaaagtaaatttaaagagcattatcacacacaaaaaaaaagaataaataaataaagaattaaaggtataaaattaaaacatatgatatgaatgagcgggcctccccagaagtgttccttatgtatgatatttaagttcattttattgagaataagaaacaaaagctaaccttgtttaatagaagcattagcctgaggaatgttacgcgccatggccatgagcagagccatcccatgctcggcagcagcaatagtattggagttaggggcattgacaacaaggcagccgtgttctgtggcggcagacaagtcaacattgtcaataccaacaccagctcgccccaccaccttaagtcgacccccggacgactcaaaaacctcgcggcttacagtggtgccactcctgactatgagggcatcgcatagagagatcttggtgcagagctcctcgggactcaagttgtaagagcagtcaacgttggcgaatctcttgagcagttgaaggcccggttcgcccagcttctcagtgaccaagatggtgggcctggcgtggaagaaggccttgatgatcagggaatttgatttggcagggcggagaggaagattcttgattctggatgagacagagggtggagcgtgtttgtttagcaacctgtgaaggtgagacttggccaagatgttgatgccatctcatctcactacctgtctgcctcttctctattatgtcagtcatgtggctgtcgttaaatcttggctatttcctattggtcttaaaatgctgtctctataatctatctaatccacactaggatacttctttctatttacatccacgttgactctgttttattcgctcattcattcactcactctgttttcaccatatgttttcaaatttaacttttggatcctcatcaattaaaatttattatttatccaattactaaaatatctataaaataataggtatgtgatgctgaaacacccttccattagatgttgtattatatatttttgtagctaccaagctttaatc

SEQ ID NO: 221310 - DNA, 2707 bp, Cannabis indica
tttttcaagtaattacaaagtttggccaacactagctcgatagattagcgagatgcgcaatgatttaagtaaatattaaaagagaaacacaccaaatttatagtagttcactccttgtgtcatgatgataatggggctccgtctacttcgatttttttatttctcataagaattataagaaaattgactaaggtaagagatcaaatttttagagagagatgctctgaccttatgtgaacttttctaaatatgaaaaatgagcttgtggagctcttctttttataagcaacgatgtccattaacaaattagtaaaataatataaaaaatatggaaaaatatttctcgctgatcttgaccattgatgatgatctaatggcaaaaatgactgtaaatcataatcaaaaaaatttgaagctcgaatcgtgtctgttggatcgttttcaggcttttcaaagagaaaaatcatacttgacttggggatgaatttttgtctaaaaatagcttgaaaagatctttcaaatacaactggaattgtgtcaatcagatcaatattgagtgagttatggtcgttttattgaaggatgttcagcaaccggtgccaaggttgacatctagtgcccaggatgaaatccagggcccaagttgacattttgacgtcaacctgaacattgtatgagtgggaaaaagtatcggacttgtatttttatgcctaagtgatattctaacgtcatttaatcaatttcttagttatagtgaagttttgcactagttctcagagatgtcacttttttgtgaaatcatgtagacttgaaacttcctgatttgcgactattttgccgatattccactttaccaaaaaggtgaattattgaagtacgaatttaacttgtcacaagtcataactctcatttactataaaaaaaaaattgtctgatgctcaagaaagaactggaatctgataagaagaacccagcacactaggtcacatgtcaacttgggtgctgggtgctccttggtgagcttcccgagactcgttttgatacttctatagcattcgagattgcaaacgaggtctcctacctcattttggaccaatatatgaagaatgctcatagtagaatttgtgtttgagcaacgaaaacacgcgaaccaggttgaatgtcaacctaagcgcagggcccagcaccagtgtcaacctaggcatcgagtccctatttgggccctcaaatggtctcgttttcttcccgagagcacttgtatcttcgttatagatgaaaatggataaaattccaagagacttcttgagaaaaatgcttggaactggcccaggttgacaaaatgtcaacttgggcgctaagacctagcatcaagtcaacctgggcactgtctccttattctggctaccagatggctctgtttgttttccaaaagtacttgtatcttattttttttatgaaaacggagaatatgactagaagactgcgtcaaaattatcatcgaaaatggtccaggttgataatatttcaacctgcgcgctagtgaccatgcccaatgtcaacctggttgctgggtcacctgtttggcctccaaattgatatgtttctttcccggaagcacttgtttcctcattttaaatgatgaagaagaaaatttccatgaaacatcttcagaaaagtggtgggaagcgccccagcttgacaacatgtcaaccaaggcgctgggtgcaccactaggtcaacttgggcaccggtgcctaggtgcctcaaatgaaaagtgtttcgattctaattttggtgcttctagcatgcttgtgacaggtcttattcatgtctaagtgtagggtttgagaaatctgcactaagatggacctgaaaattgaaaccctagctcgagatgtcaacttgggcgttgggttaaaccctaggcactcgggttggcttccgagatgccaatttgacattttttagttcccaagcttcggagttggagtattcttgacttgttggtttagaatactaaaggattgtgatttgtaaataatttggcaggatccaaatacctattctggagctcccagagacaacctaggtgcggggctagggacccttcccaggattgactattatgacatagatacttaactccatgaatattttccttcttgctacatgttaaatattgatgtctacgtcatcaagactagtttctgaataaacattggtaaatacgataattataatacaagaacaatgtgaatatgtgaaatggaaaaacccaaaatgatatacaagtctaccaccacactttgctaaaggcaccagtgacatttatattcatttgataaaattaattatttcattgatttttttgctaatttacattcgactaagagtaccatcctaaaatattcaaaaatgttacataatgctttaaatctttgccatctctaatagtggccaaaaactcgtttggaggagtttagagacagggttgtcgggttgggttgacaaagaggggatggattcacggggtctcatcagggtgtgatcttggcgctgcgaggggtggaatctagtgtgatacgactgcaaagcaacaagttgggttcacgagaactcatcaaggtggaatattgttgccgcaaggaatggggcttgttgtaatattgtcgctgcaatagggatggattctcaactggtggacctc

SEQ ID NO: 221311 - DNA, 5512 bp, Cannabis indica
gtgttggtcaagaataggagttgtttgttttcttccagttttttgtgtaataatagtgtttatcatcctatcctttgtgatgctgattttgttaccattttgtgaggtctcccctgtgtgtctgctttgttgtgttagacgtttgtcaatgtggggtgctattgttttattatttcattgtgagatttgtgcggtcttaatttttttcctaatttgtacagcttggtccccgttccgctaaatgtatgggtgacaaaatgagtttcgacacaacacacgaacacgacacgacacgacacgaattttatgggttagggtcgagaaaattagacgcgaatcgaagaacgagttgacacaacttgacatgaaataaaaacgggtcaaacatgacacaacccgcttaacatgaatttaacatgtttgacatgatttttttaaatataataaaataaaaattattaataatgatataattatataaaaatatatatttagtgattcataagttaaaaatttaaatttaactttttctaatataaaattaaaaatattttaaattttttaatttttattatatatgtaacaaattatatgtacataaatgtatataagttttctaatggaacctaaatttattatttttctctataatgccagcttcaataatagcaaaacgggtcacaatgggtcgacaagaacacaccacaatttttcacaggtcgagttagggttgagaaaattaaacacgagtcaaaaatggatcaacacgcctgacacgaaatataacagttggtcacataaaatatgacacgaacacgacacgatgacacgttttgccactcctagctaaatgttaatcatctttaaaaaaaatcaattaagaaaggataatgtgtaacgcaaatacctaaatttaattttcaattataaataaatgcatacatttaatttttgatgataataatattaagttaagtgtcaagtaaatggtcaaatagtaatctctaattagtacaagtaattaaatttttatttttaatttaaaatttatttaaatataataataaaaaaataacaagtagatttaacaattaacgactaaccacaaacacaaatcatagctttttaataaaataaagcaagagtctggtcctctgacctgagtttattcgtttgtgttggttgttgtcttctatagtgtatctattgtgtcatggctgatcaagatgttatggatttggaaggggagcggcagtatgatattatacaaggggatgaagatgatgaggggggaataatatacgagtcaggggagaaggagttgtctgattttgatgattgctggtgcctagtgggaaaatttcttacagatcgaactttagatgtcttggcaatgcagaacaaaatggcgtctttatggagaccaggccgtggtctatacgttaaggaactggatcagaatttatatttgttccagttttatcatgatgttgatattgatcgtgtgatcgaaggaagtccttggacttttgatagagtgccgttagttttttctcgactcaaagaaaatgaagctccacgctctgtgatcctaaacaagttggatttttggattcaacttcatggcatgtctactggttttatgtcagcaaaggtagtgagggacattgggaattatattggcaaatttgttgaagccgataagaataacttcatgggaatttggcgtgactatcttcgtgttagagtgacagttcgagtggacttacctctcaaacacagaatgagattagaacaaaaagggggtgaattttgttatgcaaattttaaatatgaggatttaccaactttctgtttcatttgtggaattcttggtcattctgagaagttttgtccaagactttttgatactcctcaacatttgatcaggaagccttacagtattgatcttaaagctatgcccaggagacgccaacatacaatcggttccaaatggctcaaacaaggattagctatgaaaggtggagttgatacggccaatagtagtggtggtggtcaggcggcggactcaacaactccggggagtgcatcaggcaatcacagtaatggcacgactaatcaggaggctaattttgtgggatttaatgggctgcaatcgtgtgaagataggggtaataaataccatatcgcaccagctggtatgtttgaagcaaatccaatctgttcccatgataataggaacgtgattgaggatgagtcaggtgtggatggggatttaatgatattagattctaaaaggaaaaggctggaaaagtcaggtggtaatgggctgacttctgttgttcatgggccattgttatctgagtccaaggatgggccaaaaaactctgttggggcgggttctgtttctcagacccgccaaggattatgaatgttttgagctggaattgccgtgggcttgggaaccagcggactattcaattccttaaggagaccgtgtctcataagaagcccaattttattttcttgtgtgaaacaaaatgtgataaaaatagaattgcttatgtgggccgatatttgcaatttgaaggtgttttttcagttgaggcccaaggaaggagtggtgggttggctttgctttggaaaaataaagaagagtgtactgtggtgggcttttctcaacattacattgatgcaatggtggatactgaaggcagtgtcaattggagactcacaggattttatggtgaaccaaaacgatgtcaacatgaggactcttggaatttacttagatctctcttcaaaccaaatgttgctctctggtgcgtaattggagacctaaataatgttttgagtcaaagcgataagcgtggtggcaacatctaccccagacgacttattgaaggctttgaacaaactcttcaggcttgtgatttgttcgacatggagctggttggtcatcctttcacgtgggaaaaaggaagaggtactgcaaattggattgagtgtcgactggacagagctctggtttcttcaacatggtttcagaaatttccaaatgcaaggttagttaaccttgaaatttccccctctgaccatagtccattactgctcgaatttgttttacctgatatctcggcacctagtcgaagatttcgtttcgagaacgcatggcttaaggagccgttatgccacgagatcgttaaggactgctggagtactcctggtgttgctgatattgagtcaaaaatcatgctttgttctgagaaactagctatctggggtaaggaaattacaggaaatttcaagaaacgaattggtgtttgcaggaaagagcttaaattgctcaaaaataagcaggaccctgcttctatagctcgttatgctgaagtgaaaaagcagctttttcttatccttgatcaaaaagaggctttttggaaacaaagggctaagcaattttggctcaaggagggggaccataatagcaaatatttccatcgtgcggcaagtaatcggcgtagtttcaatcaaatatcgaagcttcaagacaatgatggtatatggagagattgggagtcgggtttatcttcggtggtggtgagttatttctctgatttatttactactactggagccgattgtgatgatattgttaattgcatttctaataaagtcactcctcaaatgaatgaaactcttctagtacctattcgtgaagaggaagttaaaaaagctattttcgatatgcaccctgataaatgtcctggtccggacggaatgactccgactttcttccagaaatgttgggaggtagtgaaaaaagatgtcattgcagttgtcgagaatttctttcagtcagggatgtttactccgaatggtggtgatgcgaatgtagtaatgattccaaagaaaaaagtgcctgtaaatatgggggatctgcgacctatcgctctttgtaatgtcctttataaagtcattaccaaagtgatggctaacagaatgaaaaattcatggatagtactgtctctgagtctcagagcgctttcatcccaggaagatttatttccgacaatatcttagtctcttttgagatattacactatttgaagcggaaaaggaaaggaaaagacggtttcatggctctaaagcttgacttgagtaaggcttatgatcgtatagaatgggatttcctgaagaaaatcatgctgaagctcggctttgcgaacgaatgggttcagcttgttatgtcctgtgtttcctcggctaagtacaaatttatccatggtggtagagaaatgggtccggtgataccttcgcggggaattagacaaggcgatccgttgtctccttatctctttattatttgtgctgagggtctgtcttcgctgatcaagaactatgaagataaaggatggattcacggttgtaaagtggctaatggagcgccaagagtcacacatatgctatttgcagacgatagctatttgtattgcaaagcaactattcaagaagctgtaagaattcgtgaccttctatttaagtttgaaagagcatcggggcaaaaagttaatctggggaagtcatcaatcttttatagtatgaatacagagttgcattggcaaactagtataaatgctctacttcaaatgaccactgcggatgatagaagtatgtacctgggccttcctagtaccatgggacgtaataagtcagcggtgttgggttacttgaaggatagagtgcgtaaaaagctacaaggatgggactcaaaagtgttgtctcgagcagggaaagaggtattgatcaaagctgtagcccaatcgctacctagctatgctatgaatgtttttctgctgcctcttgagataagtcgtgatattgagagctcaatggctggtttttgatggaaaggctcaaagaatggcgacaaaggtattccgtggatgtcctgggacagaatgtgccttcccaaggacaatggaggtatgggatttcgtaatctcagggatttcaatttggcccttttaggaaaacaaggctggcgtttcttgacaagatctgattctcttgcttcgcgagttttcaaagctcgttattttcctaatggtagctacctttcggcttcacttggttctaacccaagttacgtttggcgaagtgtttgggaagctcaaagtttagtgcggtctggtgttagatggtgcattggaaatggttctttaatcaacattcttaaagaaccgtggcttcctgacccagatttcccctttgttacttcgacacatcctgcattaactacctctaaggtatgcaatctcttcaatgatcaaggcaacgattgggatgtggatattttgaatgacttgtttgacagtagggataggcagttgatacttcaaactcctattagtgctgcagcttcatctgatatggtgtattggacgaaggagtctactggtatatacacagtcagcagcggctaccaactgcagcaagctttaaaaggcaggaa

SEQ ID NO: 221312 - DNA, 4103 bp, Cannabis indica
ttacatattgttgtatctgcaccataattacattaactattaatcaagtaataataaatttaatttacggaggatttcaaaaataataataattaggactatcttaaaaatttaaaaacaaccaaaaaaattacgtttttacaaatttttaatttttcttgttttacatttttatagattttttatttttttactaaattgttatttttggggctgttctaagaaaaactattatttgcacgtttttcacattgcaaaaatataatataacattacggcaacatgaaaataacattatttttccggtttgagcctggaaaaactcttgtgaagctcttatcaaacatgtagaagcaatcaataaccgtgtgcccaagcttatgacaaagcttgcacactgcacacgatttgctggtgttgggaacctgccacctttgttgacagtagaaacaccacaaccatttgtaaaagtagacaatgcataattgttaccggtgaaagttccacgatttgagtatccacgacctccgccacgagatgtggataggggagaaggagcacgattatagtttgagagtatggtgcttcgatttgaataattctggtaagcaacattgacctcagaagaatgatcaagatcaactgttgcaagattggcacttagatcaaaatcttgatcaagatttgtcttctttatccgagactcagaggcaagcaatagggcttcgatttctgcaacagaatattcttcaattctagtgttagaagagatgatgaaagtgtcatactcactaggtaacctttgaagattgcagcaatatgatccctgagacttagaatttatccaacagacgcaagaagatcaacatgctacttaactttcagaagatagtcattgagagacattgatccttttcgaagcttctgcaacttggttcgaaattctaagatcttggaagaaatttgcaatgtaaagtgcttttcaagtgcgttccaaatctgtcgtgcagtatggcatcccaccatgcgtgtaaggagacttctggtcattaatgatagcaaccaactcacaagaagttgatattgaacttcccaatccagaaattctagattgaatgtgttcgaagcttgatcaccaccgctcaagaactgaggtggtggagctcgaccctgaatgtatttgattagtctatttccacgaatcgtagttaaaacttattgtttccacaaaagataattgtgatcatttaatctaatagacatattatgattaaaatacacaagattaggttcatcggagttgcttctcggtcgattgaaaccagaggctccattttgttgattttgagctctactggtgttggagttgatttgattgccattgttgtcgattcctgtgcttcccatgtttgctatcaaggaagaaaaaggttctgataccatgttgaatctcttggacatgactgaattgaaagacaataaaaaacagagcaagaatgaaagaaagtcacaaagagaaaacagaaagagagtaaagaaagattgatgaaacaaagagcaatctcattgatttagtgttgatggtacacagttttataatgacaaagattagagttagaaattaaagaattagttacaactgaacacaactaacaactaatctaacagatttgttgtaacagactaactgttacaactgtcactaacggtcacaaccgtatacctttaacaatgatgaaagctacttgaaataatatggagccctaggttgttacaattagtcacacccaatatggcacgtggttaagtcataattagcttagattagtagtactattagtgagtcatgatgtgatgagttgggctagaaattaaagcatgcatgcatataatcctctctcgtgctatgtttatcttgctcaatggaatagagctgtccatgtctttgattccatacattaattgttattaattaaatatatataatataatatattccaataattatattaattgttgggaattataccatacatttgttatttaattatgaattagatcgcgatctctcaaagttataaatatgtatgtgtgaatgtgatgatttttaaagtcattggtatgaaaaactttacaaccccatttctcctcttaaacttttttaatttattttattttttaataaatatatacacatacccactagctactatctataatgattgcatcgctatggataattatataaaaaatagttcaaccggcaaatttttatattacaatctttaatattaatttttatgtctgaaaataattacttatatatttttctttttaaaaaaatcatatttgtgtttattatactcacaatattatgtctctaaatttttaaaaaaatttaaataatttacagtatcaaaaataagtttgaaattttttgactatacatggtaaatattcagaactctattttcagtactataataaattattcagaattttataaaaatttataggaataatgatattgtaactataacggataccgctataaattttttttaaaaaaaatattatggcatatgtaatttcgagcggaaaagttaacgtaatagaaaaatataattatagcactcctcttatataaatttgttttatagtggactcgaattgagtctttgtggtttggtcgattgatgcccacatttatttaattcagtgtttagttcacctatttatatgggataagttgaaaaatatttctttttttatctattaattaaaaatactcacatattaattttttattaaaatatacccacttttttaaatggactgcctaatatactctcactgtttacttaagtcttaactatataatttacataacttaagaggtctaatgggaacatcattcataaaagtgagtatatctaaaaaaaatatgaaaatggaggtaaaaattaaaataaataaaacaaagtgggtatactatgtaatttcctctatttatattggaaagtatagttatatgtaacatgtacatatatttgatcaatatttgatcgtttcaataattattgaaataataaatattttgagaatttccatttcaaaactaattagtaatgagtgaagtagcttatgttcttatatatggttcaatatttttacatttgatccatgtagggcaatattatccaataaaatatattaattactttagttacatattaagcttcattgaaaattttgaattgtttgataaaaccatatctcataagctataaaatctaacaataagtacaagttcatacaaggcgaaaaatttctcgcatgcgttaatatttaataacaagttattattgcatgtgagattaaaaatatatacatattagcgatcttgatctaaaattgttgatgatgcaattttattttaattacttttgtttttctctgcccaaaaataaatcttctactatcactctaatcgtaattttatttctcctctttttctatctttatattttctaactcaatttgagaatttcatatcattaagtaatatacttgctaaactttttaagttttaatgatgagttactagactaagtatttatacatgtatataagttatacaaattagtcacaattcaatggaagaaaatgtagatacttcaaaacattactaattaagaatatatgaagtagcaaaataaaggaatcctttgagtacaataataaaaagagcaatattcaaataatagtatatataatagttaggttaattgaaatgtaaatatacaaatataataagaacatgtgaatatgggttgagagggtagtcggttttgttattttattaatttaaattgattgatttttggatggagaatgagtgcaaaagtgggtagcttagctacactttagtgttctcatcaaccgacttcaatttgaatccacttatccatttcatagtattttacgcacattgtattcctacaaatccttgttttatgaaactaactctttttcttatgttttatttacaatttatgatctaaattttttatttataaagattagggatgcacacggggcgg

SEQ ID NO: 221313 - DNA, 3302 bp, Cannabis indica
agtgaaaattcataaataagacatagtctagttttaaattataattgattaattaaaaccaattaactaagtctccaagcagtattatctcaactagtgtgaggaccatgagcctatataatcaagtttccaataagtagaactggaatttaccaagtaaattctctaacttattaattcctcctcgcgccactatagattaagaattacactcttaattatgtagaacgctatatatgtaccaagatatatatacactataaattatccatcgttctaatacaaatagtcaaagatcctctatagatgatctacatcgaataggaataaatttactgtcatacccttcaatgtattttatccttaaacacttagctacctataaataatatttcaataaactaatataattattgaaatgagatctcaatcatttatctctattaagccaagctcgaagaaaatcatcgtttcacttctaaatacttatagaagctatagattccatatctatgattagcgcttccactcaatttactatcatgttcccaagatgtaagtattcgcccaaaccattggttagctttcacaaacaactctaagaacataaataatacaattgagatcgaatctaaccatctcaggattaagatctattgacttaagatcaaccagtgatattacttagaaagatataactgtaagtttatgatatcttattcaagttcaatatcggtccaatatgatgtatactctatatatccaatatatactagcatacttccaatataaataaatatgtgtgcattaaatttgatcaattaatttttcaagtcaatcaacatctaatccgtacatatgcggattttaaattttcaaatctgtacaagtgtggatgtctacactttatgaattagattaaattgaatcatgcaaattagattggattgactattttatgaacaccatatatataagaaataatgattagtgatggaaatttgacctgcagggacgggtacccgcaagtacccaccccgaatggagtgggtattacccgccttaatgggtaatggggcgggggcaggatgcaattttgtatacccgaaacgggtttggagcgagggcatgggttatactattcaccccatatttgacctagatatatatatatatatatatattttgaatggaaatttaaactttattaaaccttaagtttcgccatcaaagaaggtagcaaattaattgtaacagactccaaacttaaatgacgatcaggatataatctagcagctctagtaaacgtgtgagccactacattagcagatcgctcaataaaagagacaataacattagttaaagatgcaagcaaaactttacatatagtttctaaacattctatatagtttataattattccgtattaaagttattgactatacttacaaaatttaatattaatcttttttattttacaatgtaaaaaagattttaataagtagaatgtttatttattttaaagtcaagatcttatttttttatttttattttgaattatattacattattctcttcatattattgttgttttaattttaaacctaattaggattctcctaccctaaaacccatccaaaattaagcgagagcaggaatgggggataaatgggaaacaaggacatgattgagaggtacattactctctttattacctaccaaatttccattcctagtaatgatagatatacttccaaaatataagaactttatttaagtattatatagtggataataataactcatcatctgaaaaaaaaaaatagtatgcagttttaatagtgtgcatcaatactcattattattattattattattattattattattattattattattattattattatttgtaattactaatttggcacaccgaatttgatgggcgatacacatcaaattcaattcacaatcacacccattaaaaacgagttctattttcttttgttatgagaattgttaaaagctactatcaatgtttaatatattttttagtattataccacaattagtgtaattaaatattaaattctaaaataatttttatgaaatatcgttaatcaattataagacactacttatcaaaagtgctaatactacatccaataacaatgctattattattttatatactaaaaattttaaaaaaatttaatttattattcaaatgtatcaaatttccatcttaaaaaacattaatggtatgtagccccgggaagaaaaaacaaaactttaatgaaaaaaaacattaatgcctgtttggcttttgatgaaaaaaaaagtttatagtaatggctatatattgtctaggctctttagggattaacttggtttaaattttaattttttttaaaccaaatcattattatagtttcttaaaaatttaaaatcaaatcaatccactaaaaaatatagattgatttggtttaaatttataatttgtatttcctagttgctccttttttttttaaggtaattgtttatttttcgataatttcttttttttttcttttaattagtttattatataaataataataaaaaaatctcgaaattaaaccaatttcaatattctatgatctaaaattattctcaaatatcactattctgtctaaaaaattatgtattaagtaaatataaaagaattatgcggattaatttagtttgcattattagcgaaaagtttaaaatcgtgatagaatagaaaattgtaaactgttcggattgatcaaactgtataaataattaacaattcttatatctagtactattagatttgtgttttttttttttcttttcttacaatttggtttaaaatttcattaaactatacaaaatacaacctaaataaataggggtcaaaatacaacctaaacaattagtttaaaattattaaacagtacaaaattatttttttcagaaaaaaaacccctatctagtccacatttaatctagaaaagataaaaaaatctaattagctttttttttttatcttaaataaaaaataaaaatcctagaatataacaataatgataataataataataataataatgtatacagtggagcccagtgcatacaaaatttcggacgaagcgactttaagcactcaactcttcctttccttctcattactattcctattacaatttagacatttcctaatttatatatatatatgatctcaaattcccctcaaaccaactttaccatacaatccaatctatatatatatatat

SEQ ID NO: 221314 - DNA, 1429 bp, Cannabis indica
aaaaaaaaaaaaaaaaaaatagtcaatcttgaggaagaatattggacaataatataaaaaatattaatatggaacaatataattcttatcctaatacaaactaaaattagatctatttttacttttattaaaattaagagataatatttagacccgtaactaaaggaaactgtagagcaccagataaaatcaaccaattatttgtcatgactccacaatgcacgttatgtatattttattttataaaacaaaaaaatgaaagcgctcaacatggacatgttaccacttaccaagtaccaacacacaaccccgtttccaacgtggtatatatgttggatcagtaatttagtagtgtataaaattaattaacagatatgtggttaaagcttttatacgaatctactgtacagtctgtacattagtgatactatacatagatcgggttctgcgctgggttgggattcgagcacggagtcaaggtcgattcgagagccgggagtcggaccaggattgagtctcagttggagtcagagtccaaattcaatctagggtttgaggcgactagcgcggggtctcagttaaggtctgggccgggagctaggggcggcaatgggtcgaaattgagataacaattttataaatttatttttattaattagggagacaagttttgacccttatattttcttttttaattcattatttataactaaatttaattacaatattttttacattgacctttgtattttatttaatccagtagtttaaaattaataatgtaaaagtttatgtccacgagacctttatttatatatatttataataaaaataaataaaaaatttcacggagcaaacagaattattttgttctaataaaaattaatcctcttttattaccataaaaaatcaaaaagtttaaagtcaatgaattaagtaaatttgagctttcgtatcatgatagtcttttttctttaattggtccgcgggtataatcttatacaatatgcagatagttgaaaattcagtagttaaaaaattattataagatcaataacagatataacatatataaatatgtacagtgtacttgtattatatgtctaaaaattaatattcattttaaaatatatatataaatatttatatatatatatatacgagcgagattggtgtaggtacatgtattatataattaatataatagtggttacacgataaacaactaaattattactaactctagcaaagctgttagagtatattacgggaataatattgttcatttgacatgcattaaaagatcgcaatcccgtaattaatacatgactgtatagacaaatttaatagaaaaaatatatataatttcttatgatcatctaatttttttaaaaaaatatctcatgaatcatgatcatctagtaattac

SEQ ID NO: 221315 - DNA, 6043 bp, Cannabis indica
attttattcatacatcattaatcattacagtgataaatacaacatttatacattaaatttactagtagtaaggtcgtaaatgttcactgttcttagtgattctttattaacgagttgttaagccaagctaatttataaatcctggttcctacgacagcttcaatgacatatggaccttcccagtttgggttaaacactcccgcagctggatctcacgtatttgcaaatacactccttaacacaaaatctcctactttaaataaccttttccaaactctcttgttaaagtatcttaatattcgatgttaataagatgcattggttatttgcgaatcattgtgtctttcctcaagtagatcaaaggacatgttcaaaagttcttggttttcttattaattataaaattcacgcctgtgggtcacaatgttaacttatactggtaacattgctttcgagctgaatgtcaatgaaaatggagtgtgtcccattgctgttttctctatagttctatgggcctagagcagttgtggtagcttgtcaacccatcttccttttgccgtgtctaacttcttcttaatagtatcttttaaggttttattaacaacttctacttgtccatttgcttgaggtcttaatactaatgagaagcttttaataattttattcctttcacagaactttgtgaataattcaccatcgaactgagttccattatcatatactattttaatgggataacaaaatcgagaactttttttgcaagttatagaaactagaggttcagcctctgtccattttgtgaagaagttgtctgccacaactgcgtaatttgctccaccttgccctgtgggtaatgccccgattaaatcaatcccccatatcataaatgggtatggtgaggtcatcattctcagcttggttggtggtagacgaggtatatgtgaaaacctttggcatttattgaatttctaaacaaattcatgtatgtctttgttgattgttggccagtaatatccttgacggataatcttcttggatagactctgccaacctgcattagccccacagaagccttcatgtatttctttgattatttcatttgctcctgcaggtaacacacaccataagagaggatggaataaccccttttgtacaattttccctcgaccatcgtatagtgaggtattgagtataagagtttgtgtgcctcgatttgtccataggaagttctccacgactagatacttgacaattggtgtaatccatgttggggtagtatctatcattttgatttcttcctcttcacatatgcttgggtcgtctaatacttccaccggtaccaagttcaacttatcgaggtcaaattgggatgctagctttgataatgcatttgcattagagttttgttctcttagaatttgttcaattttaaaataatcaaacttttccaagttcttctgaaccttctctaaatatttttccttctttaagcctttcgcttggtattctcccaagacttgatttacaatcagttgcgagtcattatagcatgttgtatttttgacttttagtgcctcaactgttctcaaacctgccaacaaggcctcatactctgcctcattgttcaaggtatcaaactggaatctcaactcgtagtggaatttgaagtaatcgggtggcatcattataactcctgcccccgagccattctcatttcaagccccatcaacatataatttccatgttttggcctcgcgcttaaaatttgggtcttcttttgagtttattccttcaattagaaggtcagccaaagcttgtcctttgatttgacactcgtgggtggtaagttacgtcaaattgccccattcgaccatttatcaatcttcctaaagcatcagattttgataaaacttgtcttagttgctgatttgttaagattttaattgggtgtgcctagaaatatggttgtaatttgcgagatgcatgaattaggcataatgtaagtttttcaagaggtgggtatatcaactcttctcccagtaatattttactaacatagtaatcaggttgttgtgcttaccctcttctcgcactaaagtttcactaatggcatgctccgagacagttagataaatgtataaagtttcttcagttattggtttgcccaaaactagaggtgttgacaaatgcttctttatgcctttaaaagttttctcgcattcttctgtccattcgaatttcttattgcctcataaaacattaaaaaatggaaggcatttatctgttgactttgaaataaacctgttgagtgctaccatccttcctgtaaaagcttggacttattttggctttgttggtgaaggcatctcgattaaggccttttttttttctccgggttagcttcaattcctctcacattgaatatgaaacccacaaattttcttgaagaaactccaaaagaacactttttagggttaagtttcacgtcatacttccctaatatatcaaagcattctgcgatatcctttgtgtgatcttcacttttaactaactttaccagcatatcattaacgtagacttccatatttatccaatatggttatcgaacataccatttaccagtcgttagtatgttgctctagcattttttttatccaattggaatgactttataataataaagtcccatgtttgttacaaagctcgtatgctcttgataagagacatgtattttaatctggttatatccagaatatgcatccattaaagtcatcaactcgtgtcctgctgttgaatccactaactggtcgatcatgggtagtaggaaacaatcttttggacatgccttgtttaaatccaaaaagtctatacaagttctccaggtgccatttggttttgggaaaaggactaaatttatccatgagggataaaatgcctcgcggataaaatcattagttaacaatttgtgaacctcttccttaagtgcaacttgtctcttaaaatctaatggtcatcacttttgttgctttgctggatagttggggtcgatattcaaatgatggaaaattatttctggatttcttcctaccatatctgagtggctccaggaaaattgatcctggtttgcctttagaaaaataattaattgctattttagttcttcctccaaatttttcccaatgtaaaaacattttttgggattgtttgtatctaaattaacatcttccaactcttcaattggtttgagttggttattttcatcttgaattcttgggtccaagtcctcatcttccctctcgttttcctcatttaggattaccattagttggtggctggctctcctattctgaagttcatttcgataacattcttgagccaataactggtcgcctctgactactcctactcttgtttgtgttgaaaactttagggacaagtgtttaattgaacttactgcccctagtctaattagtgttgaacgacccatcaatacattgtatactgatgggatatcaacaactaagaattcctgcagttgtgtcattgataagggtggttctcccatagctaacggaagctcgatgatgcctaagcttgcaacactgtcaccagtaaaaccacataggctcaccatgcacggtctcaattttgcattctctagccccatcttttttaatgtgtctctatagagaatgttgactgaactcccattatctaccaatacaattttcacccttttattggcgagctggacaattatcacgaggggatcaaaatgtgggtaacgcacatattttgtatttttttcggagaagataattggtggttcattcaacttcgctttctttactggtttatgagcaaatgccaactattcactttttaatttcatttatatatctcttttgggcattattattgttttttgtgggatgaggtcctccaaaaaataccaagatatcctcgccttcaataggcagaggttggaatctcaaattgttcaggttattaggctggttaggctcgttccttgatgcgtcacatactacctaaagtatcatcacgagatcaaactttctatctcatcctcaaattgacggcattccttagtggtatgccttatatctttgtggaatcgacagtattttattgaatctcacttgtgcctcacgtgtctcattggctcgggtttgtgaaatgtaactctgttttcgttagagaagatattctcgcgagtttcattcaactcagtatataccgaataaatcgatacgtacttgtcatgttttttctatttctttttatttttggatgattctttcgagtcatcctttctttttgtgtttgtaccactaggattgtctaccttcgtgatgactgtgctcgttgttgccatacttgtgctgggtttacttctcgtgccagttttcaacaacttcatttcatttcttgcttcctctttacgcacaaatacgtgtgctctttcattgaattcattaatattcattacagggagaccctggagatcatcccataattcatctccagctgtagataagtcagttatgattcctgcctgaagtgttgtgagttgaatactgccattcaggtttttgacttttgtagcgcatgtgttaaagcgacttaaataataagccttaagttacttgcctttacctggttgttgctttatgttggttagagatgacgcttcaagtcgtcgatcttttgcagcctaaaactgctttataaagtccgtagacaactgttcccaggatgttatggaatgatgggtaaatttatcgaaccagctgctcacagcccctgttaaagaggttggaaataaaatgcaacgcaaattattcgtgacattgttggcttgcataatagtgttaaagttttttaaatgagctactgggtatgtggttccatcgtactgcgagacatgcaggttcttgaatacctgaggaaattctgaattcaaaatatttggatggaatggctcagtttttcatctgaatcgtagcctggcaattttggttcaaaccattattcacttcttgttgataataatcatgctttacacttcacttctaaccattattccattcaggacatctctcaaacattgaagattgggactgctaatagacttagaaatctctactacattcaacaagagatcccttccaatcacatttcatgccatttcttgtaatacacaaatcactactaactaatagcatactcaccttggtcatccatctgtaataataataaataaactcaataaaaagttacattgtacttctgaattgtctcacccttttaattgcaaaatctgccattttgcaaaacaaagaaagctaccatttaattctcataccagttttgcacatcatatttttaatcttgttcatatggatatttagggaccttatccccttgattcaattgaaggatattgatacttcttaacatttgtagatgatcactctagatatacttggatatatttacttaaaacacaatctgatgcagcacttctcattttactttttttcacttatgttaatgttcattacaaaaacaacattaaagctgtaagaatagacaatgctaaagaactcaccttgacaaccttttggtactagcaaaggagttctatatcatacctcatgtgttaacatgcctcaacaaaatgccactattgaaaggaaacaccaacacatattgaatgtagctagagcactagcctttaaatccaatattcctcttgtatattggagtgtcctggtaagaacctctgtttccttaattaatagaactccttatgtgctacttaaagattgaacatcttatgaaattttgaataacaagtctccatcctattatcatctaagaaactatggttgtttaccttatgcttcccctcacaacaatagccacaaactgtcccctagggccaaagcttgtatcttcattggctgccccacacaggaagcttacacctactgaccttcatctaatcacatctttcact

SEQ ID NO: 221316 - DNA, 2833 bp, Cannabis indica
atgcaacttcagccttccttcgcaaaaaacgaagctggtttcataaaacttcaatgtgaatctcatgcggcctgaaatgtttcaccctctggctctttcaagcaaagccagtgtctaaattttttgcacttttagcctttcctagaaaaagcataaagtttgccattacaaaattcagcatgactctcgcttatcgaagcaaacctccgtacatggaaaattttctgcgcaaggatgcaagcccaacttccctccgcaaaccaaaagcctgctgggtcgcaagagcctatgcttccccttacgcggtccatatcacggaggaattatttggggtcagccatacaactcagttttctccaacaactccacaactttttctcacagaagccaagaaatggctaattacactttcaaaagactcccctccaagtagtcacggatagagaagacatgtcctaaaaaagttgtatgcttttcgaaacaaggcagaaccacactcaaacctcctcctcaaaaactggaaaaggacacgagttagattccaaagtaaatgaccaagaatttgagaccgaaattctcagctcatttggggggtatgatacgcccgattgctgacaacttcaacttcttatgtacgtctgctaaggttattagttcaagtgtacacatgcaaccaaaagcagaaatgttttcaactaagtcctcttgagggaaatgcacttgaattctttcctcaaaggctagactcaaatacaaatatatagaaaagatgcgtattcggccaaaattcttgaaaagaaaaaatatgcctaaattccttcttacaaatctctgtggacttccacaagtttagtccaccgggttgcatgattggcaaaaatgttaggctgacaagtaaaaagagaagaagaatgcctaaaagtttgaagtaatcatgggcatggctcctggaatcaaccttgtaaaagaactaaagcctgaagaagatgtgtgatattgcgaaggacccttttttacgaaaagaaaccatctccgatttaactctaaatgggtggttttttcaataggttaagtggcaaaaagaagcattataacttcaggaaagaaagggtgaaatcaaggaatcatccatggattgattgagagattattaagactaatgggaagggctaaaaacattgattggttgaaccagatatttcaatgacgcaaccagcccctaagagtctaccacaatgaatctccagaaagggattggaaaagagaaccctatttactaatacatatagccacgtggctggggaaaataaatattgtctctgcatcctaacaatagtagcaaaagagggacatacatacaaaaaaaaacaataacaaccacaattcaaaaaggcctactgaagtttaagacttggcatcgcctgaccgggtgcattttgagctttgttgtgattcttcactttttgagtcataaagaaaataaagaacacgttctagtcttggaaaaacacattttttgatccattagacaccctggccgacctatgggatcttgtttgagacttggccggcccatattgcttttttatggaggctggtcgattctagaatttagcctagaaactaggtcagcccttgcatgggtcaagggaccctggccagttcttgcaagggtcaagggaccctaactgtccctcttcaataccttaggactctagctggcctagggcttcggtcccaaagtggtggccaggtttttgtcctcttgtgaccttagcaagaattttgttatggccttgaacctattcagcacttgtacaatacttggttcccttaggaactctgtatggcacttattagggtgagtctatggtagtcgaataatcaacataagactcaatgtttgtccaagtttttacacatggaaccatactttgttgatacccagctttgtacaatggaattattttgctagtacccttaggtacgatttataagagtcttgtctaaatcttgtcactttgtctggtttctcacctccccttgtcatttgcatgcagatgatcacctatttgttacatattaaatatataagaaaataacctattaattatttccaaaaaaataagtaaatatctgaagtttaacccttaattttgtgggttgttgaattgaattcatagttgagaatgtctatccaggtaaaaagttgtagagacaccaaatgtgtctaccaggcaggaagctagcaaccctatgctttgctagtggttggtcggcccttgcttcacaatagctggccaggggaggtccagccagacccatttggttagccatttttgtctctttgtcctgtttaagtatttagactcttcgtcaactagtacatggtacatgatgaccttgtaacgtcctattctatagagatgccacgtttgtgattttataaactacattaacactaatatattaattaattataaaaaccaagataatataaaaaattgactaaaataaaatattaaaaacggacattataatggcagtaaaaatgtgttttggggattcctgttataaaagatttacccgaaagactatagacaatagcaattcaaaacacaattcaaaatacagcagatacagccagtccaaaacaactcctggcaacttggcacacaggacggtggggtcaatacttctcctcgctcttacctacaccatgcacatagcacctgtgagtcacaaggactcagaaagaaaagcaataataataatcataaaatttattatttgaatattatcatttatacacaatcagaatcaaacaattacg

SEQ ID NO: 221317 - DNA, 1382 bp, Cannabis indica
tagtaaaaaaaaaaaaaataaaggagcattatattattaaatcctataaagtatcaaatactatattaatgtaacacatatttcttatattatttattaaattaaattatgaaaaatctatttgcaataatcttaaaattaatctgcaaaatttacacttacaaaaaatgttattaacggccttttttgttttagaaaaaatcaataattaaaagttcacttaatgtcaaatgaaattaatgtaataatggtacataatataatcatgttttatagaagtttgtcttacgttaatttaaatgtttataatgattttgaataaattattgcataatccgatgatagttatacaattatacaatgtattatagaaaactgtccaaatacttcacatgcatgcacaaacagttaaaacattcaaaaatttcaatacataatatataaattataatcacatatatctctctatatatatagatgaaataaaattataatgtcacttggtttcagaagatccatatgcaataattaattgataatatactaaaatgatctgtattgtacatatattattactgggaaataacagaaataaaaataataataaaaaaaaattaaagtgccagtggtacgtattttcctgcgacccagaaaatgtaacgttgcgcactcattttgatgttacaaacaaaagaattacaagtttgttgatcttatcttaattttcaaacaaataaattacaaaccgaaaatgtagccactgattttgatcatcatatatatcatcgatcgatcatgatgaaaatataaattaagatatcaaaaatttaaaaatgattagtagtagggaattacagggggagggggagaaccgtatgacactcctacaatgggtggaagaggagtgttatcatcatacgacggcgttggaggaggaggaggaggacttgaatgctcgtaatgtgattcaggtggtgggcttggtgtcaccacagggtgctcctgatgatttattggcggcggtggtgattgtactactggtgtttcacaaccgcctggaggagatgatgactgcggtggaggagttcccgcttcaggcgttggatatgacggtggtggtggaggagctttgtagtaatgctccttcgtcggaggaggtggagagtgagatgtgtaacttggagttgaaggtggtggagagccttgatagtgctcacttgaaggaggtggaggcggagaagagtagctgtaatgagttggcgatggtggtggtggtggtggtgatgagtagctgtaatgagtgggtggtggcggcggtgaggaatagctgtaatgagttgatggtggtggtggtgacgggggcgatgaatagctgtaatgag

SEQ ID NO: 221318 - DNA, 2516 bp, Cannabis indica
gtttctttatttttttcgtgttgttttagtagtgttttcttatgttttttataggattgtcacattctcttgaaataattatgttctttttcccattgtccattgctctttatgagaactggtatagtttccatgtcttatcattttttacaaaatttcatttacgtgacattttttcatattaaaacaacagtaaaataacactacaaaacagtaatttgttgttgatttagtattttttttttctctttgccagattttatgggtttttttatggtgtttccatgattctagtgttgatttgtccgtccccaaccacgaaggagaggtgtcgtttgtgttttgttactgtttacagtataaaagtaaatatattagacctgggcagtataaaagaaataaaaatgggcttggacagtaaaaatataaggtttgtcgtgtcccagtatttttgaaaacatttagtaaaaaaatagtatttttgtaagtttcccaaaaaaattgaaagaccatcctccaagttctacttcccctgctccttccaaacgtaaggtagatcttcattctccttctaagagggtttctaaatgtcatcgatctatggaggaagagtctaattctgattttgaacttaacgatgagttcattcaattagctaaagttgccaaggttttttttgtgttttgttattttttttaaatttttatattattgtgttttgattttttcaataataatttattagtgttttatttttaattttcatttgtatgttttgttgttttgagttcatttataccttctataacagttgtattcttctctctttttttctttgttcttttgtaggggaagggaaaatcccctattctgaattttcctacaaaagctgggttagaagagccttctaatgatattgttgttgaggtttgtggacttttataatttttttttgtttttggttgttttggtgttgtttttgagttgtatttggatgtttatttttccatgactggacatttaaatataggcgttcacaatattatcattctaaattaataacatatgattattattcagtcattaacgatattaaaactattcttaccccaacccagttaaaaatgttttcccaaactgtttttggtcaattccttcgaattctagagtatattattcatttcgaagtcttgcatgtctattgttgagggaatttcatcaacctaataagatggaattctgggtatctgttgctgtgaagtttcttacatttagtgtagaggaatttgccttagtcatatgtctagagtgccacattgagtttgatacttttcagttcaaacatgataagaatatgctagtggaatatttttgaagggtaataaaaaaattaccaagaatttgattcaagttttctttactgtcaagaaccttagggttaatgatgatcttacaatcaagttggttgttttgtatttcgtttagtgatactggctcagaggtcctcctaaaaaggttgtttctattgaggaacttgatattgtagacagtggccgttatgatgagtatgggtgggggaatgagtgttttgagatgactattgaatctcttaagggtaagattgatgcatatattaggatgttagcaagaaggataaggaaggcgagttttatagattattatgttttacttatgcattgcaagtttagttttttgagtattgtccatacatcattgaaaaactttctttgtattcaaacattgacatttttaggcttcttaactggcctcaaatgcagaagcttaaagtatttcagtagaaaatggacaatgtgaatagcatcatcttcaattggcatttaaaggaggtatttgtgtatttttttacttttgttttttttgttgtttcagtgttgttttttcattttttttttatgaattatatgtttattcacttttattcctttttttttattatcttttttattttttcttcaagttacaaatggagaatatttctccaacttctgttgagagatccaacttgaatctggctaattatttttctggtgacacgaatccttcctttattaaggttaaaggtaaacgtaatcgtgaattcggttctaaatctgtggccaatgattatgtggaaagtgatcaagttggtccatcattgtataaggctcatgagcatgtaactcatattgagtacgaggatttaaaaaaagatgtgtctcttgttcttagccatcagcggattcttatgtctacttttgctaatttgaacaaaaagatggatactcttattggggtattatttttttgtttctatttttaatgtagtacttgtgtagtttctgtgttgttttttatttcgtttaggtttttattcaaatttccctttttcctagtcttcgtgtgctgcttttagccatcgttcgagccaaatagaggatgtgctttgctcctcagaaaatgatgattataaattaacctaactcttttcagatctt

SEQ ID NO: 221319 - DNA, 3322 bp, Cannabis indica
aatttttttatcataaatgcacaacttcattagtagaacatttaacaaaaacgtaaagaaaaattgtgaataaaccttatattaggtcttacaatcctcaatgaccaaaccaaatagagaactcataataaaaggtcttcgaatagcttcgaccccaatttggtgggatagctaccctgttttttctgaatgtattgctaaggctaaagaatttgagttagtagtttttaaatgtattaatcgctcttttaatttctatgcagatctccttgcccacgagactcgtgttgggagaatccatgttgttggttttgctagggaagtagctccccttttggctactattttgtgttagcttttgttttaatatatgaattttaattagcaaaaaaaaaagaatagcttcgacagccacaaaactatccgactcaagaaccacctctaaaattgttgggtcttcaaccaactcaaatcttttttgatcccaatcgcctcagccacatcgtgaccactttccctaaatagctgcttgctcgcaccaccaccaatgaaccataagtatcttgcacaccaaaagcatatctaaacttctcgtccctctccaaaagtgttgcattcacatttactttgatgtttgaaatcgatttcaaccaaagttccctaccatcaccattacataattttacatcaagagtgttatatgtaaatcatcattacacgacataacctgttcaaatctaaaccatgggaaatagctttagaccaagaacttatagaagaaaaattccaacctgctgttacaaaaccagtagcttcccaaacaccaccaaaaaatcgagacttgagcaaacaatgcatatctatttcagcaaaaataccacataaaggacagacctcttccgtagccacatgtttacctctaagactcattctctcgttggaagacattgagatagagtatgccacattagatccttaacttttgaaggaactttaagttaatagagtctttttttttttttttatcttaaaaccataattagcttcaagagaaaacttacctttcattacttggagaagcttgtaggcgctacgaacatagtagatgcctcctttctctttgaactagtacaaggaatccttagaagtattataattcagtggaataccaagaataacaattgcatcattaggaaaaaatgaatcctccacaacctcactatcctatgcccgaaatccaacctagaataagttgcaaaccataaaattgtcaagccctagaaccacatgaatagaactaaatgagaatccataagcaaacatggatcacttgtgattcgaatagaagcacatgtccctaacccttttgttgatgcagaaatctatccaacacttgctcactagattggcgagaggagatatagtagttaactcctcgtgttacgacggtaatggagctacgtctacttcaagtttttattgctcacaaaaattaaaagaaaattgacttaggcaagagctctaatttctagagagagaaagtaaagagagatactctgaccttatgggctctttcctgaatgtaaaaaataaactagtgggctctccttttatagggaaagaggtcctattaaaataataatgaaataatacaaaaatatggaaaaatcaatttgggttgatattgaccattagtgatgacctaatagctaaaattgactcttgacaaaaatcgtcaatttttagagtttgtactcgtccgttagatcgtttttgggtaatctgcagaaaaaattacacttgtcttggggacgaattttgaacttaaaatctttagaattgcgatatgggtgtaggacatgactagaaagatctttaaaattcaagttgaatcccatcaatcgaaccaatattgagggagttatgtctattttactaaaggttgttcaggatccagtgccaaggttgacacccagcacctaggttaatattctgacgtcaacctggacgctgggcaagtgaaaaaatgtctcagacttgtatttttcgatccctaacgtgatatgttgacatcacttagtcaatttcttagtttaggtaaagttattcaccagttctcagaggtgttgcttttttgtgaaattgggtagactcaaaactttccgattttaccgatattccaccttattgaaaaagtgaaatatcaaagcatgaatttcacttgtcacaagttgtaactctcgttcactaaaaaaaatagttaaaatgctcaagatggaatcgaaatgacatgaacagaacccagcgcaccaagccacatgcatgccatgccagtgactgttataccactcgatccttcaaatgatgacaactcaacaaaaagaacacgtctgtattctcaacgatcacccgtgtgtcataaatgggcctcaaagatttggatgaggattgcaagctctcgcaacttaaagattcttaaaagcttgggggtaaatattatctatattttcagacatgagacatgtggcacaaaaagtaagatacaacttttagatctcattaactaaatccccctccccattaaattaagtcatagagaagcttcgtggatccagaagcaggtcaagtcgaaaggatgtatagagatttacctagcctcattatcctttcatggacacggaaggcttaccctcactccgggatctgaagtggcccaggatcagagtttgcccaaaacgatacatggaaggttacacgaagggcctatcacagacgctaaccaccaaaagagatgcgaggataaactcggatcgctcaatgacggttatgcttttcttaacacaggatcaggtcttgtcccctgtgtcaggccatggtagtgcacatacccccctacacctttttgccagacagttattctaggcatttacttttcaaggttaaaccttttggtaacacgcgttctatacgaatggtggtccccctattgtccagcttcgtcaacacaccacaataccttctaagggtctcaatagtcagctctttgcatgtatttaaccctattagtgagttttttgcagaaccctaggtgggtcatgagcatgtccatacccgctctttagcctataaataccccatttagttctatatgaaaggaggatcgaaaatttagatagctgaagctctactcaaattactctaagctttttttttcttctaagagaaactaagagtacaaagttggggtatcttgcataaacattaaacaatatcataaaagtctcataaggctaatagactgatttttggactaaggctcatt

SEQ ID NO: 221320 - DNA, 1513 bp, Cannabis indica
ataatctaaccaaatcgaaaaaattctacattggctaggaataagaagaatcattagtatataaagatgggcatatctatctctattgatatgagaccttttgaagatgtcctagaacaaaactgtgagaatttaaacccaaagtcttttaagaagatgctcaataaaagtagttatataacctggcctcttatctacattcaatttacatattgtattataaccactgtgaaatatttgcatggaaatattatctggattcttggggtgacgatatatatatgctctaaaaacaccattaaaatcaagagttgctctataaaagtagtctacaatagaagttttctctgccccactcaacataaacatttcattattagtattatcacttgtgtagtgatcaattatgattggtaaatccaggtgacaaatttatgctattaagaacaaaattgccatctttcaacaaagagagatgaaaccttcctctacaaaagttggtaattgattcccttgaagaaaccaacatctccctttttccatacttgtgttggtaactaaaatttcccaaatctccattgagtttctattgacaagaacagagttacacagttcttgatttttggggtcagtgagtaataggccagtgtctccagtgtctcctgtgagttcttgttaaacatttgattacatctggccatataaaaaatggtaaatactattttgaatttgtaaatcatctttctagttaaataataaatttgaacatgttaaataatactcttaattattttttgtcaaaacaaatcttattaatcactcaatctacatctgacaaaattaattgtatttagtaaaataaaatattcatttatcatttaacaaaatgaaaattttcaagtttagagtttagtttatttaacttaatcttataacatcattttttataattgctaatgttggaaaatgaatatgaaaaacagactaatcactaaacaagtacaaaagaaaagatgtacaaagaaacaaaacaagaataaggtcataaaatgatatgatttcattactaataacaacattacattaagattggttaccaattaccattttacaaaaacctaagctctctcgcctctaatcctacgagccaactgaatatccttaggcatgatcgtaaccctcttggcgtgaatggcgcacagattggtgtcttcgaacagacccaccaagtaagcctctgcggcctcttgaagagcagacacagcactcgactggaatcgaagatcggtcttgaaatcctgagcgatttccctaaccaatctctggaatggaagcttacggatcaaaagctcagtgcttttctggtacttcctgatttccctcaaggctacagttcctggcctgaaacgatgtggcttcttcactcctccggtcgccggagctgacttccttgctgccttggcgccagttgcttccttggagccctttctccggttgatttcctgctgtctgc

SEQ ID NO: 221321 - DNA, 4113 bp, Cannabis indica
tgtaattaaataattaatttgaagtactactaaataatattaattcaatcaatttaaaaactttctctttttagacactctttttctttttaataatcatatattcacacaaattccacacgcagcccagtgtgccaactcatgatgtattataatccacaaaagctcaccactttttagaaataaattatcaattttccctttaaatcataattattttcaccaaaaaataaaataaaataaagaaaaaaagataaaaccctaaaatatgtcataaagaaacctaaacacctcaaactcctcatctttcatctcctcaagtagtaaataccctatagctactctcaatttcctctctttttcttcttctttttctttaaatttttcttacatcaataatcaatgtatatatgttattatacaaaatataatcaatatataaatttatatatatatatcatgaaacttatacaagaagatcatatagatcgatggatattgcgtttgagaagtgttcttgctgatttacaagctaagatcaaatcaagagattaactagagttataaatatatatatatatacatatatatatatatatttatatgtgtggtgagaggctgcaaagagaaaggtgagatactcttatgatgttaaataattaattaataataatatatgattaatgattaaaggggttttttcttcctttcaaaatttggtttataatgataatattacatattattataattttttaaaattattatttagtttttttgtttaatttttctttgggtagtagctagctagggtttgttgtatatatatattgattatatttcttctttcctttggtagttcacatgacatgatcagctcttaattaacttcaatattttttggtagataaaccttttatggggtctagatcatatctgattaagtgattaaattttggttttggaatttgattaactaattaattaattgacatataattaatagattccaattcatatataatttgatagtattattctttgtatagtagtggggtaaggatcacttttcttcattattgtcaataagtttttgatttaaaattttcaatatttaatttttatatgagttgttcagatatgtcagttagctgtaataaataatgtaatttgattctaattagtattttgaaatataaaatgtttgtttttgtcatttagtgagtggataactaatgtattttgattccaaatcaataatcgcatactatgtcagtgtcacgttatgtcatatattatgtgaaattaattaatttatatttatatatatatgataagctattaaattaaaataactctaaccttacagtcaaagaaaatgagctttcattacatcattaattaaaataaattagttcaataaatacaactttcaaataaactatttttcataatgaaattgggcaaatttttttttgttgaaaccgtcccatttgacttcttctatttggaagttgaaatgagttttcaaatcatgattaaagtctcaataaaacgactaaggaattctaggggcttgaattctcacattattaatgttatataatataatattctaatttctatcaaatttttgtttaaaaaaatttaacaacagaatacatatccagcaaaaattctgataaacgacagatttagtagcaaaacgacaataaatgaaaaacgacaacattaagtgtttcataataaatattaaagacactatatctatatacatggtatcactttacattttttttaattactagcgtcactggaaaaacgacatgaaatgaaaaaacgacaacaatgggtgtgtcgtatatattggctagccttccaaaacgacaactttaggtgtttcataataaatattaaagatcaatgacaatatcaatatacatggtctctaatgatctcttaacatttttcaaattactagcttcactggaaaaacgacatgaaatgaaaaacgacaacgatgggtgtgtcatatatatatatattgactaaccttccaaaacgacaactttagtagtaaaatgacaataaataaaaaacgacaacattacgtgtatcatatatctagacaaagcttccaataaatattaagactatatatggcctcttatgactcacttttttaaaaacgacaatttaagtagcaaaacgacatcaaatgaaaaacgacaacgtgtatcatatctaagacatgacaaagctcctaatatttaatattaagacgacgactatataatatatatgcctctcatgactttcatttttagaaaacgacagcatcagtatcaaagcgacaaaaaaaaaaaaaaagaaaaaggacaacattagacgaaaaaattaaaaaagacaacattaggtatatcatatcatattatctagacaaagcttccaataaatattaagacaacgactatatatggcctcttatcacttttaaaacgacagtttcagtagcaaaacgacaacatgaggtgtatcatatcttcttggttaagcttccactaaatattaatacaatgacgacctccattttccaaaaacgacataaactgaaaaacgacaaaccttggcaacaaacaacaagtaatgaaaacgacaatgaatgcttaaaaatggcattaatatgaagattgaagacaataccatctcgacaaaacgacaatatttttgcaaacgaccttatcttaaaaaacgacaataagtatcaacaaggacattagattaaaaaaacgacaatatcatgataaatgaccattagtttctgaaacgacattatcattgaaaaatgaccctacattattaaaacgacatctagttcatgcgtatctcattctctcttttttatttttattttttcctttttttttattcataaaacaatcaaaatctatattaaaccattaacccttaacaatattctcaggaaaaatatcatatttgtctgtttacattaccagaaaaaaaaactaaaaatttatatattataggtctgtaattttccagtgcatcatgaaggccaatgatcagtattattgatatataatataaaattaaaaaaaattgttttatttactgggaaataaattctttgttttgtatgattactgttgtgttgataattgatatcagtaaatacgtatattttgggctgggttgggcccatttatcttttagtacataggtatattcattcaaaaaaaacgtacattttgggctagcttgggcccatttatctttcagtaaatacatatattcattcgaaaaaaaaaggaaatttacaaaaatactggaatttgagttaatttttacaaaaatactgtcacacagaaatcttttaaaaaatactgtgtttttataaaacaccagtaaaacacaaagtagaacaactcaaaacaacagtaaaacactagtaaaacaccagtagaacaccagtgaaaacttaacacagtatactgcagtatgaaacttataaaaataaaaattctgcctggtagtatttttgtcaaaaaatggcaaaaattagtataccatgtaaatttccaaaaagaaaaacaaatattttgggctaggttgggcccatttatcctcttctttgggcttcccccaattgtcaagtttgttacactatgttttggcccataatcacgtactttatatagggccattttctaactatgattatttgaccaaaaaatgatgggatttttacaaaactactagattttggataaaaatttacaattttattatcacgcgaatctttttacgataatactatcttttataaaacaacagttaaaaaacaaaataaaataattaaaacaatagtggacaagtgaaaaactatcatggaacaaccgtgaaaacttaacacagaacacagtatttttgaaaaaaaatctgccccataataaaaaagtaaaaaaaggttagaaatttcaataatattaaaaaattctgccccatattaaatttatacaatgaatggcactaacaccaccaatacctttttaatgttactctataaatattgagatttttacacttggtgtc

SEQ ID NO: 221322 - DNA, 2512 bp, Cannabis indica
agaaaatctcacaccaccacacacacgtacaaaatattttcctattgattttaattattgtatagttgacaaaaatatttagtaaatattaattaatgacaagtaacttgatttatctattaaaaaaagtaactactacaagtctttcaaatataatatagtaattaatagtaatgtttcatgataatgaattaccatatattgatttttttaggcatacgtaacacaagacgatactctaatgacaacattgacagtaagagaagctgtttattactctgcacaactccaacttcctgattcaatgtccaaatcagagaagagagaaagagcagagacaacaataagagaaatgggtttgcaaggttcaatggacacaagaattggaggttggaatataaaaggcctcagtggtggacaaatgagaagagtaagcatatgtatagcaatcttgactcgaccaaagcttctcttcctcgacgagcctacaagtggtcttgatagtgcagcctcttaccatgttatgaatcgcattgttaagcttgcacaacgagatgggaggactgttattgcatcaattcatcaaccaagtagtgaagtttttgagcttttcaataatctttgccttctctcttctggtagaactgtttactttggtccaatttcattggcagaagaggtatgtatgtcaaaccaacatttggttattaatataaatttcccctaattttattatttaatgagaaaattgaccaaatagttttaaaatgatgcagtttttcgcttcaaatggcttcccctgcccatcattaagaaatccatgtgatcactacctcagaactatcaacatggactttgatgttgtgagttttttacattacagtagtttgctctatatacttgcaaattttatttttcatttttaatttaaatgtgtggttattgtttacaggacttagagcaaggttatggtaacaatacaagaactaaagaagtcattgacactcttgtggaatcctacaagtcttccgaaaattttaaacaagttaagcaccaagttttcgagatacgccaaaaggtaaatttataaataaatattggttaaaaatgctaattttatcacataatacaaagggaaaataaatttatgtaagagtatctaataaagtttgccactttttcctctatttacagaaaggaacgaccttggagaagaagggaagtcaagcaagtttcattacccagtgccttgttctcactaggagatcctttgtgaacatgtaccgcgatcttggttactattggcttcgtctggcaatctatattgctttgtgtttatgtgtagggaccatcttttatgacattggctttagttatggctcaatacaggtaatttaaatttatacacacttagctatatccttaaaaaaaatgaaaaaaaatctttaactacttagggtaattgaatgctaaactgtatgagtttaaattgttcactttaggctagaggagcaatgctgatgtttgtagcagcatttttgactttcatggccattggtggattcccatcttttgtagaggacatgaaggttagtcacacaataaggaaactaactccaattgaatgttattactgtaaaacaaacttgttaattttttatttcttgattatatagatatttgggagagaaagactaaatgggcactacggagtggcatcatttgtagtggggaacacattttcatcaataccatacctacttctgatatccgtaatcccgggaagcatagcctattaccttgttggacttcaaaagagcattgggcattttgcctacttttcaatcatgctttttgtatgtatgatgttggttgagagccttatgatgattgtggcaagcatagtgccagattttctaatggggatcatcacaggtgctggaattcaaggtgttatgatgttaaacggggcttttttcgcttaccaaatgaccttcctaagcccttttggagatatccaatgtattatatagcattccacaagtatgcaaatcaaggattctacaagaatgagtttcaaggattgactttcccaagtaaccaagtgggaggaggatcgctccaccattagtggtgaggaaattctaacaagtgtttggcaagtggagctaggctattcaaaatggattgatgttgggatcttatttgggatggtggtgatttatagacttatatttttagcaataatcaagacaaaagaaaatattaagccacggattggaggtttgaagattgatagtcaaatgaaatcgaacaaaatcatagaaaagcctaaccccagctgaatatatacaccttaaactaaaaggaaaatttgagtgtctatatatgcatcatgtgggtgcttaattaaacatttgttagggttgataaactaaaagtatgtaaagagaatattattattattattttggaattgaaaaaaaaattatgaaattcttcattttttcca

SEQ ID NO: 221323 - DNA, 2602 bp, Cannabis indica
taaaacaaatttaaactgttcttcatttattcttttacgtttattctaatttgatattattattaattgtaaaacggttctataaccggccaattatgtgtaactaaaaggacacttgctttgtatatataggggtgatccaacatgaataaaggggacaaaaatcttttgcaatagtggactaagcagaccgtgatctgactgaaccactatattcccttgtgctcattgtatttttccatttgtttattatctgggcagtctcttttaaatactctctgttctaagtagagtattcactattttttatcaaataattattatttggttagatattttatgttgtccaaattctcctgacaatatttggctccgtctgtgggaactttatcttatcgattttggaggaaaatcaccatggttgccaaccagacaaatggaaacaacatcacgggatcctttaatatcagaaccatgaatgttcctatcccaggagatggaacaaacctaactaatacaatcatcggaggtgtggaatgaaccaacatcaccccttcaacctattccagaaactactggacatgctggaaagacatccacaccggtagctatagtggcccacttcccgccgaccacaccagtagtagtctccgaaggcataatccagcttactatggcacagtacacaaccatgcaggaacagatgtaggctctgcaggctgaagtcgatggaaaagaacgagtcaggactcgatgtccaacctgggtcccaaacccatgttcaggcaaccctcaagtaaccactatagctagatgttgtactgagcgtcctaacaatacttgtactcgcaaggaacgtgtgattaaacaaggaagtctcaatctgaatcaacctacacgcgactctatgcaaaattgggagcatgttgcccttgatgccagttgtcaaagtgagagaagaaaggaaagaccgcaggatgaagaccctgaatggcacaacccacagagtcgggcccaaccgcaaacaaaggtaaatgaagttaattctcattcctcttctactaatagttgctctactagtatttataccaggtcaggatccatcaaaactcgacggggaggtatgcaccacgtgcatagaggtgatcttcgcgatcatctcaacaagatttttagagtgcaatctcaaacaccaaggaaccgcgatgataatgaagagccccatgatccccgtgtcggcgattaaggcactcaaaatgcaaataatgcgactaatccagtaaacctgccaatcgcaacaattgcgaccacaaaagtagtgatccctaccaatatagcagcagtcatcgctataccaacagtgactcagaccaaccccacactaccaggaggtattgaccaagagaacctcttacgagcattaaggttgatcgagtagtagagaaagcccatttaaaagcttcatgggacatcaccttttacagaagaagtgcgacaagaaaggctcccaaaaggctttagactatctgaatccctcaagtataaaggtactactaacccaatcgattatttagataaatttaatacgaatatggaagtagatcaggtaccataactggcaaaatgtcgaagactcactgtaactttagaggataatgctcatgattagtttagccaattacctgaggcatcaatatcaacttgaaagacctttgtagacctgctcctaatgcatttctaggccacgatgacgtacaaactgccgtatacgacattagccaatgtaaaataggaagtcggtgagtctttacaggattattttaagcgttttaatgctgaaataataaaggttgagaaagcccctgagtcttcgttggtttgtatattgatcacaggtgtcctaccaagaattgacttttggaaagaattacaggcgcgacaactcgagtcattggtggaattattcgccatggcggaaccgcataagagaattgagaattatttggcagagttcgaaagaggaaaggaaaaatgtgagtctccagtaccaagattgcattctcaaagcccgaaaacaaagaattctaggggtcgaagtcccagaagacgtaggccatctaggcaacgaagtctaaagcttgccaagtccctcaataagaaacaaaaatccctgaaaaaaaaggggggcccatatttatgcaatcgaggaacataacgacattttttagccttttgcttacatagtagactgggtgttgtactctatcctcctcccttattaagactgcactaaccgcatgttctgtgagtgccaagtatatgcttaacccttcaccgtctaggggttttgaaaggaccggaggctggaataatttttgttttaaagcttggaaggcattctcgcattcttcagtccattcaaattttttgttccccgtgaagaaagggacacatttgtcggttgactttgagatgaatctactcaaggcagcgatccagcctgtcaaggtttggacatctttaaccttagttggggacttcatgtcgatcaagacctttatcttttcagggttagccatgatgcccctagagttcactatga

SEQ ID NO: 221324 - DNA, 1679 bp, Cannabis indica
actaatttctttttacacacataaatatatagtacttaataataaatatatcactgctccctttccgaatttcaaactagttggttgtatgaaacggattagatcgaaagaattaactaatagacaaaaatataatgcattagctaccctagcctggtctcgattacttcattcattttattatatatatagtgaaaattccattttttttcgtccacaaacacgaacactatcttgtctcgattgataattatcaagccatatcttcatagccacgttaaaaaaatttatattaaaattattaaatctcaatatgggtttgttttacaactaaaatccaatatatatatatatatatacattatatatattgacaagacatagctaaagatgaaaaagttaggcactcaactaaggccctcatgtgtcataagcatcaaatagatctaatcagattcatactcattaatttggttgacattaattaggaaaatagtttgtttcgaatcaccacatatattttaactttagatgtgtggtccaaaaataatattggcagcgactgtatgtaatttttttgcaataagcattttccttcagtattttatgtgttttcagaaataaccaacacactatttttgtcctaaaacatgtattcacttgtcagtatcacctttagaatttcacaacataattagttgcattacatcacttttcacttctttcaaatattgaccacatcattcattataactatatctccaataataataataataataataaaacatttttttatttcttttagggtttgctagtgatcagttttctggaagctaggttcccacttcccgggagagaaaaggggaacaaaatccaaaagctaatgatcaatgtatagtgctctccaataattgatcagttagataaaaatgtggtttatctttaattagtatatatagagagtgcaataatactcagggaaagagtgtatatattttatcttttttttttttcttatgtatatatctaaaacattttataggtgactttaattattctatattctatattctccactgatgtattgtttgaaacacttttattgatccacatcttccaaactaattatttatggttaactctcaactttctttgaaaaatatgtttaatttattggaagtgcacatttttctaatttattgaaaaatatcttttcttgttaataaaattttgaaattatttattaataaaaaatagtattttcttaagagatattcgtggtaaaaaaaagatcaatgtataaaaaacgtcacacttaaatggctaaataaatttattttgttaaaattaacgaaaattagttaaattaatataactaatttcttgttcacaaaaaaaaaaatataactaatttcaaacaatatttgtgaatcgacagactcagtaagaaaagcataaacaataaaataactataacctgaattataatcagaaacaattagtttgagaataaaatccaccatttgagaataaagtttgagctcttaagctcaaaccttgaataaacctcataattagtcaccactacatctcaatcaaacttaaataaccttaattcaacttcaaaaataatctcaaacatcaatcactaacacacaaccctaactctagaaaaa

SEQ ID NO: 221325 - DNA, 1620 bp, Cannabis indica
accgactatgaataaaagagactcgatccaaaaattggtttgatgtcacaaaagttgacccagagaaccttaaggtggtatcataaaagattttcaagaacttcgtaaacattctagcattctgccaatcattctcatcaggacatgtttttgttacagagctgcaaaactctttgacatatcctacatcatgaaactccatcctttcaaaagccttttgatacttttcagcagcctctaacatcaaataagtagaattccaacgagttgcaacatctaaagaaacttatttcttgcttgtgattttagcttgctccgcacactcttttagtttttgcattctagaagatgaagatctcacatatctcacaacatctctaatcttgtttatactttggtcatattcctccaatccatcttgaacaatcaagttcagaatatgagaagcacatcttaagtgcatgtgttcacctctcaaaattgcaccaccccactgattcacagtattcatgacatattgaaaagaaacattgtttgatgatgcattatccacagtaatagtaaataccctctcaagcccccaatctaacaaacattgttcaatagctttaccaagtgtgtcacctttattattaggaacaacacaataactcaatatcttcttatgcaagacccaagagtcatcaatgaaatgagcagttaaacacatgtaatgcaaattttgacaagatctccatgtatcagtggtaagacaaactctttgtttcttcgtcacaaacatatctcttaaattctttttctctctaaggtaaagattcatgatatcccttgtaatagtagtacgtgaagggacaacaaatttaggctcaatcttccaaagaagttctctaaaaccttcattttctacaaatgaaaatggttgctcatctttgacaatcatcctagcaatatattctcttattccttcagggtcaaatttatgactcaccaaagtgtttccctcccctttcatcaattcaaaacatagtgttttttgcttcttatcacctctcccaggaaaactcttacattgagttctaatatgattcaacaaattactagttccatttttcttgctaccacatgcatatacactactacagtaattgcatttagctttttcattatttttagtatcacttaccttagtaaagtgattccaaaccattgattgaggcttgattgcctttctcttcagatcattttcctttgtcccatcagtaggtaaagtggatgaagttggggctgcacttgattctatattttgtccatcttcttcattatgtatatgctcaattcctggatcttcttcctcatcaagagatataggtaacgcttttttcgcagtggaagccatctattaacaatagccaaacatcaaatgagagaacatagtagagttagcaaaatattcactgtataatcttcttataacgagaacaattactagccaaatatatagttaaactaaccgagctagaggtagaattcgtgctgctttttgatacgaacacgaacttcttccctcgaaagagataaagacctgcataaatatgatattggcctccattgtcatatttc

SEQ ID NO: 221326 - DNA, 2692 bp, Cannabis indica
agtacaggtacaatgcagacaagaaactaaaacaatttgtcgccaagagaaaatatgaaaactttctatcaaagataaataaaaccacatctattttaacatgcttttaaaatactaaatgtgaaagggtacaagcttacaagaacccaaatttagcaaaagatgaagaccagaaaatcactacttcacaaccatctgatcagactattcacacccattggaaaaaaaattggagttttatgatgaaatatttggtaatcataacaaagatgttctcagtcattgagagagttgctgacttgaaatgtgaacaaaaagggagatatagagagaggaaagtcagaacagagacaatgaggtaggggacagcactaggttgtgcaaggttattcctgattcttaactggaatgtttttctggtccttttctaattgggcctaacactctggaaattagaaatgccagaataggataacacttgatatttatcaaaaatgcccagaaaatatcatattcgcaaagcagaaaatagacatggaaaatataccggatcagtcaatccaaattgacagtcacaacttctgtcagattcctaactccataggtacaagtttaggatggagaaatgagaaacatacctgcatccttgactgcagtgacagttagtccagcactgctgctccctaagccagtagtgataacagatctgttgcttaactttgcagcaaatttcaagaattgagatttcccagtacctgagaaaagccttgagaaatcttacagcatatacattacatttttcatataataatgcattgattacatattagatttgaaaatcagaactaatgataactccttgatcaatgattggtaatacatataaatatacatgcgtatattgaaaagataactcccactgatatagtgagcaaaataaaacaagggccagaaaccccaagggaaagggaaagcaacaaacaattaaactgagttacattactcaaccaagacaaatcatgatgttggtgaggataaattaacaatgactagagaagaattttgacaaagaatctatttttattggaaaaattaattatgattgataagttctattttcaaggaagacttcagtaatttctaattttctccagttacaataaatgtagataatgcatgtgttagaccaaagaactatccactattctaaccccccatactctaatataaggaagaacacctcctatactttgggtgtgaccatatgtctcaagtgttgaaacctataactatccactattcaaactttagaataaaattagaacccaacaaacacaaaaagaacacatgaacataccaaaaacaccaataccgatattctacatggttcagccaatattgaattcatccatgagtccaaccagtaaagatatgtcttctattgagaaaataaaccctgaagttttgaactataaagtccagtcctggagctttcttatgtactttcttgctttcaagatttctctctataatttataatctctattttcccacccttagactagttacaagacatacaccgcctattatttgcattaaaagacacttattactaaagataatttgtttgtactagcccaagttattttacaagaaaattcatacagtcgacaggcttttgagtacattcaaatattatgaataaataaagctcctctgtaaccaatgtctttacacctggtgacattgaaatagactctcgtaacatatcgtatgattcagctagaagagtggtgttcttattcatctagatttaagtgattgctaatttcctttcagaattttgaagaaaagaaagctacttcaactgaagcataacatgaatgcagtagtcctaaatcgtaagaattttattcaagtaatgaagcctataagtaggtactgaaaaggtacctgggtcaccaaccaaaagtaaatgagactctccccgtaccttggttccagaagcatcaacatgttgcacacctccaataagtgttaatgcaactaagttgaaaaaaggaaaagtgaatgtagtgaattattaaaaggtcagcccattcaaaatctatgaatttatgtgagaaatctatgtacctgctagctttacagtaaagagtccaaatatttgtgggcaaacacctcgtaatattgcatttctccctgaaaaaaatttcaacaagacattgtcattataaacaaaaatgaagtaataacaatcttacttaagagggggcctagaatccaatttattttattttaaaaaaagaatctctaaatgattaatgctgaaggattgaatctgactaataaaagagcactcttttataaaatgatgtgtgtgtatattttaatcaatgcgccttacccttcaaaggggtatcctgaaactcagaccaagtcaattgaatttcataatagaagaacactcatttatgaaatatatatagatatagatatattaatcaaccagccttacctttcaaaggggtatccttaaactcggaccaaaattgatcgaacttcataatgacatcatgaggaatagtaatatctgatttcagctcatttgttctcctaaaaatgtgtatacaaagtacgtgagctacatatagctttacctaaatgaaaaaaagaaaagaaaagaaaaaga

SEQ ID NO: 221327 - DNA, 2216 bp, Cannabis indica
aactttattttgacaaaaaatcaattcagggtcctatttgtactattttagaaaatacaaggtctattttgtcatttaacaaaacacagggtccaattggtaatttttgtaaaatagaaggtccaaaatggtatttaccctattttgtgtaacgaccgagaggtctaacttatttgaatctatgatataggcgcattttctaaaaaaaaaaaaaaaaagaaccatttcatttacttattatttggtaggatgagatttcttcaaataattaattattgttgttctgatctctaccacaaaaatataagttaaactcaagtaaatgaggttttccttcaactataacttctatccgggtagctctctttatatgaaaatgacaatagtaactagtagtaaaagtcaaatccattttcaattgggggtggaatagaatattaaactattaccattatacccaaccataccaagatgaattatttccttagcaccgaagtgagagaaaagagaaacaaaattgaactcaaaaagttgggaatcaggttcttcatgtatattcatcttttgctcatataataccaaccaaactcaagtacctaatacattttttcattatattactttttttttttctttcatgcttcaactactagttacaaacatcacttgcaaatttaccattgtataaactcctttttctaaaaaaaaaaaaaatgaggatgaaagaagaggagaggtcacatcataaactatttgttttgtatcacacttgcattcaagttcaaactagttattatgactgattaagtcattcatagtttctttcataaatttttataaagtgtgatatttgtgatgatgtcctacaaaaaaaaaaaaaaaaaaaattagaaaagtattcatcactttacatgtattatcagtggttagttttaggtgcattttataatgtattttaaaagtatatttcagttgattatattcattttgtgtagaattagacttgttttctatttgtttctagtttaaatagtaaaatcataattttaaatgagaataaacatattaaatgagataaatatgatgaatttgtcatggaaggagttctaagatataatagtgtgaaagattttaagttttggaagtttaatacgctccgtttgtgataaaaaaaaaatcaaatctaaagctttaagccaattttgatgcattcactttcaaaaaaaaaaaattgtaaataaaagttataaatctttcattcctcagattttcaaatcatcttgaatagttcaatttcgaccaatatcgaaagagttaatagacaaaaaattattagtgattgcactaggaagcttgctcccaaaaaccaagttcttagaccgtggcactgaaagggccatatgtcacggtcagcctgattttagaggcccatgagtatttaaattttaatttcaaaggagaaaggggctttttgattgtgacttttagaaggaaaaaaaaatagaggcagaaaacgatcttggaggctacaaccattgatcttcaaataatttctttcttctatctttatttttatattttcaattagtctaaatcaattgttcacaatgaaatatgagtaaaactcactaaagtctttttgatttcaaagcatatgttgttgacattagtggaaaatattaaataatcaaacttatggataattagtttgtggaattatttggattgagtcaagcatttatggtgattttccattatttattttcaattatgagtcataaaatctgagtgttaaggttagttgttggagcaattggattgaaaatctagttttgcaacagttgaatcttgcaagtggtggcgatacgatgtgaataaaattttaaggcttaatttttttttgtttttattcatttgtttttagttagtgtcgatctttacttgcaggcgagtaaaggttaagtttggagagtttgataggcttgttttaggtgtattttataaagtgttttgaaggtgtattttaatggaatatattcattttatgcagtactacgtttgttttccacttgtttcatgtttaaatggtaaaattaataatatgaattttaaatgagaagaaacatgttaaatgagatgaatatgatgaatttatcatagaatttgaagttcttagatataacgttgtgaaagattctatgttttggatgctcaac

SEQ ID NO: 221328 - DNA, 2117 bp, Cannabis indica
tctattttgaattggcaaaatagtaattatttattttgctgacaaataattcttcaaattaattaaatagggaaaaagacaaaagttgttaagaaaaaatttgccaagataatatttattgagacaaaagttatcaagaaaaaaaacaccatccttgtctcaattaaggcaaggtaggcgcctaccctatagtagagtgtccctgttagttttatcttttggattaattaactaattaattcattaattcaattagataaatatttgaatttgaaaagtggttaaagatatttcaagttagttgagatattctctcaagtggttgagagattccctcatctcaaatatcaataaccgaatttagttatagatatatatttaaataattaaatatgatataattaataggaaattaactattataaatagaagcctgatttgagaaatcagaagataatttttcactgctatgttcgaaatacagaggaaaaaaggaaaaatatttctctctcaaatagttctcgctcatgtgttgagaattaatcaagaacaaattataagctttatcctaatagcccacattattccttgtgtgtggtggatcgatttggaagactacggtatgagtttctgatcaaccaaaaggatacaacttacgagaagttttgaggatactttaataatcatcaagaggtataaatacctttcatattattttatgttttgatttagagattcattgggattgtggtacaatggtaattagacatatgaaatctttcgttgcgtacctgatttagtatcataaaactaacaattagtatcaaagtagttctatgaatgtatatacattaaatgatgtgtgggttttatacatttatatatatgtgtgatatgtatgtgaatggataattatattattgtgaatatatgagaggtgatgaatcgttaattatatagtaaaatttggtgtaggtttcgttgttatttttcttagaaaataatgtaagctatttttgggcataggaattttttatgtaattttaattttatgaaaatttatttatatgtaaactatacacctatgtaaggtatattgcatgtgattaatttataaacttaaaacccgaccatgaacatcgaaatcacatgcatacgagcttgggttcatggaagaaccccgctcaacttcaggtatcatgcacttctccatgaaaagtgacattaatgttgattgtatgcatgggaaacaatgcacgatgcatggacgtcgaggatgccaagctcctgatggagctagttcaggatttaagtccccttctccctcgacatctgcttagtgccatcgtaagtcacgaaatgaaacagtctggtcctcctcctccgtctggtttcaattaacccgcttgcgtcttgttttaacccgcgttgtacaatttgcatgctttgcatgtaaggaccttatgtcggccattgacctttgacatttctgttagaaagcttatttaattgggaccttatttactattcaagtatgttaaattatatttaatccaacaacttaacatggattctaaaacaattaaaatcaacatataaggagtttaagaaaatcttacagcgattgcagcgaaaattaatgtctccttccgtttagttctctcacctttgatcctttttgtcgaagagtgtaatcaagaagtgaacctcaattctccttcagcgtgtgaaagactacacagtgttctatacttacttgagtatttccttgatatgtgtgggcatatactcaacactaatagcactcgaaattatagaagaaggctacgagaaattttaatactataaaatagtaatagcactttctgacaaggagagtcagaattctctctatgttatatattatatatgaacaagtatatgaacatctttgtatacatatagaggcgtgtagtttattttctgtagcaaaagaatatataaagtgtatatatattgttatttcttaggttaaaagctatactattttatttatagtattattcttagggttagatttagactcttaaaatagatcaagaaagataaaagaaaaaaaaatgggattatttcacaaa

SEQ ID NO: 221329 - DNA, 1391 bp, Cannabis indica
gacatagaaattaattaagaaattgtaaaaaattgtaataagagattgtaattagcattcttcatgagtcaatcatctatattaacaaaatcacatgtaagagcaagcgagtttattattgaatatatttctctttctaattattaatacattaatttcatgtattattgtatatatttaaaactcttaccatacaaatgatagtgaaaccaaattatttttctctattaaaataattttattattaaattatattatataaaatattagtattatttcataagttttccttaagcatgtatatatatataatttttatcaattttttaattatttaattatatatattataatttatgttacttatgtgtggtatcatttcttaactaacttaaagaaatgtttgcatattaagtctgttggcctatataaagtggactattcatctcatttcaaagggagaaaaacaagtcaaacacaagaagaagaagtagacagacacaatacagtagagagagaagttagagagagaaatggagagagatatctgagagagatagagagatagctggaattgggaaattaaattgagcaatattgttgattatgttggctcgggttagtgagttaatgtgtgttgagggattacaccatggatgacctgctgtgattattttcttgtagctcctgagattgatatatatctcttattctaattatcaataaaggttggtcgcaatactttaaaactggagtatgaccaagttcacattgatcttaggatcacaaccaatctgtgttattgtgtctgacacccatttagattcatctcttgttatattttttttctagtttaatgtgttttctagttttttgttcttaatttgtttgttttgatttaacttttttttgtttaagtgtgatcttgaagttggaattacagaggttaattcctatgtatcagagctaaatttcctacaaatcagagcttggttgtttgatcatcaagggagattcaaagaacactagcttccgcaccaagaactcatcaagatctcatcaagaattcatcaaggaaatctacaagaacacaggttgaaggacaatgtcgatggcaaggttcaaactagagaagtttgatggatcaacgaatttcacactatggcgagagagttcgaagggtatacttgtgcaccaaaaggtggcaaatgtacttgggataaaaagttgttggctgagaagaagccaaaggaaattgcagagatagaggagatggcatactacaccatcatcatgtactcatccaatggagttagaagaaagttaatccaagaaaagaccggaaaaggattgtggaactaactagaacagctgtacatggcaccatcaat

SEQ ID NO: 221330 - DNA, 2507 bp, Cannabis indica
ttaaaactagaaaacagtccaattttttttaatcttattttcatatatattttttttttaaaatatacatttattttactttagcttttcgcataacagttgaaaatacatttatctaaactacattttatttgtgataattttcttaaaaaaatttatatttgatttttttaataataagaagaaatttaggagaaaattagtaaaagttagaaaataaaaaggttttacataataataataatattaagaaatataacgtctctaaatttttaaaaataatacaaaaatataacgtctctaaattgttatgtctcacatatatgttaattagtttatcatttttaacaattaattgaaaataatatgaatatgttataggatgttggcattaaatggaaataaaaaataataaaatattatttaaaataataaaataatattttgaaaaataatatttaaaatattatttatgaaataaatttaatgacaaataaaattatattgataattttgcaaaaattcattatatttaatttagtggtatactacataaattaatatattaatgccgaataaatatcattttatgaagataaaatatttatacaacaaggtctattctaaaaacaatacaacaaggtttaaagccctccaattggcaggacttgtaattttgttgcccataatatggctaagtgggccttttcccacaatttggttggtgatattccggtattcaccatccctttgaacattttatgtaatgaccacgaggtctagtttgttgattaatcaaaaatgcttttattcaaaaaaaaaaaaaaaaaaaaaagaccctccaattggcatggacagtggtgaacacataaaatacgataaaatgggagaaattttataaaaatactgtgacaccaagttttttacatttttatggtaccaacttaacaaaaatattatatttaaagttgtaaaattacaaaaatactgtatttcagtaaaataaatacagtatttttattgaaattagcacaataaaaaatataaaacactttgtgtcacagtatttttgtaaattctcccttattttacagtatttttgtaaattctaaaaaataataaaagaaaaccttagccttaattttatggggtaaaataaaaaataccttttctatttatcaattaattaaatctacctttaatttatatttaattgaaacatacctctctttatatgtactgtacccaaaataccctgatataaagaagtcacatgaaagtatgttgaagtgacaaggaaaaaattggtaaagtatattaaagtcacatggtttttctagctacttttttcaggacaattaggagctaatagggaatgatatatatgaaacagtggattcttttttgactacatggaacattttgaaggagataaactccacggtgcttactcttatccccaaagttaagtgcctgaacacagtaaaggacttcagacccattgcctgttgtaatgtcatatacaaaattgctactaaaatgttatgctcccggctaaagaacatccttcctagccttattgctcagaaccaaagtggatttgtaaaagggagactcttagctcacaatgtcatgatatgccaggacataataaggcactatgggaggaggaatgctaaggcaaactgtatgattaagctggacctgcagaaggcatatgacacaattgagtgggacttcattgaaaaaatattggaggccttttagtttcctaactagttcatcagcttaaccatgaactgtgttaggactccaaggttctccatcatgcttaatggtactctacacagattttttgaatctagaagaggtctgagacagggagatcccatatcaccattgctctttgttatgggaatggagtacttgtctagaataatgcaaaatattggagatagggaggatttccaattccatgaaagatgtggtggactcaaactcaaccacttgagctttgctgatgatatgctacttttcagcaaaggagatttcaaaagtgtctacctcatgctacaaggattgaagttattctcttgcacctcaggtttgcatcctaatcctacaaaatctgctatttatttcagttgtatgcaaaatggagaaattcaaagaatattggatatgtttgggtttagtaggcaggatgtacctttcagatacttgggtgtcctgatatgtgctaaaagaatctcagggcaggattgtaaattgctggatgagaaaatgacttcccgaatcaaaacctggagctccaggaacttatcttttgtaggtagagcagtccttgtgaattcggcgttgatggcgatccattcatattggagtcagataatgatattgcctaagaatgtggttaatgagattgaagctatttgtcgagccttcttgtggaagggacagaacaccctgaatggttcgggtctaattgcatgggaatctgtttgtca

SEQ ID NO: 221331 - DNA, 4989 bp, Cannabis indica
cattaatgaatcgcttcttcttttagcttcttcctccttctcttttctctctttgtttctctttcaatatttctagtttctttgctcagtcatgtcaaggaaattcaatatggtatcagagcgttcttttccgccattgatggccaatgtcttcactaactccagcaatggatttcaagctcaacaagacaatggatctaatactcaagctcaacctacaggtaacacttcaaatctgaatccgtggaaagcaaaccaacagaattcgaggaatcgtggtggtgaagatcaaggccctgtgttcttcaatcataccctgtccattaagctgaatgatcacaactatttattatggagatagcaagttcttgtcgccattcgagagaatcgactgtcgaattacattcaagaaaactcagttccacctcagttcttgactaatgatgatcgtgaagccaataatgtcaatcctacttactccacctgggaggttcaagatcaattgcttgtttcctggctattgtcttcgatgacagagagtctcttaacaagaatggttggttgccgtgcaaaaattcttgagttttgaactaaacttcaaaacttgaagaaaggatctcttagcttgaacaattacttgcttcgagtcaaaaagattgttgatttgcttgctgtagttggagaaatttttagcactcatgatcatgttgcagctatcttcataggccttcctagtgagtatgacacctttgtcatttctactaatactcaaatcgaaagttactctgttgctgagattgaagccctgcttcttgcatccgaaacaagaattgagaaaaatgacaaagaagttgatctcaatgtcaacatggcctatactgaacctgagtttcctgaagcaaattacaccaacaccaatcaaaatttcagagctgcctatcctaggttcaatggctcttagtttccctacaatggctacaacactcagaacatcaacaactcaggctcatattttccccaatacaactctggccaacctaaatcaacacaaattcgatttaataaccccaaccctggacctccaccaccacttggattgagtaatcaaagaggaggattcactggcaatcgaggaggacgatttcccagtggtaataacaatcgacttcagtgtcaaatttgcttcaagacttgtcatgctgctcttgattgtttctacagatttgacaaagcctacaccagcaacacacaacctcctggcaacactaggaatatagctcaaatgcaggcacatcttgcaagctcaaacaatggatgggacacaaactggtatcctgattttgaagccaccaatcactgcacacctgatcctcaaaacatcatgacaccaactaaaaatactaattctaaccaattatttgttggtgatggcacaagtctatctatttctcaaactggtaattccttgttgtcatcacactacatttcacatcctcttttacttaacaacctattacatgtgcctgcaataacaaaaaatctgttaaatgtgtttctcagtttgccaaaagcacaatgatgtctatttccaatttcatgctgatgtgtgttttgtcaaggaggagaagactcatcttacattgctgaagggacaccttgtgaatgacctgtattcttttgactcatcccagattcagttgcatccttctagccttagccaacatacacactccacagctaaagccagtgcctacatcataactcaaactcattctgattcacccctaagttctcatattcagtgtctgtcatgtgtcaaatgtaatgccctttttatttttttaattcgatttgtggcataacagacttggacacccttcaaaaaaaggttgtcaagtttgttcttcactcatgtaataagcacattgactttaataaaaacatgtcttctttatgttctgcatgttgtttagggaaaattcacaagcttccatttcctaaacaaccactcactgaatatacaacaccacttcaactcgtggtatctgatttatgggggccatcctttacaccattcacatatggatataggtattatatttatttcatggatgtgtattctaggtttactgtttatctcttaaagaacaagtctaaagctctaaaaatgtttcaacttttcaaggcttaagctgagcttcaacttggcactaaactcaaatcttttcaaacagattggggaggggagtatagatctttcaccccttttctcaaccaattaggagtgattcattggcacccttgcccaacaacacaagagcaaaatggtctagctgaaagaaagcatagacacatagtggaaaaatggcctaactctccttgctcatgcatccatgccactcaaattctgggatgatgcatttaggactgctgtctaccttcataacaatttacctacacctattcttgacaacaagtctcccattgaggttctgttcaacctaaaaccagactatcttatacccaaaacctttggctgcagttgttttcccaatatgagaccttacaataagcacaaacttgagcttaggtctactccttgtacatttgttggctatagccttacctataaaggctacaaggccttgatgcttatggtagattgtatatctcaggagatgttgtgcttgatgagcatacctttcctcatgcacaacctattgtcccaagcacaactgtgttaacacctaacacatgtatcacctctgtggtcacatacctggtccctctcatagatcctacaggccatccaatacagtcactacaggacatgtctcctcctcacaacctggccttagtcattctatctctccacctggttttccaagacttcctccacctaggcctacatctctcaacgccacttcccaaccattcttagacacacctgcatccctgcttcccatatcataaacacctcttcatatctcaattgagcaggttattgcagctaaaagtggcaccagtcaacaaccatctaggcaagatgttgcaactgacattatcatcagtactcctattgaggatgtcacttaaactacaattactttatccattccaacagaggtaattcccgtctctcaacctgctgctactaacagagttcctattaatcccattcctagctctagcaacactcaccctatgaaaaccaaatccaaatctgatatctctaagccaagaacttacatggtgagtagagaaccacttaccttgaaagaagccctacaacaaaagcactagaataatgctatgggtacagagattgtagctttgaaaagaaatggtacctacacccttgtaccattaccagctgaaagaacaccattagggtgcaaatgggtggacaaaattaaagaaaactcagatggctctgttaacaagttcaaggccaggttggttgctaaagggtttcaccaacaacctggttttgacttcacagagacatttagccctataataaagcaagttaccatcagagttgttctcacattggctcttgctcacaactggacagtaagacaactagatgtggacaatgccttcctcaattgtgatctgcaagagaaattctatatgattcaaccacctggctttgaagacaaatctgcaccacatctagtttgcaagcttcaaaaagctttgtatgggctaaaataggcccctagggctggtttgagaaacttcaacagtccttactgccacttggctttacttcatccaaggatgattattcattgtgcattcatcacaaaaattcatctacaacactaattctaaaaaaatatatgaaaagttgaaactcttttatgattcaagaaccactcatcttcccgaatccatatcagagaagaatcgtatcatggcttctctcaataacagatccacaaaacacatcaagttttttattccaccaaagagcataaactctggtttttggagtgtgacaatgtaaatgacattcctcttctttgtacataattcttttgagttctttttgggtctcaaacccagaattaagaacttaaacccaaaagccaaatctatagcgagagaaccattgagagcgttgagtcaaagagagatcacctgtcgaaatccccattcatcatcttattcttcttccttaacgttttcttctttctcaccattagatcagccttattacaccacaatccaacctccctcttttcccttttcccttttttcctctcttcttcttcctttttctctctgtatccaaatcgtagacatttaaaaaaatcccaaatctttcatcactcaggagatctaccggcgagtaaccacatgatcgaagtcagaagcatgcagggttgaaagggttagcgagtttcgtactggaaatgacgattgacaagccgaagaggagcactatactggaatgcaaatcgacagggtttatctgaatgtgatttgtttttacatttacattgatcaatatgtaacctttgttaaaaaatatcccttaatgtttgcatgcttgagcttgaatttggacatttgggtttgtgatttgtgttttatttctgggtttgtgggcttggctcggtcatgatttatttgacatttgttatttacctttttcatttaaggctataatttcggagttttactttagatctggttgttgcttttgtattttgtatgtaatatattttgatttagaatcctgtataaagttgttgttcttgacaagttctgggttttaggtttaaggaatgtgttaaacaaattttttaatgattatggacattatgagttgcagatttgggtttctttattctttttgttttgtttgttcaaaatttgagtttgattcaggtgtgatgtatcacttttgatctaaatcatgtttcaaaatctcaatttaatttaaataagaattttattttaattcaaagagaaaag

SEQ ID NO: 221332 - DNA, 2394 bp, Cannabis indica
ccaatataccttcttctttttcagccattgaaacaaatttttacctctttggttcaaaatatttttgaaataaacgaacaagtttttaagttcataaagggaaaaagagatatgctatttgataagtattatggtttgtgagttgtgacgttagcagtgtcagttttaagtacatagaggagaagtatatcgatgatgatgttttctctcatgtgagagtgttggaagtctaacttgaatgtacttgtctttactttcaagtggatccctaattcccattctcttagtcgttggctaggtagggctttagagaatgtctgactttggattactggtgcatgcgtaataatgggagacaaccatagataaattagtgattttgcgaacatgaaaaatggggagaacgtggagaatatagttttaaaagaggaaatgagggttcgtaatgaatctaaccaccctctgtgctgtgataacaacacatttattattatagaggtaaataaaggcaccctagaggagacaactgaggaaagagacgagcatttttgtgaagaacaacactatgatgcaaatgagaagagtgttgagaaactggaaaaaattaattagggtttccttcagcctatgattattgacttggaacctgattttgatctaatgaagaagttacgagaactggaatcttggctagtttctttgaaggagttgaagtttcaaggtctagattaaaagagatattgggccaaatctaggaagcgaaactgaagtgtctttggaggttcaacactttgaagccaagactatatggcatcttcttcaaccttaaggaggattgcgtggaaattttaaagaacatggcttgaattattaatggcaagttattgattaggaaggagtggcctgaggatggagcatagaacaatatggaaatgagtaaaactgttttttgggtccaagctattgagttaccatctccttacctgaattggataagaagccccacaatcagagccaaattaggtatttacaaaggaagtgatacagtggaccatcacaccattaccagaaggattttcttcaagttctaagttgaaattaatattcaccaacaactggcctcgaggttttacttggatatcaagagagggagaaaggagtgaatacaattcagattttacaaactcctaagcatctgctacaactccggtcatataaggcacgagaagaaaaaatgttttaggcaaactaccttcgtgtttcctcctaaaagaaagacaatcatggcctatggtccatggacaaaggctgaaacatcagttttgagttgttttaataccaggaattaattgaactggtttagagatgatgctagagttcgtctccctccgacaagaagaccactggagttttcaagagaattaagggacagaggggaaaagccgatgcctgaatttagtcaaaccagtggagaagctccgtccaagtcccacgtctcgactaaggaggaaggtggtcagagttcaagaaggaacttcagaagccaattatggaaaaaatttgaaaatcattgagagcccttgtgataacacagtggttaatagaaaaaacatgaaagagataatgaaacagtacccgatggaattgtttagagaaaggcgtgttcattcagtttccccatgcttttggagaagacatccataagggaaagtctcctactttgacagaggaagaaatcattaaaaaaatttcttcaagactattaccaacaactaaagattctagaattattaccagtatcatgtctaatgatggacccatctatgaacaaatgatggaaggcccacatgagaagctatgtaagtcaaggcagccatataaataacttgagaaaactcattttccttggccatcttatgcagtaaaaattgggctggccaaggaattgatgtgcccaattcaagttgacaaatttgagcccattcctgtctttttccatgatccacttgatgtttttgagcatgtccatccttgtcctcagcctaggaaaagaaaggcttgcttaaatttaatgccctttgttcctagaactgaagagaattttcgtgagttttcacaagagattcctgagatgagtacttttctcccatgcccagcaagctctgcatttaagttgggtacaagagctttatcatcttcgaccaaaaatgacaagcgtaggaggaagggctctcgaagtcgcttatctgcaagaaagtagaccaactttgtacaggggttgagaaggaggacacaataagaaatttggaggaataagtgaatttagtggaggtttgactggacaacattcagaattttcaaatggataaggaggcggcccttatcaagcccccc

SEQ ID NO: 221333 - DNA, 1932 bp, Cannabis indica
aaattgtaactagtgaggtccactatgtatggctggccacttaagcattattatgctattattttaccttttttttagtccatataatttaaatcctaaccctagatgaaatactataaaagaaataagatgcatctcattctcataacttaagataacctagttttcattctttgtcaaacaaatagaaattgagagcatccttctatagctatttcaaattccttctccctcttcttcattatttttgaatccttagtgaagagtacatggccactcatatcaagtcaagtattcaatcatagtgtgaaagattgtgaagaatccaacacttgaagaagatctagcctttgatcttgttattactctgcgataaaaaggaacaagggttagagatctgaatggaaggaaccatatcattttggttccaccaatgtaagattttctaaactttatatgtatttattttatcgttttaggaaatttatatttaaggtgttagattatagaatataatccaatatacttgttaataaatctagattatggtaaaataacttctaacaattggcctcagagctatggtaatgatttactttcatgaaatatggatataaaacgatgtttgtatgatttggatgtggtcatatttatttatgtgcttaattgatgaatggttataaattaattttttttatgaaaaataatattattttcattctggaaataatttatttggattctttatgaaagattaagcaagtttggtttttacgaaactcgatttcgattaaaattgagtgagatatgtggatttgaaaaatttagtccattgggtgtcgaccatggtgctcatgcgcttagatccctggacaagaagccatctgcgcgtgcatgcctcgaacaaatcccttgtctgaagctcggtctcacccctcattcaaacatgagctccacacgccaacaccttgtaggtgatcgaggttccttggtcatgaacccttcaaactctcccttcgcgcacgcatagaggctgcttgcagcatcagtctcggccaagggtgttttcaccccaaaaattccaattttggtgattttttcaccaacgtttgattttttttttcatttcaaaatcactacatattaatataaaatattattttttaataatttgaaactaaatatacaaaatttaaaattaataatatttaattgttttaatagtttattattaatttttgatattttgaagtttgaatttggaaaaattagttattttatatttgaattgtggttggattttgaaaatttattaatttcttaaagtttacagaatatttaataataagattaaatattttaatattagttatattttaaattaaaattatattcaaattatcttatatgataaattaaataacaataaatttcaaataaaatctagatattttcatagatatcctaaccataataatttttaaattcataaattggttattatatgatataatttattatttataaatcataagttagaaaaatgataattattattatattataccattttacttataaataatattatatatatttaaataacctagatatttttgtagaaatttgaaaagacttaaaatgagatattttgacatataaatttgaaaattatcatttatttattaatttattcttaaaataataaatgcctaaccaaatctattttagaattagtttatttaattattttaattttcttaaattataagatcaaaaaatgatatgaaaaatatctaattggttatttcatattatttatcttattacatatttaatttagtttgataaaataattcaaataaaatcgaaatattttgaatatagtttaaattttgaaattttaaaaagatattttaggttgtttcaaca

SEQ ID NO: 221334 - DNA, 3421 bp, Cannabis indica
aacagcaaggatggatattgtgttaaatggagaaaatgacttaattttttattactttccaattattttcattgcagattagttaatttgtttctagtgtaatgtggtagttacagtctctaggatattttctctggaaagaaatgtgcggaaaagttgcaatatttttatcactggttacatatttaaacttaaaaaaatcaatctctgttgtttgcagagaaaattgaagggtggcacatgtgtaaacttgagataatagaatgcagaaaggttccctggccaagtagtgccataaaggagaaatattgcgttgaagattgttattggccttcaaaagattatgcatatgaatgtaaaatcaaccttttgactggaaagactcatcaggttagaaacagacttttatttgctttttcctcgtttaatattcaatgttcactttgagcaggggattcattgagtaactcttgagttgccttcactagtttgcatgatggtgatcatggggcagttccaaatatcatcatcctttaaatatgtttcttatggtatttcagacaaaactattaggttaattttttatcagtcgttattgtattgtggattttactatagtaaattctgaaatctatacaatttgaagacttgatcttgtcaagggtgtaggagtttgcaagaaaactgaggtgtgggaattattatcactgtatatattactatttgttggacaagacttatgagtttgccttggaaatgataatttttctgatgcagattcgagcacagttaacggcctgtggggcaccaatattaggtgattcagcatacatgccagctgcacttgcggagataaccagtccgggagtgaacccatttggaaagcacaggaaaaatcagtcaatcgaggatataaaagaaacggatattacagagtggattgcacaacatggaaaggaacctagtgttggtattggtcttcaagcatctcagatatcttgggatgatgggaaacatatgtacgaggctggaatcccgtggtggagatgttaagaaggttaaaacagaggataaggattgactgcaaggtctggtaacttcttatgctaaagttgatcaatttgtatgccatcatctgatcgcatattctcatctttatgtagcttattcatttgctagcaagttattctttgagctatcatcatatttcatttacgagattagcaagccctgtaagctggagaactatgttacttcttgtaatactggaaaatcaaacatagagtgactttcatataggataaactgcatagtcatttcatttatacaaacaaatatgtaatgaaattttctaatacttctctccatgatataaaaaaagttggaagaaagatgtgaattccttagtattggaagccttttccatcatgttgtggtattatggattttcccttttgctttttaatgaatttcttgtaccaagttgctgatagttttttgcttctcttcagagtggcataatctacatggtgaagtccaaaccttactgtatatccatatttccactcaaaattatcgagcaaagaccaggcaaagtagcctctcacatctgctccatttctaaatacagagaaaacatgtcattaaaatccattaacactgactcaagaacagaaataattgcagttaacaatggctacctcactgctttcaacagagcatctaagtagtcagccatatatttcactctgtagtcatcatgtagagattctttggtattgttatcaagattgtcaacgaaaccataacctacaagagccacaataatctcatcagaattatctccctgaactgaagatgagtacatatatcttccatgttcaagtctatgcttaccattttctgtaatgaacattggtgtgttattgtatcttttcattacataagtaacaattttctccattccttgtgggtagacattcatccaatcaactgcagcctgcacaatcaaaggaagttacattttcttgttcagagactttaaggttaattggtaaacttgtaggaataatattgctataagatcaatatttttacatacaggcacagattctccaatggggactccatttctttctgaactttgccggtacagaccttcagtccaggagacaccaaatccaggttcacaagatgaatcgatacagtcctggacatagtaagtgctgtagtgattgatgcctataaaatccaatgccatattcagtttctccttgtcatcacttgaaaatttaggcaagacagatcccaaaatgtcttccatctcagctggatatttaccatatatgattgggtccagaaacctgcagcaaacttaactttggtttactattcttttgcttaccattcttatcaagaaatagataagctaaccagttcaatgtgaaggaatgagctctttcagctgctgccttgtctgccatggagttggtcaaagcttcataccacattgcttgcaagacaatcccaatactacctctctgttctttctgtaaaatcccaagaatacattatattatatgctgtgagaacttcaccttcccaaaacttgtgcatgatcagctggttacctggtatttggtcctgtaaacatgaacagcggttgcatgggataagatcatgttatgtgctgctataaagggctctctctctgaatctccatttgaacagtttccaaagtggcttgagcatcgacatggtggaaatgtacctaagcggtaaccccatatagcttggacgtttggctcattgaaagttgcccaatacttaacccgattgccaaagtgtttgaaacatgtctcagcaaagtaggcgaaatcatttctggacattgtaaatcatcagaccatgcatatcatatgtggtaattgattcattaattcgtgtgtatagtaatgaaaatgagtgagattcttactgtgattttggactaagccaacctccatatctatcctcaagctcttggggaatatcataatgtgtcaatgttacaaatggctcaattcctgtgagtacaatatttttttctttaatatttggttaaccataacataataagatttggtacatatataatacaaaggatgagaagatacatacctttaagtagtagagcatcgattagattgttgtaaaagtcaactccttctggattgacaccaccatatattccttctgtactcacaaaatggacatatcgttttcaaaatcaatataataaaatgagcatgctttttaataaagtggtacggtacgtatatatagaaattaaaagaagaaaaaaaaacatactaggcaagattctggtccatgaaatggagaatcgatagctgttaactccaagggacgacataatttttac

SEQ ID NO: 221335 - DNA, 7911 bp, Cannabis indica
taaataattaaataaaaatatgcaaatttatataatgtaatttcaatattattatacattggaaaatattttcttaacttattagttattatttatatgcaattaaattttaattttttattattattttactaataatttaaaataatagccgcgcgaagagcggaattgcctagttaaataaagattttttttaaaaaaaaaagtgcaatttatccgaaataacaaaaagattttttttaacatagttgaaaaaaaaaatcacattaatttaaatactaatttataataacttaaaatcaagagtctacttacaatatttcttgataagtttatcaaaaaatttaatataaagaatgcataagtgataaattctgtgtaaaaataataatattaaatcattaggtgaaaaagcaattcgtcaagtaaagaagaatttgttaatcataatctattcagagcaattgacactataaaaccacatttatcttcttctgcaatccctgtaatcaagaaagaacacatttttatggtgttgaacgagctggaacaacatttcttttcatatatataaataaaaaaaatcaaataaatttacataaagacttattatttttctgaaatcgcaactgcggaagacatttccaagttttatcacacgatcataaactttattataagtttgccaaatatattttctagcccgcaaaaaaaataaacacttttaaaatccattagcttaacaatgaaaaagagttcatcatccaatccaaatattagtgcttcgatacacatctaatttaatgaaagtaataacaaaataccttcccatccaattaaaatgaaaatttataacactaattaaagggggcattgcttatataactaaattactatactatttgatcagttatttgatcaagctcaatcgttatataatcaagctccaatagaaagtaatatgttccaagcataaccatctgaccagaagttcagaacaagctttcacaacaaattttctctagctttgatcaaatcttttttttgatgaagggggggtgtccaaggacacccattcattaaaacagggcaaaaacaaacgcccaagagtctaaacaacagaagtacgaaaacagagcaaattacaaaaagatgcaagaaaaaactggaaacagcaaaagaaactaaaactacatcagctcatatacttgacaattggtttggaggtcccgggtcccattctcttaagtcatccaagactcccgaatccatatcatgaggcacaaaggctccagattttctccccattgctgcccactttgcaacattgtgtgctgcgaaattgcacattcgagaaatatgagtaatttcccactcttcaaacattgagcaatattgcacaaacctcatcttcgccgcttcaattctaaaatccacgttgcactgtgttgtggctataaaggaattcaccacacacagattatcacattggaaagctatttttttacacctgcctcagctgctaccttcgctgcaaaacaaaccgcctttgcttcagcaactaaagggtctgtatagctggcttcctgggttgaaatggatagaatcgatcccgagtcgtcccttattaccgcagccagcatactaccattggggagaactgcaacgtcagagttgcagcatgcccactgaggtggaggtggcgcccatgctaggatgttaaccaccttctgatttgctaccaataaatgttctttcacctttagtcgaatgagtcttaaaatctggatcaagtcagtctctttttccccatggactcttctatttctttcactccacaccacttcaatgatacacaaggttgtgaccataagatcattaaaaggaatattgagaggacggtttgccgcttgtctaaaccaaccgaaccaattcttccaatcacttatagcataattttcagtacgaatacccagccattgctgaaccaaattgctttcacgaagctacaagaccaaaagagatgaaatgtagtctcggtcgtgccatacagagcggacaaatatcacatatgtctttgagaatgggtgctaatttccctctcgtaggaagaatgtcccgatagacctgccaccagagaaacttcagacgaggatgaattggggaattccacatgagcttccaaacatcttcctcattagttctcgaaactgttgacttaataagtctatacgccgatttgatggaaaacaaaccattatactctcccacccactgccacgagtcatctgtgttgacctctgggagatcaatgtttagaatagcattggcatcttcgtttccaaacaactctcttaccatttgggtgttccatgtgttattgttgttcaagaattggtgtacccaagctacaccatgggtcgcatcctttaggggcgtgggggtgcgattggaggatgggacccaaggatcgaaccagattgacgtcgaatgcccattctcgattttcctgcagagccctttccccagcacactcctagcatccaaaatagctttccacaggcccgattcactcccttttttttcaagatcaaggaagtttttgtcttttatgtacttggcattcactaccatactccatatgcttgttttgtctgtcaatgctttccaagcccattttgccataaaggcttgattaatgacttcaatcctcctaaaccccaggcctcctctgaatttagattgacagatggagtcccactccagcaggtgtatctttcgcttctcatctgtgtcgccccaccaaaagtctctaaggcatctatcaactttctttgcaatgttcaggggaattggttccgaagccgcgacataagttgccagagaagagccaaccgattggataaggcaagttttcccaacttttgagagtagtctcgttttccaactcttgactcgttgaagcgctctatccaccaagaagtgcatatcccttgacctatttaaggatctgaataaagggaggcctaaatacgttgcatcatttctcatccttctcatattcaacaactccgcaatctctccggcaagtcttgatgggactccctttgaaaaaaagactgtggacttttgatagtttacggcttgacccgaccacaaacaataatcctcaaggcactttcggaaaccctttgcttctttcactgaggctttgccaaataagataacgtcgtctgcaaacatgaggtgtgttataggcgggccatttctggacactttgaatccgtggatggagccctcattcatccttgtagtgatcaatctcgataaaacatctgctacaatgatgaagagggccggggataaagggtctccctggcgaagcccacatgttggtttgatcgagccttgcacggatccattgattagtaaccccatctgacgaatagtgatacacttttccacccatttgacaaaattttgatggaaacccaatcctttgagtgtagctaatatgaatccccaatccattttatcatatgctttttccatatccagctttatcatcatataccctttctttccttttttctgcttcatggagtgtacaatctctctagagacagctgtgttctccgcgataagcctgccgtgaacaaaagccgacttggccggagagagtatgtggggcagtaaaggcttgagcctgagagccaatatctttgatatgcacttatacgccacattgcaaagagctattggtctatactcattaacacttgtgggacaatcttttttagggataagaaccacgttagtgttattaatgaactgtggaagatcggcgtacatgaagaaatgggttaccatgtccacaaagtcttttttgatcacgttccaatggtgaatatagaaccccaccgacattccatctggccccggtgccttatcttgtcccatggatcttatacacttcagaatttcattctctagaggaatagagataagtgtctggtttgtagtgtcttcgatgagcagattgttgattagagagttcccatccaagtctgaacgtgttctgctggtgaaaatgctattgaattttgaggagaagagatcggctatagatctcggatcagttacccagtcaccgttttctgttcgcactgtttgaatgtaattcctccttcgtcgaatagcggttgaggccatgaaaaatttcgtgcatctatcaccttgttgaagccaagctaccctggatttttgtttccagaaaatctcttctctagtgagagcttcgctaaggttcgcccttgcttcccccaaggcctcttcatgaatttgatcttttaactctattttttccaaggctaacttcgcttcttcgacttgatgtctaatatgccgaaactgggtcttgttccacttctgtaaatggtcttttgtctttttaagtttacgatacagattaatcattgggttggtatggagctcctcacgccatgcattccgaactacccagaaacacctcaggtctcttccccacatcaattcatacttgaattgtggttttgaacatctcgcacccccctccgtattaagcattataggtttatgatccgacgtactaacagtgagaagttccactatcgcatttgggaataaaatgcgccattcagttgaggcgagagctctatcaagacgggctcttttaatcgcaacacttccttgggttgttgaagccttttggtaccacgtgaatctccccccttggcatcctaaaccaataagccccgttctactcaccatccttctgagatcaaaagaataccttgctgaattatttttgttcacataattgatgcattcataatctgccagtgtaccattgagatcaccaaaaagcactataggagaactgctcttagaaaccgtgtcaccaattcgagaccagaaaacttcttttcccgagtttgcgggggggccataaatcccccaaaaatgtccacttaactcctggagggtcagactcaatcattccacagatcgcatttttccccggctcaagaatgttgcaaattacccctgctttccaacagattcccaatcccccggagagaccattgggaggagcataatcgaaatgaatgaattgaagcttgtacattagcttttcaaatttttccttgactaaccttgtttcagataggagaatcatatcgggatttgaacggcggagcacctccgtcaattgtcgaactgccgcggcattcccgagcccgcgacaattccaagctaggattttcatggggaccttggagacttttctgcgcaagtctccatagccccaaattgaaaatcctggttatcatttgcttttcccaagttttgctcgtcatcgtgctcccatatgagtagttcttccccttcattcaattcgtttatttcacaccccgggtattgcttctttgccttttccacaacaacgaagtgattatccagatcaatagttagatcaattccttttacattccaaagatttctgtattggctactatttcctttgatggatgaccctcttttcctccttttcaagctttttgtcttgactccgatcctctcattgggcatagtaatactctctttcttcgtgtaagacgatggcaatttgcagggatcgttgatctttcttggtcttcccctttttcttttctgtattgcttgttcattcgacccaggcgagaactgtgctaccgtccctccctcatcagagttgtggttgacttgtttattctttgcttcaggggtaaccactcctgatgggccttcatcatatgattggagcctcccagggatcatatagaacccatcaactgccttcctctttttaggcccatgttctgtctccatacacttaaagtcttcaatatttagaattgggttaaacaaggtgggctctctatggaacttgtctatggttgtggaccccatcaaaggttcaaaagctctagcccaacatagtcttgaaggccattccagaggttgggcttgcggcccaagaagggaattgataaattggccaaattgaaatttttcttgtaaagtgaaattttccctgtcttgcacgcctaagtacgaaggatggggagaaggagtatgcggctcagggttctttgctgtactcagaatggttcctcctttttcaggtaatttttccagttctctgtcatgtgctatgttggggctcgcctcacttctgtttgtatgactgagaatagtaccgtccttttctgtagtcgtctcctctgaagatacagctctccctgcatcggttttgttggatgactcgcctggagatgtccccatcataggattaggacggacaggcatctccttttcaacaaccatatcagctgtattctcaaaaggggtaatctctccgattcccggtaagtgcacggccggaaaacggttcatcaccacttctttcgtcgccggtctcttctccactaaaacctcaacttgtcttcttttcccaggcagttgtcttctcagctctctacattccatggcctccgcctccttccatcttcactctatccttagtttgtttcgagtttcgggatccttaaccgtttgttgttgtaggatccagtcactgaaccattaaggaagaggtagatggaaaggagatctttccacagcatcttcattcatccaggtaccaaacatagggaagaatgaccctttttcatccttaataacagtgggggtcttgaaacagaatttgaggtcatgggatagagctccacatttaaaacacatttttgggagtttttcatattgatatcgtatccacaaatccttaatgcctttacgccttaaataaaaaccagagaacaggggtttttctatgtcgacaatggctctgaatcgcagagtgcccatgccgaaggaccctctttcgaaatttttttcaatgtgtcgtggtaactcatacgatgctgagacttttccagcaagctcttgtaggttcgtcttattccaatagaatggagggatacttttgagtctaacccataatggcgtttgatcaaagacaacctccaagggtgttaaccaagatggccagggcatgagaaccagtagatggccacaaactaaccaggggcgtcgtaataacacattatcagcatcccagctggattggaatgtaaactgaagaagaccatcttccctctctttccaactccatcccaccagagagctccgcgcattgttcagagagccttgaatggccttgcgtcccagcctcgaaaaacagtagatctttcccagtagtactctattcggggcctcactatgatcaacttctcccgggtttaagtcgcaagtcagttcatttgtggtaacctgaatagagttttcaaaaagatcacttagattagcatccgccattgcactctcgccaaaaccagaccaatattcggaccactaactaaataacaaacagaacaatggtaagctaggcttcaagtatccttgcttccatacacacccaaaccaagtggtgttcaagcttcttcaagcttcacaaaatgacctttggttacataattctaaacacaggaattaaagaaaaagccatgacgtccagcaaccgtttctcaggcttcctattattgattttttcagttggagaggtactgaaactgggtacacccgagtggaacaccgtaaggaccaacttggagttggtagttgatcacttttgatcaaatctgatacaaagtatccggttgcattcttccaatcaatgacaaactcctaataaaaatactaactatacaatttataaggtttttttttttattaatatattttgatatataattttataaatctaataac

SEQ ID NO: 221336 - DNA, 1556 bp, Cannabis indica
ttataataatacaaattaaagagcttggtactttcttatcaaatctgagaatcagttggaaatgagtgtatgatctatcccactaacaactaccgaaaactacactatgacatccctatctgctatctctaaccccccgcaaaccttatcccaactaccaaaacagttaatttacccttttaattataataataataaaaaagtaataattaataataacaatgttatatatttattcaaaaaaaaaaaaaataacaatgttatataccgtcctttttgttgtcccctttctctctctctctctaacatgtaataagtaacatgcatataaattagtggtgtatggttcttgtagttttcatcactccatattggccagaactagaactagaaccagaaccaaaaaatgggtattttcagaaataaagtcctagtttataaacctcttaaagaagtcgatctgacctctcatagctccgagccctatctaccagcgaatgtcaaaggttcatatgatcttcccttttctttcttcatcttctatgacttttctatcatttcatctgtttttacgaaaattgtgtgactaaattattccacaaaaaccagccaagtgctactcaattttgtttctaatgtaaaataatcaaacacaaaaactgttatttaaagaagaattagcttatagatgattttgtaggtgaacatcttcaaaattcattgtaaattgataagacataactaaaatcaggagaaaagtaattaataagctctgtttctttaaaatcaggagaaggatttgattgtattatttttccttaattaacaaatcgacaaatatgatgttttgtataacataagtatggattgtctgaagtgaaactaattgactatgtctttggttttgtgtgtgtgttagcaccacgtatggctggatttcttgtcaaggtttttgtgtggtttatggagtcaaggatttttggaactttgctactctacattttgaaggctaataatcttattcataaggtaatcaattcactcattccaatatactattttagcccattatagcacttagcatcggtttaaacaattttctgtaatttgcaaagccaccttaccgtaccatagaaacagtcaaaaatttactttaaaaaatagaaagaagaaaaagaaaaagtatatgtatttgttaatattttgtgtagagctgtaaatttaatgtttacttcttgaaaaagtataaaccaaatgtgatgtgaaaatctgttggacagttgttcaaaaacgttgtttccatcacacttgaaacagaaaacaaaacacaatatgccaccaactacaatttattattattattattattttatatctataaatttttcgaaattcattgatgattttatgatcagagtttgtatttgaaggtggggcagagataatatatttcttcagagaatgtattctttttgtttttttgttaaggtttggagagcgtattaaaaaataaaataaaatatgttaatcaaattattgagcaatttgcggcgaaa

SEQ ID NO: 221337 - DNA, 2687 bp, Cannabis indica
aaaataatactaaaaattagattcaagctatttagttacattgtgttgtttagttttttttatatgctgtaattgacttgttttaaacttgtttcgatatcttatattattcattaatttttttaaaatgtgtaataatgtggattgtcatataaaaaaattggattattataaatacttcaaatgttgaaaacattaatgctccaactatgtaattcattcatggaaatttatggtgttaaaagtatctctacatgctgtagaaaagagtaggaataggcttattgacattggattttaacaagaaacatttttagagaaaatatggagaaagttgtcttttacaagtttgatagagaattttttttcacatatttataattgttctaaatttcataaaattacagttataagttttaatttttctataatgtacataagaaaatacaatcgtcattttttctttcatatttgttgtgactgatgattttgtggaaaatgtagatttcttgatccacaaccaaactattctgcattccgagaagcaagttatgggcattcaacgttggagatcatgaaccgaacacacgcactttaccattggaaccgcaatgacgatgggaagaagttggccaccgatgcctttgtgctgcgcaaccagtactggtgagtaaaactctaaaccaaaactaacatttagcttctaaattataaaatgtgaatacgaacttgtcaaatattcaatttaaactaaaagaggatcactctttagtagtcataatttgaaaactaagtcggtccatctattggctgttttgaatatggtgtactttgttggtcaattttcttatctttagatagttgggaatattgtggtagctagtgggggaaaatgtcagtgtaatgatttaaatgttcttaatgaatgctgaactaacttggtttgtggacataatgtagggctaaccatcacttgaagaagcaatacctgaggagtgttgttggagggattgccatttagtgaagaagcatataattataaagcgcatttgcatggtttcaaagaaagaagcaaaggaaataatgctattggataagcaattctactttttaagctctacaaaatactacatgagatatgacatgcagtaactgagacctgttaatattaggtcccatacatccaaatcttaataaaaaaaaatatgttgaaaatctgatatttaattgttttaattgttaaaattctttaacacccataaaatatattatattaagattaaattctatacataaaatattacatattattagaagtgtataactatagatttaaatccattgatgattcaaagaggataaaaaacatgaatagcaaaagggtacctcaatttcttgatagagataattaatttagtgatgtccataagtagactagatttttggataatgatcttccaagaatacaagacttagggttctctaattttctctcttgatgggggaagagaatagaacttttctcttgtttcttgaggattgctaccattatatatcttaataagttattaattttagtatttctaatttagcctctcaataaattagaagtatctcttaaaatatccacacatttaattcatgacatttaatacacaatgacccacaattactaaattgatcactttatttaggtcaaactttatatagcaatacacacaaatacatatgagcccacattagagattttaatccaacaatctctcacttggattgcatatgttttcttatagtgtgtaattttataagcacttaaactttgctattataattataggtatttcaaaacaatctcatccattaattatactaacataggatcaaagtggctttcgccacatttagcgcaactaaatccatcaatgatcacatatatcaatataaccaaatgacatagaccaattatggatgtgtagtataaaaattacatgcaaatatgatcttagcatgcttatctccaactgatctactttaattgagatcaattctttagtatttctacccttatacttaaaccttaataaaaagaatacattcagagtactcaaaatttaagtccatactttatttgcagaatcaaaccataaatatatatcaacttgataaaacatcccaaatataaactcccactaaactagcacaatcttaaaataataccacatccatatatgagcaagaagctcttgaaaagccttaagtggtatatctttaatgatccgaatccaaaaacatggagtttgttcttacatgttctatagacaccttataactgtgaactttattttaatgacaattagctcaaagtcaatgtgcctttgaccatgtagagctcatgttgttactaaaatacaatttgattgatttattgtcacaacatatatctttaatagttttcaatgccatttctaattttgcagccatatgtgacaaaaaatcacaccactaaaatctttagaagatcatcagaaatcttaatgatctctaaattttctgttttctgatttttaagtgaacatatagtattttattctccataaattctttataacccatttggctgtatatcaaaagttctttatagaattacttaaatatctatctaacattcttgatatgtatgttaaata

SEQ ID NO: 221338 - DNA, 3029 bp, Cannabis indica
agatgaatgataaggaggaggaagaaaaagatggggtttttatctgagaatttgatttggaagatggtgaggggatttgaatcgaggtaaaaggtgaagatggaagtgatatttgatttgggtttgaggaaagaaaggtgaaaacttccaatgcaccgatgagaattaattcaacgcctgtaaaggtaaaggagaagaaccccatttctgtatgagatgagattagttttggatttctaggctagaaaagtccttctcaacaacaagcctcttttccttgctcttcttttttacaacaagggcattgttagggtcctcgggagggttttccggagcagtaacaccctcatccgaagggtaaaagccatatttcttaaagttttcctaacaggccaaaatattgcgtcgagtagctggaagggaaaaaatgtggttggccctgtcccttagtctcaatgtggggagtggctgactgtaagttggaacacgatggaagaattagtggacaccttttatgttatacgccataaagtaactcttggcgtaccctccaacctttaacatggttgtattattaatgtcgcctaaccactgatagccctactggttaaaatagaagtatccaatcttattctggcctggattgaattttagctcaaaataataattcacctaaaaaggcgaaggttgcgaccaacctaactcatcatacatgacaaaaagtgcgaacaagtattttatatttttttgttgcaatttgagttggacacagcttgaagaagtttaatatgtccttaaagtatgagtgcaaggggagtattgctccttgctcaacatggggccagaccacgctatccagtttggctaggaatggtgagccaagtgatctcgagtaggcctaatgcattaggcatgaccaataagccatgtcttcaagcttggcaatcaatagtgtagaatgaagagatacccatctatctccttctccaatttgtaaaatccatggctcggcagcctcgtcctcaatatggtcaactccaatctttgagggttgactaccttgctatttagaggcattctagcctcaccgtaagagcccgaaaggttaccctagatcatatcacattccttaaggcacctcaaagtagccctaaactctgctttaggcttagcctgatcaacttctggctcctcctcttggccagccagaggctcttctacctagctagcctcaggctgttcaacatcctcaacttggcgaacccttcctcttgccatgaggtcgacaatatgaggatccatagaggtgccttgcggcacatttatttagttcttgccaagctttgatattgctcggagtgctgggcaatagtcacagtagccattgtagtaggaggatctctagatacaaaagaggtcgtccaacaggtagtgtgtcaagcacaccctgacatacaatataagtccaagacttgggaaggaactgtctccacccctagtttagttcccagactaatcttctgtagatctcaccacctattcattcagaatagtagtgatgttaaacttcacgttttggagaactactactcacttcaaagtcactcaaagagctgctcgacgagctcttagaggaagaactagctaagtgatagtcttcgtacagaagacagagaaagtccttgtcgatttggttgtcacctccctaacagttgcgcgggttcatctgtgcagaaagacaaagagggtgaaactaaagatctcaaataagacaaggattaaaacatgggctaaccagccaatacttgagcatacttatcggacaacccatggatgtcaaaacatgaattggtcagcctttggaaggtttaccaagaatcgtccagctaaaggttggttcaccatgaaccgatcatgatagatttagtcctataaggtccagacagagttcttggaactatgtaccagctaagggttttagacaaaaccaagaaccgctaacagacccaaagcgctaactaggtccctaaacggatcaaaaaccatattttctaaaattcaaagctacgttcttcgaaccccaaagattaaaatctcaaaatagagcgcaatattcgatctttttcatcaaggagttatacattatgtattttaaagctattgaactgaatataatgcgtaaaaattatcctaagatatgagattcaagaagttcataaaagctctaaaactcatcaatggtagaaattcaaagaacgaaaacgagagaaagctttgaacttatccactgagaagacgcaaggaggctctagctagtctgcacgaccagtgtgggtgttagaaactcaaaaatccatgaagaacttgggctcataaggcttcgactcgatggagtcttggggagaattttttccttagagaatatagacgagaggtaaagaatgaaaagaagaatgaggcacttatatatagttaaaacttaataaggagttaatcccacaaaaataggcatgcatagaaaagagaaggtcaagagttgtcacatatgggaaagtgtgtagccgtcacacaatttcccacattgatcaacgtaaaatcaataactgccataaaatcatatcagctaaagagaacaatccttggtcatgcatacctacacgaaggacaaagggtgttacagtatcaaatattataaagtccttacctgaccaaacgtttggacagggacttgaggagaaaatattatcccaatttttctacttgacatggcacctccacgtgacaaaaaataaaaaataccttgaagacagatcagcactaaactgccaggttagtgtcgtacaaccttctaacctttgagattccatggctgcacgttagacacaagcaaagacagaagtattcaagtactgacagatcctgactggacctatagctagccggccagggtggacaggttccatgcactggcaaccttcaataaggctagccgaccaagcatacaggcaggggcggaggtattaataaat

SEQ ID NO: 221339 - DNA, 4638 bp, Cannabis indica
ttggaatgtcaacttgggtgctagccacccagattgacttctaagggtgttgttttgtgtattttcagcttctagaccttgaatttggattcttgttgtcttcgtggtataaaatactaaaagatgattagttagaaacaacttagcatgatccaaacacccattccgaagttactagagtcaacctggggcagtgctagggacccctcccaagtcgactgctatgactcgagactacttaactctgtgatattttctttcttgccacgtgtcaaacattgatgtccaagtcaccaaggttagtttttgggtaaacatttgccccaagtaaactttatacttatgtgaggttgacttaatgacgtaaactatgcccgtttctctcgaaactacaaggtgggcatctattttggcaatctcaagcaatcttttctattctttaatgtcttctagtgagactaggattttcagattcctattcactatggaacaagggaattcaacatttaaagataaaattaaaggagagaaaagagaaaagataatggattttctctcttttgtctttttaaatttaaatttaaattcactccttgttggcttaggaatagaggagatcaatagctataaacagataactcctccatgctcttttctcattcaatccacacgcccaacacagtgaacttaagtgcatgagtctcttgcttcatcaatttttcaagtgttcttcatttttcaagtaatttcccaaaaaattttgaattttttttctttgattttttttcttccctattatgaagctcagtttaaggattttgaatcttgttggaaatccttaaactctaatgtcaagccctttgaaaatcaaattaatattttcatatgagttgtttgagctgaactttttcattactgcaaggtgcaatttgtcttaatttatttggaaaaagatgttttgagctagattaagttgatattcaactgtttcaagttgaggcaagccaagctgagagtaaacatacctcgtgtgagaagaattacaagaaaacatgaagaatatgatcgagacacgactcaatacatctatgcaaagctcactgtgacaatgtctaaagatctagacaaggcccgtggtggaaaagtcgtggccactatgttactcagtgctgctattgaaagtgaggacccgagagattgagcctttgaactaagacctcttatttttagttccattacttagcaccaagttgagctggtacgagatgagtaatcactacctgagattgttgttagaaaactaaggacatggtgtccaagtggctctcaaaatcattgttgtagtgcttggtcaaggtttcatatgaatgcaggagcattcttgcctcttcgcctcgaggaccaagtggcggccctagaaataaaggtcattgtagatgtttccctttatgagtattattgctttgatgctgtctataactcatgttccaccaatggtggagttgtcagctttgattgggcggcctttgatccagaccaggttgcaatcttagctggtgagtgtgagtagcgtgccaatgaggctgctcttcatgacatcaactttgaattgaatggtgatgtcccagacattgggcatgctacaggaatcgaaggctacaaccctgggcacccaaacatgcatgcactcaaagatgcaccagaagtcactatgacacaaatcgagaagcttctgcaaaactagatagttgttagtttttttgaggttgttgtcttagtcctctctttttttttattattagcatttagctttagtgtgttagtcagtcatcccgagcgatctttaagtggggataagtcttagtagaaacatttttagaacttgttccaatttaatcaaaaactaatccaatgtaattaaactttattcttatgtttatttttttttctactatatttgtaaccacgtgagctctaacacttgcacaatatttcatgatttaagaaacttggttattgggagtaacatcaacgttttcttaatgtttcattacaatgaaagtactactcaggtgtgcaaaaaaaagtgaatgcccttataactcctggctcctctgtaccagggtaacacctagctctcgagtaccaaggtgtacgtgcccccctaagtgatcaaagaagtgccttcattggtcacttgccataccaaatcttgttgggctttcttgatcacgtgtcttgaggaactattacatgttgagcactcgaccacttatccaaaaattcgtggggttgacaatgtttaactcacttaagaaataactaaagttatatcgagaccaactctacaaggttctcaatacttgagagtgtcgttaagtctgttagctgtaattggttaattaaaatatagtaccgaaaaaagctttgttcaacgtttttattcatcaaaaattaaaaaaaaattacatcatcattatcgctaaactacaaaaacaaaaacaaaatagcttcacctaactgaattttcattagaattatctgaggtgatccccactgcactgatgccttgtttaactaacaatgtaggggctataacttggtgacggacctcttgacctagagatgaattcatcgcatctgtttggtttaagaggaaattgattcacttgcatgaaataaagtgaatctcactatgaagtgagttgttttgaagaaatttgccttatttgtagtatcatcttaggtgcaccctatttcagtaccttggtacgggcactggattccagttggagtcatagcgagccaacttgtaagttcttggttcaagcaattccatgaagacatatggttcttcccaagaaggtccaagtactcctgctgctgcatcttttgtgttcaagaatactcgtcgtaacaccatatttctaggcttaatttcctataattaaccttggagttgtagcatcgggtgaccctttattgatatgtggccttgcggagctcaaacttctctctgatttcttcaactttgtttagagacttagccaacaattgattattggcttgtttatcataggtgagtatttggtgtgatgatggtgttgaacccgtaggctagagagaaaggagtagggctagttgttattttttagttgtgcgacaagaccacaacacttcgagtaattattcaggtcaattccctttagctttctcaaggcacttctttaagctaactttaagaattcggttgacaacttccacttgcccattttcttgtaggtaagtgactactaaaaaactcttaatgattttgtgcctctcacagaaattagtaaagtggtcattgtcaaactatgtttcgttgtctaacactatcttttgtggaagttcgtagtggcagatgatgttcttaaccacaaagtcaagaactttctttcatattatggtggtcaagggctctgcttccacccatttagtgaaataatccgctgccaccactgcatactggactctgccttttcccttaggtagggagcctacgagatcgattcactagacaataaatggctaagaaattttcatactcttgagctcatttggggcaacactgggtattttggagaacctttggcacttgtcacgtctcttgtcatagtccattgagtcttctatcattgttggccaaaagtacccttgcctcaatatctttttggagaggctttgcccttagcatggttgccacaaaaaccctcatgtaccttgaccatgagtagctttgcttattcttttatgacacatatcaaagaggcattgagtagcttcttttatacattactccttccatgatgataaagtgagcttttttctcatcagcttcttggcttcatttcggtgtgttaggagaataccttgttctaaatacatattaattggggtcatccatgatggaatgttatcaatcatgaggataggttctgagtcttctctgatgcttggttaagtgaggtatttgacgggaactatgcttagagtgtcgaattccatgatgctagctagtttagctaaggaatctgcatttttgcgttctgtttgtgtggcacttgtagaagggagtagtgtttaagctgggctaacagatctttagcattgctcaagtacgttatcattttgagtccttcgtgcttgatatttttcaaggatttgattgaaaataagctgagaatcactgtagatctctagttattcggctttgatggccaatcccagtcaaagtcctactaggagtgcctcatactcaacttggttatttgttgtggtaaatttgaactgcagtacacaatgagtgtgaaatcctttgggagttacaaggatgagacctactccaaagccatgctcattggaggacacatctacatagagcttccaatcctaagctacaatctcaggcgtgtggttctggtcttcacaaaccatgaggtcatcttctttgaggcttgttcatttagtgattaaatcaactaatgctcagcctttgattaatgtttgaggttgatagatattttaaaactgaccaagctctactactcattaagtagatgtcctgatgcttttggcttcatcaagacttgcctgagt

SEQ ID NO: 221340 - DNA, 3407 bp, Cannabis indica
ccagtattcatagtcaacaatgaaaaaattgtaaaatataatatgaatgaatgaagtttttcatatgaagctccatgtctgaccaaggtagccaatcgctgtataattgcttgtgaactatatctgtatggccatcaaggtgctccaccacactgccccggtagaaacagaaatcccatctgcgaaacactcaatgattcagtttaagacattctacaacatgacaaatcctctcatttataacatcatgcatatgagttaatgctaatgcatattcttctcattaagttagttgaaaatgtttgatttttggaataaggctatggttcaatgacttttaggaacttaaaacttaagaacatgaatatgattgatcatactctgatcttgaggagccaagagacatgagagtacggaaaatcccctctgaagttccatcaactaagcctactcccattatagctggatggtcatcccaatgctgcaaatgaaaaagattgtctgtcaactaaaagaataataataataaaaaaaacagaacagttggtgattcaataaagaaacctactctcccacgagaatcccaatcttttgattccttgaaaagcctcaagcctgaaagacagtgcactttgtagttgtaagaacatgcatattttggctatttagaataataatacaaaaaaaaaaaggtatattttgggtaccattttgacaaccgaaaattttccatggtgagggagcaataacatcagatgccattgcctctgtattaagagttgaatgaaatgtccagtctattgagggtttttggtgtggtctcttggaaccacccaatctatcaacaaaaattatattgagaggcttgaatcaatcatttatactagaacaatacattactatctacacttaataaaactagtagtttgtgcatggaattaaacaaggtgcacctcatagatggccattttctcttggaacaagccacaaaattgtcttgacattcctgtaaaggaaactaaaatatgagacagttcattcacactgtgttgaaacttgaaacacactcactgcttcaatttaacaaaactacctttgatgcagcatcttgaagagatcgaatccatcttgctgcttcctctggactactagcccccaactagaaagaaaaatcaaaatttgattagtttcctagtactgtgtgtgagagagacataagacaatatattaaatacacaatttgactatagtaatgtaatgatgtcccaccttaagctgatcactatgattggatgtattgtaaagtgtaaagagaaagaggacctgcaaatcacaagcaccattgacttgattacaatttttgaaccattaattatttcattttcataaaaaacttagtgcatacttttctatgaatactctctcttccattatctgtaacccgaatgcatgagtctattattgcacttttgactggttcctgcaaaatcaataagatttagtgacacaacaatttctctaagtatagtaagctatattttaaaatacatatgtacttgtttggaacttggaaggaccacatgaaatgaaatgagaattcaagcaaataggaattacaatttcatgtctctaattcattaaatcatatatctatcttcaattttgactctttaactaaaaggtcaatttgaccaaaacaataaaatcttgtacaaaggaaaattgaatttgataatggattaactgtacacgacaacaaatatttttctttttgtagcaattttttatttaattaattaacaaaaaatatcactgtagttgacatgaagcagctgattatatgagtcatgtatatgacagtgaattcagaatttcgtgatttatttatttaacaacattaatttttgtattcattcacatagaaatatatatatatatataaaaaaaacttatataacagaaagatacaaaacctcacgacacaaatactgatacaggggtaatcaaacccatatacatatatacatatattataagaagaaagaaaagaaaaggcaaaggcaaattcatttacctcattttgagaaatgggtatggtcttgaagctcgtaagagaatgatccttaagaatgaagtaccttttgcgtgaatattgcaaaccaaacctattgaaacgaatgatatgaagccaaccctccatttctccttcaaccatatattatttcaccaaaaatattaaatgctttgttacaagcttgagttcatgatggtaatggagatggtacatgtatatatgaataagttgagatgatgaacaatcaattgtgcatttatttaaagatttttttggttcatttttataataatataattgttatggtaatataaatggtagaagttgggagatgatgatcctctgatcccacaaagagggaatcagagaatcatgaattgcaggaaattccagtcccttggtttttgctcttctctttctcttttttctttcttcccggttttaaataactgattttgacgtattgttattattcacagcccattcctaacctcaaattaccaaattgccctccttctccttcttcctatctctttaactaacattcatctagcaaaattatagctcattaaatcctacacattttattattatatttttctaaaataaccaatcaatactctgatcaattttatagttcaaaagccagcctatttttttttctttttcaaatgatggggtgacagaattatttttctggataatttcattccatggttgatgaataatatatagtaaataacatttttaaatttggacacgtttggctccaaatatatactcactcactgataagtgataacaataccataaacccaattaaaaattaacacaagatgttgtcaactaccagaagtattatagcattaaatgcaattttgatgaccatgatgaatgaaagctgaaaagtatgtaaaggaagaggggtaaaagagtaattgtaggtgaatgagacactctctcttcattaaatttcctaatggagagttcaagcagactgaagatacatcgttgtttgaattattagataagataatggtgtcttgtagagttattatatccgacaataatcatgtttaatatactactaattattttaatgtttaaatgtttttgcaagtaaaacaccaaatatttaatccacttttttcttttcgtttttttttttttttttttctattttacttgattgcgtggcaagatgggattggtgcaaacagaagagtgttgctgtctgttttttactaaataataattttttgcatttataaaataaaaaagtaagaattttgagctgtaaaaggtttccaaatggttggttcctaatcaagat

SEQ ID NO: 221341 - DNA, 2049 bp, Cannabis indica
caaaaaaaaaaaaaaagttatttcatctgttttatatcttatttttctttttccttttatgtaaatttatattgtaatttacattttataatatttaagtttataatctttctcatctttaccaaaaaacaaacaaataaaaaaaattaggaaaaatttatgatacaacctttaaaaggaatgttctcatatattttgtatctgttttgggatctaaaagaatttttagtctattcataattatgtatgttgtacttatttaagataatctataattttttttgtaaaattcttaatagttatagtgcaaaaaataaaattcaaacaattgtttaccacatatataaagaaaaacagtcacacatgcaacaaatattcaaactttatttttgacacagtaaacatcttaaatttcttaaattttttacaaataattttaaataattacaatttatttggtcataaaaaaaaaagactaaaatactttctagaatgccaaaacagataaagaaatatacatgaacactgtattaaagatgtcctatagaattatttaaatttttgcggtgtgatgagtgcacatttgtacactcattactaatcaactattaggtgaattagtatttacttcataagttttgtataaattttaagtgttttttgttgttgtgcaattttgagctttaaaaacgataataatatgaatttggtgcaaaaaaaaaaaacaataatcaagatatatgtcaaagtcaagaagcaaaacgtgattgaaagaagtcaaaattagaaactagcgacacaattaatttggcacatgcgaattaaaaaaagagaagcaatctcgaaaatatagttcaggcgacatgtcgccacttctacgaaataaattaatttttgcacgtagcagttaaaaaagataggggatcccaaagataaggtccaggcgacatgttgcctggccttaggtgacatatcgcctgacgatgctttaaaatttaaatcctaattccaaatgacatattttctatctttttaagcctatacaaaaaaacaacctatagatcaaaaaatatattaaagaataagagagagagatttcaagcttaagcatcatcaactttcattagagtcttcttcttcttcttcttctttattttctaatttaaattgttgtttgtctgtttactttttagttattttactatttcgttcttaattattatttactttaaattgtctaattaaagtgttaatgcagttttttgttaacggatctaagaagatcgtaatcaagcaagataaacacaagcaatcgttaatcaaagtaaaccggtttgtgaaaaaaaaaaattgacaaagacgaacatgaggattttatagtggttcatcccctttcagcgataataggctaatctacttgtagttttattgttctcaatgcttaaggatagttcttgagagttatgttctccaaaagtttaatccccaagtgagtttttggagtaagagagtgtgagttcgtgaggatgagttttagtgtattcagagtgttctaagtgtgtcagttacaattgatatcacctcccttatataggtgttcatctaggactcacatagattttcatcttcgatatcttctccacctaactattatttagttaaatttagagttcaaaataataataaaataacatataaatatctagaaaaatgataaaagttgaatatatcttctatccatagcttctttttgtcacgaggaacacatgctaagatcatggtaagtcacgagaagcacgtgaggcactccccactttgggccaagatgacacactgaggccttcagggctgagatggccaagtagggcataggagatggtgtggtgttgatcacttaggcccgagacaaacgagtgtgttgacacctccttgggccgagatgatcacctagggcctaagtgatggtgttggtcactcacctagggtcgagatgataaagttgggcctaggtgatggtgtttgtaacgccctaatacttaggcgtgctac

SEQ ID NO: 221342 - DNA, 2476 bp, Cannabis indica
tgccatgccataaagcaaaagaaaaaacagtagagtggggatttattacattggagaaagatgtactgctattaagagtaaaggcagaaggcagagatgaatctaaacaaggttgaacagaatcagatgtgaaggcatacagaccattcttaagtttgccttccatcagaacttggtgagatacctgatccttcacaagacagaaatcaggatgaaactcaaagaaaacatggttatcatgtgcaaattgagagacactgagaagggtacgagtgatactaggcacatgtaacagattattgagaacaagagtttgtgaagtaagaggagtatgaaagaaggtcttaccaacattattgattgagagtccagtaccatcaccaacatgaatttgatctgtaccataatattcctgcttctgcatcagattttgttcattgaaagtgcagtgattcgtcgcaccagaatctggataccaagacggatcactaacagtggaggcagaggctatcatagcctgcatctgtgaagatcctttgtctgtgttaccagcaccagaccaggaaattccatgttgaaacgttgataacattttgaggcaatatgaccaatccgtccacaaagttgacacactagtttagaattcattgaagcaggagatggaccacgggggttatttaaagtaggagctgaagattgaccaaaattagcaggagcagagcttcgacgaccagtagcatagggattccagtgaggtgacctcgaagactgagggaaattcccacgattttgaccattggtgccttgattcgatggatcggaggggtaagtgcgattcttgaacgcaccacgataatgagctagattagctgaaggagctgagtccaaatcttgactctgtttttcaatcctatgctcctgagctaaaagaagcgattcaatctctgcaaccgtatattcttcatgttaagagttaaccgagatgatgaagatatcatagtctgggggtaaaccattaaagatcgcagagatgtgttctttcgctgtcaaagattggccaacagaaccaagccgatccaccaaagtcttaatgccaagaagatagtcattgatcgacttagatcctttcttgaaattacgaagctgagtttgatattgatcaatttttgtagcaaattgagatgcgaagtattgaccgagaatgctccaaacatcagaacaggtttcacaaccaacaatacgcattagaatagtttcaaacattgatgataagagccaagcatagagtaactgatcttgtttaatccaaaattagtaggcaggattgagtatacctgatcgctcatcagcttctgtgagaaatttcagaggaacagggggcgtgggggagatgaaggttgagagatcatgaccttttattgctgtaagaactggaggcctccagagaagaaagttttgtttgtcaagtttgacagataatttgtgagaaaagatcacaggagcagtttgtgtagttgttgccattgaagttgcagaaagaagcttcaaagaatttgagagaaaaaatcagagagaaaagaaaagctctgataccatgttgaacaaaagatttgaggaatgaattatattctcattactcttctgaattgaatatgtacaagtatttatagacttagctagttacaactgaaaggataagttagttacaatcaagaactgtacaaataacaaactaacagaaaatgaaactaagtaactaactaagtattatcactaacagtttgggctgcaaacgtatgtgaaccaatcaaggatttttcgggatggttgactataaacgagaaaggaaatattgtgcttttttctggagagaataataatgtttggtctacaaactcatccaaacaagctctggcaccattggttcagctgttggataatggtaacctggttgtgagagatgaggaagatgagattacaacaaattacttatgggaaagctttgattatcctattaatacattgttgccaggaatgaaattgggatgggacttgaagacaggtctcaataggcatctatcatctggaccatgttatggtgatttcacttatgggattgaggttgatgaagaacaccatacgtatcctcaactagctgtccgtaatgggtctcgaatattgtatcgtcaagggttgttggatggcttaacttcaagttccatcgagagttctctttctgacgaatttgtgtacaacgatgatgaagtttactatacttacaccctcctaaataagtccatgatgccagcaattgtcctggaccttcgcggaagtattgaatacttgggcatttgggctttttctgaaaatagagacaagtgtgactcgtatggcttctgcggacctaattcacaatgtattgttgtgacagaaagagaggagccaatatgccaatgcttaaaaggctttaagccaa

SEQ ID NO: 221343 - DNA, 4019 bp, Cannabis indica
tttaacggtcaaaaaaatttaggggcacaatttagtacatgtcaaaattcaggggaaaaattactaattagcctaatatcattcatcaaatcttaaaaagtggaaagagttgatgattgactattaatagaattagctaaaagtaaactacttgaggctagttcaagtaggcataggagggtgcgtgtgttggaggtcttgggttcgagtcctaaattatgtataattgtaatatataaacgcttaaataataataaaaaaaaagaattagctaaaagtagtgagtcagtttcaatgtaatccaaggttgtcgagtagccacaccattagaaagagtaaccgaacttagtacactatatccatttaatatgaaataaaatttataaaaaatgagataattctcgtcccatgaaaacatgctctccgtacgagtgggaaaatgctctccgtacgagtgggaatttcaattttgatttaagagggaattggtatttccgtacaggaatttcagtgtaacttttgtcgttacatgcgaaattccttctgatccattgtgtgatctagggttttttcttgacaacctttcagtatctctgggtaatcgctctgggttttgctgcaaaaaggaagattttttctcgagtttccttgctctcttgctgttctctttgctgtgtaaggagtttttctgtttatctctggttatttgttttctgtctgtgttttctttgtttgtctggggagatctttctagtgatggagaacaactccgaggagacgcaggtggaacaagtggagctctgtgggttggaggaattcaagatctctttagaagcagaccatgagcttggggtggaggctattgagaaatcaattgttgctaaactgtatacaaacaagactgtctttatgggtctactacgctcgattctgggaaggaaatggaaactggccaaggggtggaagcttcaagaagtggagccaaaaacctttatcttaaggttaacaaagaaacaggaggcgctgcaaatctctaaaaatggtctgtggcctatgtgtgatggttttctggtggttaaacccatgcccgatgatggaatatggtcatctgctgacttaaattcttccccggtctgggtgcgggcgtatgaaattcctcctagatattggacgattaaaaatgcaaatgcgctcgcgcagaagattgggacggtaaactctatagaccgactatggaggaacggttttcctacaaatgaatatatcagattccaggtgactatacaactgaataaaccgattatggtaggtgtttttctcccaatggaagaaggggtgtgcttatggagttatttcaagtatgagaatttgccatgtgtttgttacaaatgtggggttgttggtcatgaggaatctagatgcagacgtaacagaagaatgattgctgatgattttaatagaacggtcccaatgtatggtccttggattcgactgggttcccggaaaaaagattgtttctcggaatatgaattgtatgagcaggaaaggctagcacgggagttgagagatgttcgccttcaagtcgaggctagagacaatcttattccaggggaaggaaactttgagccagcgctgattggcactgatttgcacatggaagcagtgatagaggcggctagaaggcaaaaagaggccgaaccggagactggaaatagttcaaaagttccggtggaggggactgtggcggaaggtagtctgtcgtctttggaaattcaatcgttggaggaagggcaaaaaggtccagggtttgttactaacgtgcatgggaaagattccatgcaggaggggaggtggtggtgcttaatcatacggatggaattagtggtcccagtactacccacacgtcaaatggaaaaggaaaagaaatagctgaggtggaaaagcatcacgtggaacatctagctatggttttcaaagcttctttgggccctaattcaaagccggcccatagactctccagaccactaagatccaggaaggatttgggctcaattgctaagagtgtttcaaggaaggaaataaggcctctgcaagttggaaaaaaaaggagatttgattcttgtgaagaagatttctctattttggactccattttacctggggaggaattatctaataaaaaaatttgtccagaagacagccttaaggtattgaggtctcaagagtcttattcagggagtcaaggaatttcagaagacggagagggtattgggacggcagctatttctgcagaaaattgcaatgggagtgagaaaaatctgggtgtgcctatttctcagcaggccattacccaaaacacaatgtcatcgacggaagggaagaagaaggaggattttaccttggccgaggaggcgggcctttacatgccccccaaatccccatgttagttgttgcttggaactgccgtgggcttggcaaacctgcggcagtaaacgctctccgaagtcttattcggagtgccaaccccgatgttatttttctcatggaaactaagaaaaatgcattggagatggagggtatttggcaaagtttgggatttaataatggtgtggctgtgtcctctgtaggggcctctggtgggcttgctctgttttggagacaagggtggaatattcagataatgactatgaatacaagtaaaattgttgctagattcagtggagacagagtctctttggactggataggttgtttcacgtatgctcccccaagacgagatgatcgcgctgagttctggaatgaattgggtaaattttttgatgctcaggtggatccgtggatagtgatgggggatttaaattcggtgctttcttctatcgaaaaagtggggggaagaccggtcactcaggcggaaggagagggtctaagaaatttcttgtttaaccatggtgcaattgacttggtgggagtgggggctttctttacgtggactaatggacaggatgaggatcatataatcaaggagaagttggatcgagttatcgtctctccggagtggttaactcatttcaagaaagctggggttcgaaatctctctattcgtcactctgatcacgccccgattattctagatactcgtatggaaagagaattcttctccactccgtttcgttacttggatgcttggagtagagatagctcttgcagaaaagtaattgaggattcttggaagcttggggtggagggatttaaaagctttatcctttgtcagaaattaaagatcactgctaaagctcttggtgagtggaatcggctggtttttggcttctgtcaatcgaagattaaggcgcttgaaaagcttttgattgaggtgcaaaatcgccctccttcaaaggataatttagagctggaagggtcgataatgcttgagcttgatgaagtggaggatcgtttagagtcgatttggagacaaaaatgagagaaaattggcttcatgagggggataagaactctcgtttttttcatgcttcaattgtggtgagacgtaaaagaaatcatatctgggcgatcagacaggcggatagctctttgattgaggatagagctagtattgctcactattttcggtctaacttccaagctttgttcagttctagtggggataacgtggataatgatctctctgaattaatcacggcttctatcactcgggaggagaattttcgattgtgtagctgtccttcggaggaggaaatcaaaaaaattgtgtgggctctgcctcctctgaaatcgcctggccctgacggctttccggtaaagttcttcaagcaatattgggacgtcgttgggaatcaggtggtggattttgtaaaagaatttttcatcaatggaaaattctgttctgaggttaataaaacattcattgtgctcatccccaagaagtctcatgcggagagttttgatgattatagaccaatcagtctatgcaactcaatatataagatcgtatccaaacttct

SEQ ID NO: 221344 - DNA, 3767 bp, Cannabis indica
gtatcaacttgtatgcactacgcaccgagtagaaaccacggtgctccttagaccagaaaaacgatcatcagctacattcggactcaatggaactgccaaaatatgttgttgatcgcgctcgttaaaaagatctttaataatatctaaatcacattccctcttatctgtacataccaacgagctcaccttaattatggcccaccaaatatcgggcatctgaagtaataaaaggagacacatcatcaagaagccatggctaatgcaaaatagcaaccttcacaccagaacttattgcccaacgaaccgtagacttcagaagctcttgtgattcgaagacgctcttccacacaaaacatagactattcccaagggaggctgaaagaaaattactcctgagaaaataacaagccttatataacctactcaccaaagagcttggttttgtcagtaagcgccacccttgctttctcaacatattgtcaaattaaagcacatgcctcttgtgacgaacgaaagcccatgacagttcgaactgagaacactcatgaattctcacagccaacgtgaccgcagaaccaccacagaaaccttagccttgactcccacgaaagattttgacacaaaaaccctaaccttggaacatacgcaacacatgtgaaccacacgaacacactaagaaaaaacctaacacatagcagacaagactatttaatataacagagatttaattgtgtaaacttggtaatttgatacgatgaaaacgaacagtgcacaaataccccagcacctgaatattggtatactaattgattatacgaatcacatcttagatattgggtatagtggcttactatttgatgatgagtcaatctatcaactgtgatatttttatgtaaaatttcataaatcaggtaacatttttttttctttaggttttagttttaatcctacataaaaatacataaatcaacaaatatctgttttatacactgataaaagtttgaatttatttggcaagtaaaataatttcttttgtaaaacagaaatatatacatacgaaagatatttaatttggtggggctgatttaagtctttgcattttcattcaaaaaattataaattaattataggaaaaatatttttttttcttcccaactatgaccgtaaatttgtggaccctaatttatttattttttttttttttgtgattgaagaatcctcccaacccaactatagaaatcattaacaaaattgttattacaatcttatttattattaagatacttgagagaaatataactatctttacactgaaaaatagaaatcaatacatacaatataatattggtaaagtcttcatgatttttgttgccatgactaattccaaggatagcaaatactatacctgttagtagcagggtcaaattgacatggtccatttgaattaacaagccattcattaagatggagaatttttctctttttcatcttgaagatatcaaaccaatgaaactcatctttccattgaaagctacaatagaagagtgtagtttcccatatattgggtgtgaaagagaattgaaaagagtcattgtagtgaagaagttgaactccaagatcatcgtctttcgatttgcagtgaagagttatgtctgtatctactataccgttagttgtctttactgtaatctgtttgtcaccctcgcataatgatgatttgtgtgatagtaaagaaaagaaaatgactacaacaaataatggaatggtcttttggcaaaggtgatgatgataattagggttgttgaaaatcaacatgttagggttttggtacaaaataaagtgatatgttatgaatctttgctactcttttataaggtgtaaaatcataataagtaaccaatgaatttggtgaaaccacataataatattttcttttttcagaaaatttaaatttgaaaaaactttctttattcatttgttatatatgacatgaaagaaaaaaagtttttttggacattttttataggcttttacaatttccagaaaataatggagacatttgactaaaattaattatagattaaatggtatgtaaaattggtggccttttttgggagtaaataaatttagaaaattagggaaaagaaattgccaatgtaccaaatatttcttataatctatactatgtataaatgatgattatacaatgtacatattataagactatattatatagttgcaattgcaatcttatcttctaatttttcgaacgttgcaagctgtacaaataattattatcaaaaataattataatattagccagctatagagcttctgaaaccctagctggtccatgtttagtataatccttatgcagccagactatatataatgtaaaatttgaaatttgtttaagacataccgtaaaatttagagaaattttaaaaaaatttaacacgccatagttaaggtttaaataacctgttacacgtgtactttttttatttatatgcatgtgaaaaagaatatttaaacattattttatatattgtaaattattccaaatttcttaaaatataataagatgtctcaaataattataatgtacacaactataaaaaaaaattgaactaattttttttttgtataccaaacaataaggaatggatcagcaccatttttggggtgcaatcgtagaatctctcataatatgttttagttgtgttttaataaacttaatcatgactttttttttagtttgtttttaattttatagtagtgagtgagattcaaacttacgatctactttcaatgaggagaggtgtgaaacactaatatgataatataactttttagttaacttttaaaaatatttctggcataattttctaaaaaattatatttatattttgtaaccgacatacacttaattaattttatttttttttattttgggttgatttaagtaagagatgaagcaagaatgatccattaatcatggctagccaatcagtacatgttttttacatttatgatccgagtgatgaaaaatggtgtgttattttatcgacaccagaaatgaacttcttagagaatgaagaatataagggggaatgctgatttatgttatgatgacttcattgttgtacaaccaatgcatgaacaagtcgtgaaaattgattgtaactttgtagaagacgatgttgaattcattagaaattatatcaatgaaggaatataggtcaattgtgattaaacaagagataaacaaaaaaaaaaacgtgtctaattgataacttgtaattatgtttgtttatgtagttactcagttatagttaacttgtgataatgtttttttatgtagctactcagttatagctaattaatttgtgattatatttgtttatgttgtaaatatgtcaaactcaggttcaggtccagactcaaacttagacccagcagcaaagtgtcctaggtcacaaatgtcccaaacaaattgatggtcacaaaatgttcgaagcaaattgacgatgtgttaagaaggtaataatgcaattactctctatataaaaaaaaattagctaagttttgttaattaattaaaatagtaatataattttcaaaacaatacatatacaagaagattaggggacacatgagtttcttgaaccatatccataaataccagaagtaatttgcccaaaataaacaaaaaaaaaaattaagaatgtagtttttattgaaatacatgagtgacatcatcaaat

SEQ ID NO: 221345 - DNA, 3449 bp, Cannabis indica
tattttttttttattttgtttcatccatacccttgacaatgttatattgtggtaatccaaggaccatggacatataatactaagctctaataaattagattagttattgaatctcatcaataaaaataattctatttattgattctattattattttactaaaaatattgaataacacttttagtaattatataattatatttattgagtttaacaacagtattcattgttatgatgaatactagtgattagccctccacgtatttgttcataattagaattagtcaatttaccattttactcttcttattacttatttatcctttagtactattaatagtgaaagtataatttagacccgatctaaatttgtgcacaactttcagttctagaattaacacttaaagggaactaatatttgatctgttaggaaagtcaggattccacattgtaaatcaagttcatagatatccgcattattagattctcaaaacaagttgtaagaatcatcttctctgagaaactttaacaagtgaatcaaagaaataaataacatgaacaagagttcattacttctcaggatttaggccgatctactaattgatcatcattgtaatatgaattaggtcttcatagtaaatgaaaaatttgataaaggcaacttaattacatatcgatcatgttatatataatctttattatatataatacctttaccaagatgtccatgtacatcagtgatctaaattaagattgcttacaccgaataaaaggtatcaatgaactatactagcaactattgattaaagattctataactttaatatgttgttgactattttattcatatctcgtgatcttaattctctatacaatacatgtcacaacttcatataagaacaacgaattttctaatatttacatagaaattcttaataaataattcaacattcaaccatatatcaaattgttcaacttatatttaaagtcaaaatatttttacatatttttcagggcataaaccccaacactcactttcaggttgaagtgatgaaaaaaccgatgtgaaagatatttaaagtttctcgaagaaataaaatcgccaaaataaaaagcatatttaatacgcttaaaggtggggtacaatttccgatgaggtatttcaaaagtccctttaagactagaaacagtttttaagggataattgttatacccattttctgaagcacttaaataaatgagtctgattgcatgacacgtgtacaaagtaataaataacaaattaagtaagaatcatctggtcgcataataaacaaataaagtcatgtaacaatctcgaaaagacactaaaggaaatattagcaaaactatgttaagacctgatttggtcaaccaacgagaaaaatcaagagaagggctgcatggaattatctttttcagagaagacaactctccgcttcggacattaaatatatttggctactcgctcaaaacatcatttatctcaagaatgctttggaaccacaccctactcaagccgcctctcttcaagaaaaaaagataaccatgtgtcttgcttaggtcaaaaatagttaatgttgatttggctatcgagtttgccttgaaaaagcttaactcgatttatggtcctttcgatcaacattcagagaagaatgtaaaacaagttctacttgactgcaacatgttttggccaagtcaaagcactggttcatttgtacttttaaaacacatgtagttatttatatttctcatttacgcataaacgtgtaaaacatgaaaaaatccacgttatataactacccttcagataagaacaaataatcgttatcctacttttacaaatagcattcaaaattatagttgaaggggacaataaagtttgcatatcgaatccttgcaaaaatctatacacaaacactcaaagaaataaaaataactcgtagattatgttgatttaactagaaaattacgtaaaattattgtctttatttaatttagcaattaaattccaagtataatttattacataattatttcaaaatattaattataagtctcatttatgttaacgaaattctgaattaacagttaacgatattttataaaaattattacattaaatcacaagagattttatacttaattacactaataacaatatttaaaaattttaagtaataataacaatagtatatttaataattccttttttatattcggttttggtagttataatattaagtggacatggttttagcaacatcaccccacttacttgtattacccttattatagaaccaaaaaactatcaataatgagtagtgtaaccattatgacagctaatattagtacagacatctagtaaaagtagtgaaaatcaatacaatgttaagatatttcagaagagactaaatctaaattaaaatattctaaccgaggttgtatctaacattactaacttaagtaattactattaaaccaatcaaagaaaatagcagttattgtggagtaaaaaaaggcaactaaattcaacctaacctaaccaaacctaaccttgtttttccaaatggaaagaatttaaaatcaaattaaaatatatatatattggatctatcaatcaaactttagccataagagataaataaaaattagaataataaaaacttctattttgacagtgcaataaaatacattacatatataaatgaactaccaccttgttaaaagacaagtctttcctcagatctcacgaactttgtgacagaagcatagaaacagattgaggaaaaagccaagccagaaacacccatgttgccaaatctacttgtttcttcaaactcaccaaaatatataaaaatgaggtgaagtctttttctacttttcttttttcttttcccttcgtccattaatggctgacttttgtcgtctgtaatcccaatcttctctctctttctctctcacgtgattgtttatttgagagcttctgcaacttggttatcttttttaattgccagattaaagagtaggctgtcgccattagttttcaaaaatggtatttttctcttctcttctctttctctggctaatgaatgtttacccatttattgttaatatctaaatttcggttaagaacttggcggtttggaaattcaactaccgacttaaacaacatgtcatttcataagcttctttctttttttggtctaatcagtcctgtactaaagtattaacaagttagacttttaccaaaaaaagataacaaaggtcgaagtttggtgtaccaaaggaattatattttggtattgggaaatccatgaacattacactgtttgtggaagttcttttatctttccaagtgtttcttcttttagcccaaaattcacctctttgaacaggtagtttagttgttttcttcaaaaaaaaaaaaa

SEQ ID NO: 221346 - DNA, 2096 bp, Cannabis indica
agcccatctcgaaagaactccacagttaagtgtacttggcctggagtaatttcaggatgggtgacctcctgggaagttttctcgggaactagtacgctggaaacactcgtgttggtttgtagggtcagttgtcagcccatgaagcagccagagtagcgtactcgtgtataagaaccatcattctgtgggtgtaaggatccaatgaaagcttgaagcggggacgttacaatgataaacaactaaaattaatcaaaagcagcaaaactaaacaaaagaaataaacaaacaagttctaagtgaaaactcttaactgtacatcttttgtggaattttctaacatgtaaacaatacacaactaatacctatcaccacaataccaccccctgcatgttgaatttttttgaaacaaaggattattccatttttcattctattttacttcacaaaatctacatggccctcctttggagtcaaattaatcatttaccatctccgagagatttcattaatcaataatcacgttaaattatatagaataattggtaattttattttctgaactttcaataatactaattttgtctcttaaaatatatagtttgtaaattaacaactttcctctttaaactttaaaaactatcaaatgatacctctaaataaaaataagaaagactcaatatttttttttagtaattttaaaaattaatttagatcttaaaaaaaattattttgaataattaagaaatttaaaaaggaaattaaaattttaaaactaacaaagcgagttaaaaaattatttattttttattaaaaaatctatttagatataaaaaaaatatattaaaaatttaatttttataaatactaaattttaggggaatgagtatatttttttcctccaaaaatttagatttatataagaacataacattttttttttagtttaattcctatttttttttcaaaataactttataattttattgaatttttaattattttttaagatatgagttcataaatataaataagtttaattttttcgacaaaaaacttagtttatttaaattatttacttgatttttaataattttagtttgatttttaagataatatttataactaaaataaagtttgaaatatttttttaggaataattacggtttttttaagtaaacttaatatttttatcaggtgttttaataacttttatgattttttttttagaatcattataatttatataattacattttttaataaaaggtggtaaaattttgtattagtcaaagtttagacggtaaaaatactaatttttaataattgaagaaataaaatttaataaaaaatgtataattatgtaactgttatattttaaagagaatttttaactgttgtatattttagagaatagaatcaaatagtgtaaaaagtaaaaatagtaattattcaattatatattatgtatttgtttatgttattttatttataggcatataatataccatttcgtgtggccacttgacagcttttctttctttttcttttttattttttttttttttgtaaattgaatatgagtttgaactttttaaattacaaagttaaaccgcccaatttccccaggattataaatatatcatacaatattattaatattttcctttcatctagatgattaataagtgtccctaatttcattgcaaaagaaagaagtgtccctaattttttttggcaataagtctgactataattaaaacataaaacttcaaaaactaaaataaaatagtggtattactttaatggtacggacacgtaacctaacacgttgacgctagggcaagggcagcttgctttccagttgcatcaattttcctttacttcttaattaattattcacttctctcttctaacgtggggatttgtagactaattcaattcaatataatatatatttttttggtattataatggaccctattaaaataaatatagtaatgcaatttttataatgaatattatttttccattataaattattttaaatttattaaaattttatataaaaacaattagattatttttttttctaaata

SEQ ID NO: 221347 - DNA, 1391 bp, Cannabis indica
acctggagtgttcggtctcgggacatcttgggctatacctagtagtcattgtataacaagttgtaaaagtattttaagaatgtttatattagtttgaacacggaatcctagttatgtatatatatgtttatgaagtttaataattttaattcaagtttttaatttggcacgattttcatgaaaaaccctttaattagcaaaggagacacgttaattggaaaattactgtagcctgcctaagtattagggcattacaaaagatgacctagaagatctagaggatgatcccgaagacaaagatccttaggacgaagatcatgaaggtgttggaaaagaaaaagaagatgagaataaatatgagccagatcctgaagtcattcgaatggtcaaagaactcgctgaaaccaaaaaggagatagcgaatcaagaataattctcccatttgggagaaactctagcaagattggatgttaaaattgaataaggaggagtggctcatgatgaaatattcttgatgagcctcctccttaggaaaataatgctatgaagataaaaaaaacccaaaagactctagaacctctaatcctgcaagggagaacggaaaaggtgtcatgggagagcctataaaaaatactactccaactactccacaaaataacattaataccaacgaacctttatgaaaacagaaggcaactaatgctccaaagcaacgctgcccgattaatcctcaaggcagagttgtgcggggagataagccgagtactcaagtacaaatgcctactgattagggaaggaaaaaccacactagtgattctatttatcaaagtgaaagagtagaggaggttcacccagtttgagagggtactttgtcaatagtggacctctgggcacgtttagatgcaaagaaagaacgagccaaaggtgaaaaggtaggacattatagaaacaatctcaaaaatcatactaatgatagagttcatgggcgtgagttcaaggatgacaacacaaagtatttggaagattaaatagccgaattgaccaagttcacaaagcgtcttgccacaggcaaagtggggctatatctaatttagaagaaaaagatacataaccatatgtaagacaaataatagaggcacccttgccagaatattttagaatgtctcagatggagttgtacgaaggtagaacagaccccaaggtccacatgtctaaatacatctgtttgatgcaagtagcgaaggcaagtgatgatgcaaagtgtctatttttttcattaaatttatcaaaatatgtcgaagattggtggaagagattatctcctagatccatttgtaattggaaagatctgcaaatgatgttcaaaagtagtttatagtcgtaaatgatta

SEQ ID NO: 221348 - DNA, 2104 bp, Cannabis indica
tcaaaaatctcagattgagatatcatggcctggattttaggcgggtgatggagctgggcattggatttgtctacctgagaacaatgttaagattaatttagatgcatcattgtttgaggatggggctcgggaaagagtcaaagtagtggtcagggataataagggactcttcatcgagtgtttcacaaaagtcttcaatgaagcattggactctgctttggcgaaagcaatgggagtgcgggaagcactgggcttattaaagaagaaaatgtggcaacaagtttttattgagatagattgtttaacgacggtacaagcgctccgcagtcaagtcaaaatgatctctttatttggtattgtaattattaatgattgtaagagtgtgcttaaagagttgaaaaatgtctctatttgttctgttaagcggttagctaatatgttagctcatagtcttgctagagtttctattttattccctaatcgtagtttcaatctgagggatgtcccaactgagttgctgccctacttggtagctgaatttgctggttaataaaagtatattcctttaaaaaaaaaaagtaatgggataaaaatagtaatgagaattaattatgatgtttgtttcttgttggaataaatattcgaataagtaataaatttacagaattatctctactttaatttttattcttatataaaaaagagtattcgagccattttatttttacttttatttaatatttgtgaagtaattctcattacatagtttcttcaatataataaaaatttcattgcataatgtaatcaccattacattgtaatctcattatatcacttttaaagaaaaattaaagattataatagtaattttgattccattacatcaaaccaaacatgaccttacatgttaattaatatttttgtgttattttattagtacataatggtagaaaaaaaaaatcatgacttatatttaaacaacatgacagatgatacacattatctttaagaagaacctgtatcacactatctttatttaaatataattgataaaagtaagatatatgattaatctacagattttaacgggagttacattcctctagcacatctccacactagtatttatatatagagtaagattatcatagaacttagcatacgttcactaccggtaggaaaacttttttgactattaattttaaatcatgtggtcattatgatataaggtgtatatttttatgataggactgttgtatacaattaaaactttatacatattctaataatatttaattatatattttatttaaaaaataaaataatattcataattaaaaaattattagtaattacttttaattattatttttttaaaaaagttaatttaaattatttttatataggtatttattttcaaaaagtaaatttacttaaaaattttgctatcaatttttttaggggtttttttttatttttacatttcaaagtagctttttttttttttttttatttttttttgctatttttatgaaaaattcacatagccactcacataataactaactgagcaacttaaatcgcaactcaaatccacataacaactaccaaagtaactcaataccgtaaaaatttaaaaaaaaaaaaaaagtttgaaaaaaaaagaaaaaaaaagaaaacatggcaccaaagaggactaggaatgtagaggagggttcgtcttcaaacccaccaccaacgggttttgatagaacccgctttggaaatattgaggcccacaatcgcttcgtgaggttaaagaatagggcttatattgaagatcggggtattgaattcccggaaaatcccttgaggcgccaacctcggtttgaaacaatcagagctcaaatagaaagaatgaagtgggggagctttgtagatactcggggtcgggctaatgttactatggcttgtgaattccttgcgaattggcccgaccgccggaatggggaagtgaaggtgcgtggaaagaaagttcccgccactgctgatgcattcaatgtgatgttctctgtcccagattacactagggaggaacaacgcgtccgaattattgaggaggaag

SEQ ID NO: 221349 - DNA, 1703 bp, Cannabis indica
attataatttaatacaatagtttttagagagtatcgctaatcaatcacaacacgatatgtcgagaagttgctaaacaccattggtacctaatatcaatcattgtataaatataattatttgaaataataattatgcttacgtggattgtggggtgtacgtaacgtaacacatttaccagttaccaccctaccgacctcaattccaaagaatacaccaaaaaaggaaatgttgtttccaaaattaacaggcacatagggaaccgcgtatctgattctactcatactcatgtacacccaataatacaccgccacgtgtaccctttctaactcaatgtggtctatataataacttccttacccatactacaaaccaaagcttcagtccctctgatattttttttgcttgatcatatcaatttctctcttcaattttctaatattattattttctcaagaaagtgagagaaaatgagcacagctaccttcattgatattatcattgccattatcttgccacctctaggagtcttccttaggtttggatgccatgtacgttttttgctttattactcctaattattttctttgatagaggttaatcatttcttgtagtatttgtgttgattggtgtttatatatatatatatatatatatatatgtgtgtgtgtctgtatatatgcaggttgaattttggatctgtttggttctgactttgtgtgggtatcttcctgggattctctatgctatctatgttatcacaaggtgatcaaactcgttttgtaagtacacacctatattattttttatatttatctctatggtgttttttttaattactcataaaagtttatattgtaattcaaaattgatgataagatgactgaaaatgacttgttaataatactcttttaactcattaattgccacttgatttcaatactttataagtagattgtaataagaagtttacggttaaaaatcttcatattcatatatattaaaaatttctgtacttagactaaaaaaaaatcattagatgttctatcttatctaatattgcatcttgaatattaattttacttttttattttaataattttttttattaattatgtatgttataagataatttataaatttttttaaaagtcgtaataatttatagtaataaaaattagatttaattaaacaagtcatttactatgtatataaaaaataatgtaataaaataatgtaaattttattttcgtacattgtatattacttaatttttaaaaaaatctataaataatcttaaataactaaatataagatatataattataaaaaaattaaattaaaaaattcttctaaattaatatcgaaataaataaataaataaatatgagatctatagaaacagccgtgtgtaccagaatctttagtgagaatatataaacatttcttattcgtttaaattttaatatagttatgccctaagaaagttccctttaatcgaattatatgctacttttaataggagtagttatcaaattagggcatataatgccatgggcctagctgaatatgaccttcactaagcatatatatatttatatttatataaaaagttttataatgtttaggtaagggtaaatagtgttatatttatctaaagttttggattgtaagtgacataaatttaataattttttaacagcat

SEQ ID NO: 221350 - DNA, 2918 bp, Cannabis indica
ggactcgctaaatttgcattaggattgaatgagacttgtacttggttagagattatccctccacctatatactctgttgttgtaaacgaatctctatttgtttaataataacaagtactttccctcaaaaaaaaaggcaaacaaaaggaaacaagtaataactttaggttttgtttctaaaaaaaaaaactttaggttttgagcaaatttataactttattaacatttgaatacaattttttaatcatctctctaatatatttttaaaggagaaaatattttaagaatataaatgaatttaacgaagaaaaaaaagactttatataatttttattttggtgagaaattaaaatttgagacatttttataattgtgcgcagagatgctaatgtgtaatttatatttaactggtttttgatgagttttatatttgatcagcattatttttcaaacatatttgcgcatgctagatcctctaattattttgcatgataataatattcatataaaaaaatcaaaaatttaaaaaaaaaaatttttttttttgaaaaagaatttattagaaccgaaacaactttactacaccacaataggatggtcagccttacaaaacatagctaaccaatccggaaaagaattgtcaaaaaattgtgtagttttatcagctagacatttcctagctaataaatttacacactcattattggttctttttacatgagaaatatgtacactattaaaattttccagcaccctattgagcttgtggataatgttcctttctgtagtgagtgtatttccttgaaacttcagatctgccaccagcactttacagttggtctggacttcaatctgagaagtatcaactgcaggaggattcttcaaagcttccagcaaagcccacccttcagccatcttaacagaacacatgcttggcatataaaccattccagcagaaaccaaatggccactggctgttctccacacgaaaccaagccccacaccagcagtattttcattgattgctgcatcgctattaacacaaatacaaccattttcaggagggatccagtgcttcagattggaggtagtttcccccatttggtgccctgttgtgagatcacttatataagccttcgggtaggcattaaaaacccaattgagaagctgttggccattcatgcttggaagttgattccatttccgattccgattttcccatattgcccaaaggactttgattgtgtcttcaaattcatcccgagttacctgcctctctacttcctgtaacacatcaaacatagatccctctcccaatttggaaatttttttataccaaggcagcagcttcaaaatttttttaatcttgtcacaattccataaagcatgtgtaagattttcatcataccttccacaagattcacattgagtatttatgtccattcctctatgtttcagattggtcttagcaggcagccaattgtggcacattctccacccaaaaagtttcattctagggggaagatgaaggctccaaatcattttccaccaattctgcattgctgtcatattagaacatctagtggggttaagattcagctcccttctaaccctatacccactcttcacaatgtattggccattgggagtgaaaggccaaattaaggtgtcctccatatatatatctatggggattccttggatccaagggatgtcatctttgtgaaaatatttggtgatctcccccatgtcccaattcccatcccaagttatgaacttatgaagtttagtttggggtggaagaccgggaaattgagacaacgtagctccatgaggccggggaagccatttatcttcccaaacattgatttctctaccatttccaaccctccatctagcaccttccttcagaatttgcctaccccaacaaatgcctttccaaacacaagatgcacccgcgggacacccggcttgcataaaagaattgttaggataatagctattttttaatactcggctaaggagagattggggattatgaatgagcctccacccttgtttggccaagagggcttggttgaattcaattaggcttcgaaaaccgagacctccctcttcctttggtctacataatttatcccaagtactccaatgaagcttcttttgatcttttgtatccccccaccagaaattagcggccaaggagtggagggatttaatgagttttttgggaagccggaagcaactcatggtgtagcttggaatagcttggataacggctttgattaatatttccttaccgacttgagagaacattgaagatttccaaccttttagtttgctccaaactttatctttaatgacttcaaaaacctcttgtttcttccttcccacaaagctaggaagtcccaagtatttagcatgatgtgagaccagccgaacccccaaccgattagccatatcctgccccatattcgaagagatcctcttacccatgcttacctcagacttttctagatttacttgttggcccgaaagcctagcatatctcttcaatatgttcttcattgtatcgcattcattctccttagcctcaaggaaaacaaagctatcatctgcgaagaataaatgcgaaaccttgattttatcccttccaaattggatcccatttattcggccagccctttcagcttcatggattagacaagaaagaccttccgagcaaagaagaaaaaggtatggagagagggagtcaccttggcgaagaccccgggtaggttggaaattcccaatttgttcaccattaatgaggaccgaaaaattaacactttctacacatctcataattttctcgatccattgttcctcatagcccaagccccgcatcattgttcttaaaaagttccattccactctat

SEQ ID NO: 221351 - DNA, 2154 bp, Cannabis indica
acttttatcaattttgttttttgcaattctccaaaaaaactgttagaataaatttagatattctcttatttctgtatatgtctctatttaaattggtcaaagcacgtgttgcacgtgaatccagaacccgcaatggcacgaccatggttgcagcaactactagtgactccaataactcctcctctgctcctaaacagagcaacactaacaataaagggcacaacaacaaacaaaaaataaaaaaaaataaaaaaaaaaaggaaaagggtctagtcagcaaggtggggccagtggtagtctgttcaaccagcatctacgtcctcaaactcagtcacaatggccacaatgacagccaaattggggtgggtggaccattcctccttgtcctttcccttcttattcttggcagccacgacccaattacatgaccaaaaaatcttctgctgggcctggtgtgcttgggcccaaacctcaagccttcaatgtgccgctatgcattccctatctttctctcacgccgatggaaactactacatggatatcggtgccacatctcacatgacggcggatgcaggtattctaacgtcttatttcaattaaagcaataaaaatcataacattgttgttggtagtggtcatttaattccagttttcggtcacggtaggactaatttaccctaaccttatcctccttttgctcttcaaagtgtgttacatgctcccaaactcattaaaaatctgatctctgttcgtaaatttaccactgacaatatggtttctatttcttttgacccttttagtttttcgatcaatgatttacagacggggaccagactaatgagatgtgacagtgttggggacttatatcctctcttctcaaattatcaagccacatcaccctcactttcaacttttactactatatctcatgatatttggcataatcgtttaggtcatcctggcaataatattattaattctcttcgtagtaataaatttattgaatgtaataaggcttgtaaaactttttgctcatcttgtcctcttggaatacatgctaaacttcattttatgattctttatcatacacttttctcccatttgatattattcatagtgatctttggacttctcgagttgctagctcttctgggcaccgttattatgttctttttcttgatgactatagcaaatttttttgaaattttcatattgccaagaaatcaggtaaaataattatttatatttttccacgctttagtcaaaactcaatttaaacgtaatataaagtcttttcaatgtgacaatggcaaggaatatattaatagcactattgagcagttttttgatcgtcatggattagtctttcgtctttcttgtcgacacacagtgtcccaaaatggtaaaactgaaagacacataaaatctatcaataatattgttcggaccattctagctcatacttcaatgccaccgttcttttggcatcatgctctatctatggcgacatatcttctaaatattcttccttcaaaggtcttagattatttttcacccacacaaatcctttatcaaagtgacccttactcgaatttacgtgttttgattgtttatgttttccattgtttctctccactactattaacaaattacaggaacgatcttccccttgtgcctatcttggtccggctccaaactatcgtggctcaaaatgctatgaaatgtctagtggcaagataataatttgtcaacatgtgcattttgttgaaaccaaatttccttttttgacactacacaaaaccactcctacaaattatgatttttcgagtgataatattgatccatcgatcatgaatgttatttctcaaaatctagcaccactaaatccacaacctaacctaacccaacaacccaactctccacctattcttcataatgggctgctgtctcacacggccaaaccatacccaattctcatgttgctcagtctttgcccactcctcgtgtagcccagacgctgcagcatccccctccaaattcttctcctttcttggccccgcccacctctcctggcccatcacttggctcgaattcgtcactgcatccatgtctacaccacacttctctcctaggcccaataatcccatgctccac

SEQ ID NO: 221352 - DNA, 1544 bp, Cannabis indica
taatgatgttaataatttttttatatgattatttataaaatattgttgaaaagttacataaatataactaaagttataaaatatatatgaaaaagtaaagcccgaaaatgaaaataggcaggtctgtttaagaaatacgagttggcacgagcaaagcacaacatgaatctgagcacgacacgaaaatattaggcctacgggtcgtgccatgtataccctttaaaaatgtcggcactacacgacatgatccatatttttctgtggcacgacacaccaactattttttaaaaagtatggataaatatgggtcgggtcagcacaacacgcacgaacttacagcactactcatgctgaccaaattcaaaaaatttgaaaagtctcgaaaaatatgggcagccccgtcctgggcataagcaggctaggccgcctgtgcctaggggccatcaagtccaggggctaaaaaaaattttccttttaaaattaaatattttttactaactttgaaatattacatttttttttttaaaataaagacccaaaaatatttttttcctatgacctactatatttaagggtcagccctaaatacggattatgttgggtcgggctaaaataaaattgtgagtcataacatgtcttgttgacaattttataagtacacctaccacagtttgtaggtctaaaattttcatatcgtgctttactcgggccaacactatattttttatatggaaatgtagagggtagaaaaggtaggagggagaggagtgaaaagagagtcaatttcacttgttaggcataaaagaaagttggaaggaaataatagatggatggatttggtctccctctaaatcttttattttcaatctctccaaaagtgagaagattgaagataagacaaaaaaaatataaatcaatttacataattacccttcaaatatattaaaagtatagtttataattaatgatatagtaattttatatttaaaatttatatctatcatctctcctctcctcttaataccaatcaacatagaggaaagctactatcctttccattttattatattctttatccttaactctcattcctctctaccaaatatagcctaaatgtcaacttattatgtgagtatttacagtatcctactaataataataaacattgtagagtcatgataaatttatttatttattttaaataattaaataatttatttataattaattaagaacttcgaatgtatattaataaataatataatattaaaaaatatatttttagtattgtacttaaaataaaaaataaattaatattaatttataatttttttggtgttaattcaacactatatttgaattttactattgatgttggtctaaataagatcgaacgcttagtatgcacgctcattacttgacatattttttttttttgacgcggtgatcaaaatctcacatgattaacaacgcagctctccataattagtggcgccaccttctcgacccaggatagttcatcatctaaccaaaagcatatttcc

SEQ ID NO: 221353 - DNA, 2390 bp, Cannabis indica
ccacttcgacaagcatcttcgggtattgtccaagcgggcaaccaattgccaacttctggatccacagacttcgatggcccaggcttgtttgattacttctttacatgttttgtctctagaccacgcatcaagatactggaacagcgtacgatatctttcccgatccaataacaagtccagaaccaacggtgcatggttagaatctttgatagcaagagaacgaacccccaccttcgggaaactcaccagccactgtgggtcacacaatgcccggtccaacctttctctaatcagctcattaaaacgacgcccgtttgaccaagtgaagaaattcacagcacaacccaagtccactccacccgtaacaaccaacaaaatcattcaggtcctgaccgtcattttcctccacaacccgacctccgaacttctcttcctgacaaagaatcgagttgagatcccccaccagaagccaagggtgactcagggcaaggatctcaagcgttctttcttcccaaaactcatttctcgcataacgaataggtgggccgtaaacaaagaggccataccagttcgggccgtgaaggacgttggaaaacaagaccgtagtaaccccaggtttaaccgaaataacctgaatatccacaccaaccttccaacaaagacacgcacccccagtcgtacctagggaatccgagacggaggctcccccaaaacccaaaccacgccaaattccattcatacgcgaactattaacttttgtttccataagatacagaacatccgaatcttctctgtgtaccaaagctcgaagagctttctttgccgacggactgccaaggccgcggcaattccaagaaaggaccttcatggggctttggggggcatggttcggcccgcctccacggccatagaaaaatcctgcacctgcctcctttcgatagcttccaatttacccaaaaatatcagagttctagcatctgacatcgccgaagactccactctcgccaatcccccaaggcgtgcaggtgccgattccgtcatgacaatctgaccctctccaccagcggccccagaaacatggccttctgcctccatcaccctcggtctaaggcctccgaatcattatcggagccaaaggaactctcaactgaacgcaaggtttgagtgattagtctcgcctttttgctttggtcaatctcctcatccccactatttgatatcggagccaaaaaaaatcctcttatgttttaatagcgctattggtgcaattaagtatcgggtcccatatagtttaatataataatttttatagagtatcgataactaattgcaaggtgacacgtctagaaggtgctaggcaccactagtgcccaatagcataacatccttaaaggatgctacgattagagatgctctataatggtaaaattttagaggatgcttggtgaagttgacatattatgtgacaaaatattaagatgctataccattaaagagaaaaaggtgtcattttttagaaatttgcatggatactatgttgtagcattgatgctattcatttttataataaaaaattgaagataaaaagttattgtaactaaaaattaagatatattgaataataatgtctgaaatcataattataacatttttaaagagtgttacacattagagtattttcaaaagtaagaatgacaaaaataatataaaagaaagataaaataaaatattatatttttaaataatgtgtaaatttttagtatctttaaaatataattaccattaacgatgctccatgacttttccttctaaaattaattggttttaaaaaaaaaatctgtcatttcggagaaaggaaagctaacaaacaaacactagtagtgttttatttttaatttgtatgtgaagcatattcattttaaataaatatttatatatatttttgtagtgaattaaaaaaaataaaaatgatgttagaaattgttttaaaataagaagagaagagaaccaaataatggagcacgttaatggtaatgaccctaactatggactgtgtcagttatctattagtgagtcacatggtcaagaaaggcacagcacgtttttccaaccaatcccgttgaaacctaagaagatattattttaaatattattattgttttgttattatatgtttaattaattaatctctaccaccaaaaaaactcataggtcagatttatgaacttattagtcaactctttctctctctctttcaacacccaactagtagtgtttgaatacagagaacagtgaacccaaatttttaagtttaagttgatagtaccacggtgtaaagatttaagtgtgtgtttttcttcatttctaattgaaatcaatcagatcagtgg

SEQ ID NO: 221354 - DNA, 1867 bp, Cannabis indica
aatatatatttctatctcatactttcctccatatctgctcccacactctcttccggtgactccctcttttcgctctccgccgtcaacttcttcagtcaggtatgcaatagcttttcatttttttgttatggcacgtctgttgtttcaaatttttaaactttgttaatttcatgtttaccagttcactcgctagattttccattaagggaatctagcctccgataaagatggcgacctccaagactgtcaaagatgtttcacctcatgaatttgtcaaggcatacgccgctcacctgaaaaggtctggaaaggtttgtactcttcctcaatatcttgtttggtttgtcagaaaacgcagcagaatgttagaacttataaccctaaccttgttcaaccatgttttgttcttggcgacaattgtatggtattgttattcattttttagaaatattagtcaggtgttattgctttgttatcataatgaaagttttcatatttttgggtatcgattcaaagtgttgtgcacaataatgtatgatgttatctacacagattgaattgccagactacacagatctggtaaagactgccaagtttaaggaattggccccctatgacccagattggtactacataagagctggtatgtgtttaattggggtgtgtttggtatgtaattgttttgtattttgttttattactgtctaatgtgtacttttttttatgtagcatctgttgcaaggaagatctacttgcgaggcggtctcggtgttggggccttccgtaggatttacggtggaagtaagcggaacggaagccgtccaccacacttctgcagaagcagtggtgcggttcttaggcacatcctgcaacaattggctaacaataacattgtggaggtcgaccccaaagggtaagacgttttcatctttaattgcttgtagcactgaagaatatgtatccagcttggactatgaagttaaatatttgattgatttgtttatttctgttgccttaatcttaattagtattgttggaatcaaatatgtgcatcatgatcatagttgagatttttttcttacatgagttgtcaatacttttagttactagttagattatgattcaattttttcttttggggggtggagcgttattaatggtttttcgttcacgagacaatcgactgtgggatttagagcaattcatttttgtctttgtggcactattttaaatatgttttttgattcatgtttgctactaatattgttgtgttctgttttttaatttgcaatttgctttactgttgctcttttttgtgtaacagagggagaaaaattacttctcatggtcggcgtgaccttgatcaggtttcgggcaggatagttgtttgaacctgctggaatacaagcatttatgtggtttcattaggtttatataataatataatttagcttttgagagttgttactttgggccaacttttttgagatagaacatgtctttgtttattggtgagcagttttgaaatattttctatattttcccagactacttgtacaagtattatttcgtcttgatgattgcattttgggtaaagttcaattggagtaatttcactgatatttgttctagtttaatagtttaatgcccgtatgcgaagttacttgaattttggatccaaaagtgttggcacttaaattattagattggatattatattgggttttttaacgaaaaaaaaaatactggattttgagcaaaagtttttttataaaattattgtctttttaaaataacagtggaataattaaaaattaactgtgaactagttgtgaaaatttaacataatatacaaatacaatataaa

SEQ ID NO: 221355 - DNA, 1821 bp, Cannabis indica
attgttctttaacagtcatctgttctgcattcacaacccaaatccactgttggaacaccggcctatatcgcaccagaggtcttgtcaagtattattattattatattttgttgtttttcattttttggtcattttcatattaggtccatcccaattttggtcacctaacgtgtatcattgcataatcacttctttacatatacctaaatatatatatcttgttacatgtttgaaaatcacagatagcagatgtttggtcttgtggggttacattatatgtgatgctggttggggcttatccctttgaagatccagaagatccaagaaacttcagaaaaacactacaggttaattggttatgaaagcccattaatgttcaatttttacctaaccaaacatctaaaaactccaatatgacattgcattcatttttcacttccaaacaatatacgatagaattgaacaattaaaaatctctctaatttgttatggcagagaattctgagtgtacactactcaattccagactatgttcgtgtatccatggaatgtaaacatctcctatctcgaattttcgttgccagccctgaaaaggtagtataaaatcatatattgtgtgtaaattttaacctttaaggaactcatgagttatactagtcttatactaatatttgacttttttgtttgattttggtacagagaataacaataccggaaattaagaagcattcttggtttttaaagaacttgccagttgaattcatggatgaggagaagggaggtgggttggttaataatgaagaagacaatgagtactcatcatcacagagtgaagaagagatagtggccatagttaaagaagcaaggactcctggggatggtgccaaacttggagggcagtttcttggtggaagcatggatcttgatgatgacattgatgctgatgctgacatagacgatatagagactagtggagattttgtttgtgcattataataagtcaaaatgtaacactataaatatatatagttctatatacatcaatctcataaggcattcccttttcactctccttgagggaatccattatctctttcccaaatcatcaccatcatcataatatttttagtcatagaacaaaacttttttgttactaattaatgttacttttcatttataatattatttaaaaaacaaattatgttagagctgaaaatatgtatatatataagtattttctagtgcttttttctgaccacatcccaccaaattaaaaggaaaaagaaaaaaaaaactatatacatttttgtataaacaatgtaggatacatggtgtccacaacaaggtggcgtggattaaaggaatataaatatatataaggctgctgttaaagataataatttatattgtttgatagaattttaaactgataaagcgtgcactcactatcaaccttttctcatgtggctatctttacataaacacttttaagtggacacaattataaattattattattatatttttcatgtccgattattataataataatgataattaaaaagaaataaaactttcttaggtgcctattcatcaaattgatgaattctctctttgcaataacatatagtgtacgtacataaattactttgctaagaatcaagatctatagtatccttgtagttgtcctataaataattaggccgtagtcttcttggtttatgatgttatattaaaatagtacagaaatggttttggccccttcaagaaaaaaaaagaattattggatttggaaaatctggatgattaaaatgaaggcta

SEQ ID NO: 221356 - DNA, 2876 bp, Cannabis indica
ttttttggcaaattcctctatgatgaaaggcctaatctggagtatagctttccagagcatggagttagtggcctgaacatccatgtctaggaagttttgattcttaatgtgctttgtggccatgactttgctccataggcttgtgtcgccaacaaggattttccatgcccaattcattaaaaaggctttgtttgtggcttctgttgatctaaatctcaggccaccgtaagtcttgggtctgcaaagcttctcccaagcattatagtggaaaactcttttttcctccgagtctccccactaaaagtctcttaacgctctatcaatcttgttcgccgttgatatggggatgttattagaagatgcaatgtagtttgctaatgttgagcccacagacttgatgagacaagcacgcccgacactagataagagtttggccttccacccttgaacacacttcaaaactttatccataaggtggttatagtcttctattcggtaaggggacctgaataagggtaggcctagatatgaagcatttatgcccatcttcttcatcccaagataattagtgatagctcttatcctctcccttggcacaccttttgaaaagaacacataagatttttggagattgattgattgcccagaccattgacagtacgtagataggcaatcttggaacgccttagcttctttcaaagtggcctgaccgaagaggatgatatcgtctgcaaacattaagtggtttaccacagttccatgtctctccaacttgaagcctttaattaagcatttttcttccttatcaaggagaagacaggatagggtctttgcgacaataatgaacaaagatggggataaggggtctccttgtcgtaagccctgctctggattgattttccccacaatggatccgttgagcaagagtttaatctccttcactgagatgtaggcccaaatccactcagtgaataagtgggagaagccaagttgagtgagaactgcgatgataaaatcccagtccattttatcgtaggttttttccaaatcaagtttgatcatcatgaaacctctattccccctctttttcttcatagaatggacaatttctcttgcgatcattgtgttttctgcaatgcaatgacccttgacaaaagcttcttgatttggcaaaataattttttgaattactccccgaagtcgtgacgcgatgatcttggaaataatcttgtaggccacattacaaagcgctatcgaccgatagtcctttgtgtacactggagaatctttcttcgggatgacaatcgtggtgtcattaatgtaatgaggtagttccatatgagtgaagaaatggataaccatctcaaataaattcgcttagatggtgtccagtggtgcgacaaaaaaactcggaggaaggccatcggggccgggggctttgtcctttcccatctcgttatccgtagtgacttcctcagcattgggaaaagcatttagaatgagattatcatggctagaaatagttgcactaaacactccattcaaagccggtggtgagtagtcatgctgtctgttgaatagaaatcatatttacaccttaatggacattgagattcaacattttctctactaaaacgatggctggaggtataaccaccacaatgactccttggcttcagtttacactaaaaacaggataaaaatctaaacttttcgagtgtataagtttaggtatagaatataaaagattttttttattaaaaaaattagctcaaatagtgtaaaaatggtgaagatactggtgcttttcgtgcgaggatttcgttcgtggtgttctctctgcttccttctggtaagaagaagacgaagaatgggagaagacgaattttggacttattatataattctatcccgtcagttattaagaaataaccgacgacatagagcacacgtgtcagtaatttcgtgtgcttatgtcgtcggttatttcctaataaccgacatgatagagttagtaaataacccttcacgattccaaaccccctagccgactctgtaggagtagtctaattctatacttacaatttttataaaacaactgcctacaaatgtcaatttttcattaggctttagcttcctttttaattaatattctaataaaaaattgcctctatttttgtctgtgaaaataaaatcaaattttgaaatctaatattaattgataacaagtacaacttttctttctttgtttctataagaatgattttaacttctttttattatttctttcatgaaagaaaaaaaggttaagtacaaataaaatttgtgctcaacaaagcaactacttacaaacaattcactacatcacatatatatttatttcttgttaacacaacaaaaacaagtccttatgtcatacttgattaactcattaacatgcttaacagattaaaataagtctcaaagagacataagttcctgttcctctaaatgtaataaattactgctgccactatagcagccaacactttattttgcaattccgaaccaaacttccttttccactccttctaatcaacaaacacaataggtcaaatggtacgcaataaagaatggtttctcaatttataagaatattaattttccttataaagaataacaaaaaaaaaaaaatagatgtacattcaccaatctttcaataacatatgatctatatttatatataaaagctaacgattctgttccgttttggattacttcccattcggaataattatcgtaggacctatatatttttcatcattgttggcatgtgataatctctttaaacttttaaatatatgaagtattgaagcattactgcttataagttatat

SEQ ID NO: 221357 - DNA, 3867 bp, Cannabis indica
cctcaacccagtttaattccacaacctcaagattacaaaatcctaacctaaacccaactcaaaacttacaattctcaattcacaaagcatagaacttacctcaatagcttctaggttgagtttaggtacaaaaatctgctcaaattcaagaaaaatggcgaagaatttccccctgcttggctggtgctatcttgctcgagaaagagagggagaggtgatgcattggtgttccttagtttctaagttactaggttattctttcaaaaaaatataatattcagcatatatatctaatactaaaaatttagatcatcaacgctaaaaacaaaataatatttaatccaagaaaaagaccattttgcccttctaaaggaaaattaaactattaaaacctaggggcattttagtaattctaactaatccaccaaaccgacaacttaaagttctatcctaatccgatataattcccattcttatccataatttattatcgtgacatatccaacaattccgctaagttcccacgatcgctgaacccgaagatattttatttcaaaaatggtatccacgatacccagatattctaataaaatctccgtaattaataaattacgttttatttattcgtttactcaaatttcactaattaactcgtaattagcttaagtaagattataatcttactctaatatccacataattacatatttaataaaatatggccaaataaatatcaatataattttcgggatattacaaacttggtttattaattctattattactccactataaatatagaattacaatctttgataatataaaattatatttatagagttcttacttgtagttcattgatatattcaatataagaagttcaccctcaaattattagttcataattagagatggtcaaaattactgttttacccttcaaattatctcttcactccttatgtactattaattcaatgtgaacagttgatctataacttattatagatttggatccaactgttagcacttctagaattaacattataagagaactaatagttgattcgttagaaaagcttgaattctattattgtatgtgtaacgccctaacctttagggatgccacgtgtctgtagttttgtaaactagtttagtaataatagattaattagttattaaaattcgtgataatattaaaaactatactaaaataaaactctagtaataaacaacacaatgacactaaaactttgttccaaagattcctgttacaaaagttttacaaaaggactatataaaatagtaagtcaaaacacgcagcagatacaactgaaaacaactcttgacaactcggtcacataagccagatgggccaatatgtacatttgccggagaagaccatcacctcatggctactctaacttttttttacccttacctccaccacaaagcacccataagtcacaaagacttagcaagaaaagtaataaaaaaaatacatatgataatataatatctatattaatattataaaataattaaacaataatattttggtgattatataataaaactaattatatttattaatctgagaagttaccatccctattatgtcacattgcataattaggcaaatcaatgcgttaacttggcattcatatatcacattaccttatcaggcaagctgatggtctaacctggtatccatatatcacattgccttatcagacaagtcgatgccctaatctaacatccatatatcattgccattgtctaatgatacaatcgataatcaagaaacctaacagtggttttaaatgacgtcataatcttaatttacttttacgttaatcaccgttttattatctcaatcataattgagtcattatgataataatcgtatcttatcatgccatgtggaacaaatatacttttcttacctcatgtttcggtccaggtatgttggccgacctatatagagaatgatcaacgaccccgggccctatgtcataacaacaaaaaaactattaaccaaatgatctaacctattctaggtccaaaattcatttccaaggcttccactataggtcactagggtacccctacttcaaactttgagaaaatatggacaacggggttcaaaaacaccattagaaatggcctgccattttaaaaaatggttagccgttttcttgcagtttcttggcgagaaacagttaactgttttccaaaaaacaaaacagtggatcattttctgtaggaaataggaaccccaaattttatacctctcaaaactccaccgaaacctatccaaatcattccaaacttcacaggacacatatatatcatccatacaacagtttcagtgtaacagaaataaaaaatgagtccttaaacaaaaaataccattaaagatcgagctttgagctttaaaagctcacactcgatttctactttaaaaccaccttaaatccaacaaataagcatcgaaatcaatcccatagcaacccaaaaacaaaatcacgagatcacaaattccataaccattctaaagcacaaagtcaacatataaaaattaacttttcaattttgaaaaggaaatggattcttacccatgttctccttcaatgattcactacctagctgctatcagggcttgaaacactaagtttttggctgaaattttagaaaaaaaaaaaaggaatggaggagatggtagttttgtcacatgaaggtgaagcaaggtaggttttttattttgtagttttgtttaaaggttttaatatatatatatatatatacagataagtttaaatttattaataataataaagataatactcataataaatataataataataataaaaataataatgatatacataataataatattaaaactttattaataaaaatagatattagcggctaaaccacctaaactttacggtttgtaacacttaaccacaaaaatcgaaattttggcggctaaactacctaaaccctggttccattttgctctacacaccccgtccaaaaatcacagttaagtgacatggtgtgtacacacttgtacacgtggtaaatttttagtagtccacgaaattttaattttaaatatactaaaaataatttaaaaattaaaaaaaaattataaaaatgaaaaaaatcttattttttcttttttttttctctttctctttctttttcttctcgacaagtccctggccctccaaacccatatcactatatcatatcatcagagccaaaaacacacacgaaatgcaccatcaacaacacaacaatggtttactcagctaccactcttgcaataaaatcttcgtattggatcttcccatcggaaccgacctcaacctcccggatccactcatcgaattaggttggctcaagcttcttgccaatgctggtaaggatgtgccggagctgagtgacggagacgtagccagtgcactccttatcgatgaccgtgaaagcatcgcggagctggcgatcgaagggttcgggcttcatgtgcttagccatgaggtccaagaatcgagggaaatcgaagggcacagtgagcttttcctcagcgataatggatttcagctgggcttgggtcgagtttcctcccagagactgcatcaaaatccctagctccgacggtgcaatccgaccatcgccgtcggtgtcgaatagggtgaaagcctccttcattgaagatacttggttgtcgcttagatcctttcccatggctaccggattaacagagtgagtgggtctagttcctttatcgctctagaaaaataaatctctcggtttgggagggtgttctattgagaagaagaagaagaataaggg

SEQ ID NO: 221358 - DNA, 1590 bp, Cannabis indica
ataattcagctcgacttgccagataaaatgatatgtacatttgctggagaagatccctgactcatggctgaccaaatattacctatttgaccacatagcactcgtgagtcacaatgactaaacaataaaagcaataacacatcacaaaacattacacagatatcatcaactaaactcagataatcagaatatgataatcacatattctgaatcataaactataagccatcccatttattgaagaaaatatcaaaacatgcaagagtaataatcattttgattagtaatacaaacgtatattgttacttaataaagtaaccaccaattctcgttacctaatgaggcaaccttcaatctgttgcctaatgagataacctttcaccatatgaggcaaccgaatataaatatcattactttatgagacaatcgataagtaagaaacctaacaaattttatttgaaaaagtatcttagaatcacaatcattgttagaagctggttgtagatggtcacgggtgttcatgtttgggacgatgatattattgatgatttgtttcatgttaatgatcgccaactcatcaagaatattgtgttaaatgatggtgttaggttagatcactggtattggttcaaagaggcctcaggtatgtaaagtgttaaaagttcttacaagtttcttcaagctatgcatggacattggaatgaccaaaataatcttgatttttggaggattttatggaatttcaaaatacctccaaaagttaaaattttactttatagtgcttgtactggttgtttgcctacttttactcaacttaaagggcgacatgtggaagtgtctcttatttgtctggtgtttcatggggagaatgaatctattctccacatgttggtggattgtcctttggcgagagcttgctggcaacagtttgatgctacagttgtgagtctttaaaaacgatatttcttttgctagtttcagagtgttataactgatttctccaaagctaaagtgtgccaagttgctatgattttgttttttgtctttgtgatgtgctcgaaatagtttagtgtggcaaagtaaaatttttgtaactaattatgtagtttttgttaccattgcttactttaatcaatggaaggatgctcaacaaataaatactaatgcaattgagtctagttcttcttctgttagtttagagcattgggttgaccaagtattgatacgattaaagttaatgtagatgcacctgccattagtgaaaatgatcactttagagttgtatggccaacccgtgaccatgaaagcgttgtgctacattcttgttcgaagttgttgcttggccagggctaaagcagtggggataaaagaagcactcagctagatcaaacaataaggtttttcaaaagtcatagtggaatccaactgtaagggtgttgatgctttttgtggttcttttcaaatatgtcttctttggtttaattatttcaaattgtcgtgcattaatttttgatttaaaaaatattttaattatttttgttaaacgagctgaaaataaagctactaattatttggcaaaagtctcttgct

SEQ ID NO: 221359 - DNA, 1409 bp, Cannabis indica
ttttttttttgtataattaatattaaacaatacgtcaaaaaatatactaaacaatgtaatttaattaatgggaatatgatcatatattattctatacaaccaaatataatttacatatttctctataattatattattttttataatattctatataatcaaattattttcaacacttcattctaaatgccctttgacatttcgtactttagtgtccaaaaataaaattacttacaactatttcaaagtatcaacattacaaaattatacccttaaattattattgaattgacaaattgtgttcctttaaattacctctatcaaatcaattatgttgcataggagcaaaatttagaagttgtaataattgatagagaatttaaaacaaacataaaaataattaagtgtgatagatatgatgataattgagaaggcaaaatcatgtgtagtcgtgtttttaattaaggtagatagcaatataagtagtcaaagtttcaagtttgtaattagcataaatttaatgtttattttagcggcataagtacccaattataatactgtaatttttctctaatttcatgattacagactctattattttcttaaactgaccacatataaggtctaaatttttagatcattgggtctagacataaatatgtagtatcagttacttctaatattcttttaataaatttaaaacggagtctgtactgataaaattgcaggaaaattacagttttacaaatattgagtacttatgccactaaaaataaatattaagtttatgccgcttacaaacttaaaactttgagtacttatgcacttatttaccctttcaattataagtaatgtgtctttatatatcctttaggtacaaatataatatctcattttcttatcataaacatgtttcccaccctccaatactttactcaaaaattaatataaaaatttgaacaattttaataaaatataacaagtttcaatataactcaaaataatatatttatataaatttgaatacaccattatttattttaaccttacaatttaatatataacttctaggatatatgctctaatttcattgattttttaaaatgagtttgtgaatataactccatacatatagtttagaagcttttgattaagattagaaagaaaaaaaagtaaaatttattatatttttgcactcattatgacatcggatatacgttatagtgtgattgatgaaggttttagtaaaatcaatgaatgatgaaacatggatgtggaacctaactaaaatccctaaaaaaaaaataatttgcggcataaaaatttatatttaactttcagttgttgataaatacttaagtttaatatttgggtttaggaaccacttgcttaagttagttagggttgtt

SEQ ID NO: 221360 - DNA, 3208 bp, Cannabis indica
caactatcattcatcatatcactcgtttcataataaaattaaattaaatgtgatggaaagaggactagggttaatgtaaaatattgtatgtacgttttttttatcaaaataggtggtcattcaagagtgagccacgtgtacggtggacccacgataaaagaggtaaaatattaatatcaacctctaagatcatgaaagcgtctaggaggcaccctagtatccaagagcgaacattcgcccttaaggagatcccaaagctaagccatagactaatcctttgagaggataatgacctcccgaagcttcaaagattcacaagctagtcctaatcttggtacattttctaagacaaaaatattgtagatggcactctcgttgcaaacaacaaaatagaaatgctatcagaaaggtgttttagggatctaacctatacttttctaatattgcgtgtccccataaacaactattgacaactttcttttgcattgtcccatcagccgcaaactcgtcaggtcttatctcaccaaattcctacttcgaatcctaccgaagcttccattatcaaaagtcattccctatccctaggaaaaaggccacatagattttagagggaaagggaggatgtaccataaacttcgacgtgcttccccattctcgcctataaatagggaaagaatggaatgtaaaaagggatctagggaggtggggaagaaaacaaaagaaactcctttgtaagaacaatatttcacaaataaatgcaattgaatcatggactaaagttaattaacacttgaactacgtaaaaatattcttccttatgcataatcaattctaaaaaaaacaagattaagtagttgttggaaatagtagtcaacattttagtgcttttatcgagaattgtggaaagctttcacctgaaactctttcgtagcgatggtgataacttggaataaccaacgacctcctccactgctagaccctcaagaacgcccagacgaagaagtgggcttccgagttagaggagaggaaagtgataccaaaaattcaaattactcgacagatggttaccctgagaattatgaggaggacgagtatgctgaatttcgtctcattacatcgacaaaatgcataatacaataccaaattaggagagcaaagagagacaaacaaaggatgcaagaagccttaacaccttgaagcaagccctagccaccgcgagcctcaatgtaaactccactaccataccatgtatacctggaaatgcaaaagtagatcgttcccaacctcatcaaaactataaacaaaaagaacgggaaacaagccccataaggtaccctttagaatatgctcctccttcaaaggtaaagcctactgtaattacctatgggggcagagtacaccacgaccctagtagggtgtgttctaacctctcgtgaaggaaaagtctgtaggggataaatttccttgaaggaagtacaaaccctaggacggtagcaccaaagtgtatcaatacaccaagggcgggatgagagatgcaaccccaaaaggttaacagagaaaatttctccggttgacttgagagaaaggattaatgccaaacaaggagatctcaagaattgtataaacactcaaagagctgaaccaacaccacaacaagatatcgtaaatgaaggaatattggctgaactcgcaatccactggaaggatctggccaaagtataccggagatagaagggggtgacaactccaagtttgataatgaggaccgggagtcgtgcgctaagaatgtgttagaagctaagcttaccaaaaatttcaaaatgcctgagatgacccaatatactggagctactgaccctagtgatcaactctcttgatttaatatggttgttatcttgaatcttgttcatgtgatgtggcatgtttctttgcgtgacatgtatcataacatcaatacctgggcagaggaaagagtctcttgaagtgtctgcttaagatatacaccttgttaaatgcaataacagataagtaaggaaaagcttaccgtacagaatgaatgaagttgtcctggtcaaagggatttagttagcacctgatgctgcccgattaggagaaatcgcatgagacagattcgttaaagattatttcctattttgcatgcaatcaaatcccaatttaaggggatttacatatatatatatatatttctcacagtttaggaaagtcatttatttcctattttcatagttttatagcttttgagaaaccaatttctattgtaattatctcctataaatagtggaacaattccattatgaaaggatccaaaatcatttgtctgagagagctattacgctgttctttttcctgtaaagctttcaagagagatcaagtcattcttgcttctctactcatcagtaatacaactaaaaggagagtaaactattaccatataatagggttgcatctctataaaacttcgtgttcttaattcatgttcaatattaactatactcttgttgaaactcattaattctaaattgctttttagacttagtgtcgttggccaaaagtgaggtcaacaagggtcatggcggtattgctagttagtaatgatgctaattaagtgttggtatttttctctgaccttgaggacatctgctaaaaaatggttcaggtgttagttttatggtactaaatcaggtacggagcagaagagtttcgtattatccgattatcatcgtaccatagcccctaggatctttatatgaatgtacaataaatcaaaacaataaaaatcaaaacaataaaaacaataagttagagtatacctcttgaagccaatcaaggtatcctaaaaacttcttgtaagttgtatcccttaatccagttgatgaggaatatgcaatttagactcacaacagtatcttccaaattgatccaccacatacaaggaatagtgtgggatattaaataatgtgtataactttgttcttgttgagttctcaacacatgagcaagaataattaagagaaaaatagttttcttttcttcctattgatttcgaaaatagcagtgtgaaaaagagtgattctgatttcttaaatcaagctcttatttatagtagttaagtccctttaattaaattattattcaaatatttaaataaataattttctataaccgattcggttactgatatttatga

SEQ ID NO: 221361 - DNA, 2140 bp, Cannabis indica
tgtaaattataaaaaggaaagtttctgaggcgtgcgtgaccctgtctgctctcttccatggcgaagaggaagaaagtggttcgaaagcctgctgatcatgtttctgagccgtctaaagagaagaatgagggttccactggtgcgatggaagaagctggtgagaaagatggagttactggtctgaatctcattgcagagatagtcgaaacagaggaattagggcaggggatagcctgtactggtttagatcctggaattggtggtcggttgagttcgaattgggcgcaggctgtggaacaagaggaattgatggaaaaggagaaggggagccttcaagattcagccaagactcattggaattcgttcacaaaggtgcacaatgtctatcgtgatcccatgcttgcttattctgaacctatgatcaaaaatggtattaaagtagctaaggtagatgtggaagaagttaaagaacaagctgcaagctgaaattcctctgtaatatgtatggttcttggggctaatccccccttaactgtgtttgaaggttttataaggagaatttggggacatctggggataacacagattgctagaatggcaaaagggttaacaatggttaggttcaatgatgaagcaacaagggaccaagttttggagggtgggattattcaatttgacaagaaaccagttataatcaggccttggtcgtctgacttaagctcgattaagcttgtgcgttcagttcctttgtggattcggctacatgatctaggtctccaatattgggggaacaatagccttagtgctttggttagtactattggaaaacaaattatggtggaccaatatactaaggatagaactagagttcaatttgctagaattctaattgaaatggacgtcatggatactcctccaaagtcgattcagtttctgaatgagtttgatcagttggttgaacaagcggttgaatatgagtggcttccagtcaaatgtaagaattgtaatggttatgatcatatacaagctgattgccgaagagatgctaatggctctaaagtgaagaagcaagaaactaaaccagcagctatggcaggtgaaaaaaagcagcagcttcaatctacaaggcaggtacctatctctaaacctattgaaaaaactgatctggtggaaaaatggcaaactcctaggaaagttattctagctaagaagcaggactctttgaatccaaggtctaatttggagacaaaagcttctacagagaatgtttttaatgtgttaatggaggcagatggtatggaaaaggtggagttggaccctttatctgttgaatctaatggataattgcaacttagcaagttggaacgttcgggatataaataataagaataagcaagactctgtggtggagtttttgaacaagaataaagtgggtgttgcggctttacttgagactaagttgaagggtaataatgttacagagatgatggaaaataaatgttctaattgggactatttttcgagtcctactatagaaggaagattgttggtgctttggagaaaaggatttgcaagagttatagtgattgctgaaactctgcaatttgtccattgttacgtcaaaatggtagggatgacaaatgctttttgctccactttcatttatggattcaataccatagatgaaagaaaaagcctttggtcaaacttactcaacttaaggcagcctgtcaaaccgtggatcttgttgggtgattttaactctgtgttcagttttgatgatagaacaggtgggaataatgtctctcagcaggagttgattgattccaccttgtgggttagtcaagctcatgttgaagaaatgaaaagaggcgggtcgaattacacttggacaaacaaacatgatggctctagtaggatctattcaagaattgatcatgtgtttgtgaatgaagactggattgacaagtttcctactgctactgctatgtttagatgggaagcaagttcaaatcactgttcttgtgtcatttcagttacttttacggaggaaattggcattaaaccttttcgctacttcaacttctggtctgaccacaaagactttaagcctatttgtttgcaaagttggcagcaaccg

SEQ ID NO: 221362 - DNA, 2049 bp, Cannabis indica
aacacgagctcggagaaggaagagataagagaaccctatgtggtcagaaatcataatagaatccgaccacaacgaccgagtataatattgagataagctaatttagagagttaacaatattgcataataattattaaattaatttgataacagtatgacacttctggtgctattttagtatgctattttagtatgccgccattgaaatcgaaaaattaataagattgtgatataaattccacaaataaatttctccatcaaattcatttattctagaaagaaaaaaatttaccttaaatagaaagataatgttgaacagttcaaatataatgcaaaatttgaaatgaaaatcctcaaaccaaaaacgcataaacacagagtactcctttgtccaacaaataattcacaaaacctataatttcaacaacaaaatgaaagacattagcttcagcattttcactgaccttctccttgtttgcaggcattgagctcccatgcagagtcaggttcgttgtctggcgaatcagtataactattcaattaccaagaatcgaaaactaagcattgataaagaaaaaaataatcaggaattgagaaactaatgacagtggcgtaatttagggaagtagtatagattgattgcaacgagtgcccaacaaaagacaaagaagaagaaaaggaaaaggttatagagtgattggagaggtgaagaggaagaaaaacgaataacctgccggaaaatttgactgagagagcggaggcgatttgcagcgagctagaacagcatcttcgacggaggaaactacacgctttagtattttcccaccttttacaataataataataataataataataataataataataataataataataataaatatgtctaaattgtaatgtaaataaataaattggactggtcattgttcaaaaataaataaataaatgagactacatcaattttttttaaaaaatatatattattgtaatatatttttaatataaaaactaaataaataaaaaaaaatgttctacccttacgagcccctcttgctaagagaatgtgttttgaggaggtttcctgccctatttgtggcgaggctgaggagacacagagcacttgttcctgtattgcaactttgccttccacctttgacgatcctctccttggggggttatgcctgtgctcgattcaggagcccgaatgtgggactgggttacttttctatggaatcttaaatcaagaggagttgatactgataagctgttcctctacgcctcaattgtggtagatacgatttggagggcccgcaacgacaaggtacataataattcaatgggtaacattaaacactatattgactctattttgtcttgttacacagactatggctcctgccttctttccccttcacaatctgttgggactcaggcttggtctctgccttcggaaaaatggattaaaatcaactgcgatgtcaaagtcggaggtgagactatgtgtgcagtggcgattgcgagagaccataatgaatcagttttgtgggtggcggcaaaaagattacacttcactgacccactcactggagaagctgcggcctatcttttagccatggagacgaaggtctcattacatcatccttttgttttagtggagagtgatttagagattgttatcaataacctaaaaggggatgactctatttgggggattgagaactatgtgcgtcattgtgcgtcattgcaagctcatctctacttttatgactaattgtaatttttcttgtataactataaactgtaactacgcggcccataatgtggccaaatgggcatttgtcaacaatgttacgggcatggtatagatatctactatacctgttaatatcttttgtaatgatcatgagatctaatttcaattttattttatttataaatgtatttttcaaaaaaaaaaataataaaagatgttttgtaatgtaatttataaatttgtcgcataaatatttaaattgagtaatattttctcctccaccttcaact

SEQ ID NO: 221363 - DNA, 2531 bp, Cannabis indica
catcacaaagtaggtatgagatagttttaacactctctttggacaaagcagcaaaggaccaaacatgatagatctgtccgtaacctctgaaagctaaaactttacagcgtgtagattaaatatcaggtttattatcctattcctctggagattctaacacacaacaaataccgagcttatgtttccaaataaacaggttagcctcagttctgtctatctgtatgcctataggatgtgatcatctccatcaagaaacaaagcaatacccgcacagcactatcatccaacatcatatgctagtcttagcagaaagggaatgcaaacaaggagactgccaaaattaacttaagactcacctttgaatacaaactaagtaaaaattacaatttcttttcaacaaataattaagatcccttattataagcataaacatctcaccataaaagatactgaaaagattccatacctgtgaaaaaggtagatgaacttcatgaggatggataaaaggtaatccaggacgctgacaagaaaattgggaagtatgcagatacaagccagacgtggagtgtgcaccaacatgattaggattaaatggtgcaaacatggtttcaagaagagcataaccgattcccccaggcgctgatgcaggagaccatggcccaggtagatgttgaggatgaggatgaacctgatgttcagcagaaatctgaggtccgtgagtattacccagctgagggaattctgtgttgtagtttactgcaggggtgtacataggctggatggtgtatgatcctccattaaacccgaacccgggatcaaatctttgcatatacctgtaaaatattattatattacattccagtaggtttaaaaatactaacacccacatcataataaataaacgtgccaaaagactttgggaaatgattaataagaggtatctcactctttactataaacacattcaaagatgggattttaaaaacaaaaaaacacgataaaaatgagaaaaacactaatagtatagaaatgtgttttgatgcatcaatgaaagacctttattggaaagaagattgtccattatgatgagttactgagaaaatatgaaagaaatggaactaatagaaacaaagcaagtaaagcttagtctaagacacgattgcctttgaatatatttaagacaacagaaatttgttccatactaaactaacaaatgcaacattctctatcaaccttttggttgctaaggtatcctcgataataaattctaccaacacaaaaatatgtaggcagtgtatagtagcttacctgtcatagttcctgtcatagtctggatccttgctgtcaatatcacgatcccgaaatatagctaccctattatttggtttgtacctaacaattggttccttctctgctctatttctaactgttctaccactacttatcgacggatcaatcagaactctacagggaggtccagaagttatatcagcaaagcccggtccaggtttttcttcagtctttgagatcccaaagttaccatgttggggtgtatcttgcagtcttaattcattatccaatcttccacttgtaccaccgcttggatcaccactagaaaatattctagcacgagccctgttatactcctctttcctctcctcgacgcttttagcactgtttgactttaacgagtttgaattcccaaaattgccattctctgaccccctctgcggcctctgcttaattgcaaccttgacaatgcttgaatcttctgacggtaaatttacaggaatgtcagcaaggcgaatcacaggagctccacagtcagttgttttacgaacaataattctggaaccagagccatcaggcaaactattatctaacaaaaccattgaatgaagtgaataatgttgtgccacacggtgtgcagccaaccgcaagtaagaagtaggcaactgctgaaactctaattgctgctgagtaggatcacgtataaacttctccacatcttgctccatccttaaaactgtttagaaaaaattaaatactcaattagaatgcttaaagcaaaaacaaccacagaaataattacacaaataataataacaaataacaaaattgaactactggatcagagaggtggtagcatgagatatctaaaatcactttcattgaattgatcatggtggtgacaacaaagctaaaaatagtgagaatatgtagggtaaatcaatgcccatggccattgaagtacaaaaattaacagatacagcataaatgtccacagaactcaactaataaaataaacgtaaacaacttaaagtaaacgtagtgaagttcgaatcttgattacgcccaccagtatacatacctttacagacacatacatatcatatcatatcacatacactatatagatatatgtatctagaattgtacatatatatatatatatttgcataactcacttgacaggcgctcccgagggttttgtaatgcttcgcgaagaattgatcaacctgattgagtac

SEQ ID NO: 221364 - DNA, 1493 bp, Cannabis indica
ttagaaacccgaaccgtaaatttaaaaaaaaaagttaaaaaaaatagtgggtaatttccctaaaataaaatattatatttttatataaagtataaatttttagcatcttaagatgctattagagatgttctaaaaactaccttaatgtcataaatatatttttagaaagcgtcaatttcaataacctattcacatttatccaaacaatgagttcaaattaagaaattgaaatatgagaggatattattatttgctgaaatatatgtgtatagttctccctcatcatgatcagacaccatttcatatatataattattatcagggcatgagagaatgtaatatagcatatatgtattatatatatagtgtggtgttagtgtaataatgatataagtaattaattaaaacaaattaaaactagaaaacaccacgccctcatatataatcaatatgttgcaaaaatgcatgcaagtgatcgagaatcaataattagttatatatcagcctcatattaattttgtttgatacaccatccacaatattaatattttctccagatttattttgatgcaataatacaatacatgtatttagattaaagtttaatataaacttgataaacttaatgattgaaaactattcattgtaggtatgtatatataatatactcaaaagaaacaattcaaagttatatatgttggtagatctattttgctttgtttagaaggtcaaatttttggatatgagaaaaacttttgtttgtattgatatttgatcctttactggcatgggacgacaaactgtctttggaaaagcacttgttgtattatacatatatatacactttttttttatagtttgaaaattaattaattggtctcatgaattgtatgaacattataatataagacataataagttggtcttttgattttagtggcacattcttttgaacattgcacgcgttactaaatatataatataacaccaattaattattatatgcatttgaatgtacatatggtttttaaattcaattagcttgattctaatgataatattaaagataataaacttaataaatcaattagcaatgagaagtactaagacataattaattatcccttccaaaagttttacaaaataaaaaagtatttgcataataaaatatcttcattataattagtattattgttgattattttatcccacttacttacccaatgcgttgattattattgttgttagtaagtctatgataattgattattgtttatgagaatttgcaacataaatacacaatttgttagtatctaaaatttaaaaatagtagtgaaaatacttaagattttaactttcaaaattctattagtactcactttaagagttccgtgtgtcaatttttctattggtcaatcaaggtagctgttaatgccaccatttttcatgatcgagcagcgtttgattaaaatatagtcgttcgagattctcaa

SEQ ID NO: 221365 - DNA, 2124 bp, Cannabis indica
actatatcttcataaacatcacagctacaatctagtccctgtgccaaacacttgaaattgttcacaaactacatatttccttcatgtcttgatgaggaacttgaatatcgtagggtagttcaagtgatcgatatatccgaacataggcttatatcaccataaattaatattatatatgtagccagtgatatttcttctgccctgtgacttgtattcttaattttcgtgtagtctcaatatttgcccccttcccatactttcaacaataatctcttttgattgatcttaatatattcgatttattgtagtcacacagtggcttgggggacatttttcggtcgtctttcctagcagccatgaatcgtagggttcaggacgactgggagcgactggttcgagcaatcttgaagagggaacagctcagagctgctggccaaagacacgagagagctcgaactcccagtgggattgcgggttcagttcccgcgtcgctacttaaaactactaacattgatgcgatcttacaagtcgccgatgagattcaattggaggatcccagcgtcactagaattagtaagtttttatttatttattttaaaatatatttcgtgtttgttgattttatttttccttatatattttttttattgttttgtgaaaagtagtgaagggagctagatcagcagggacagatccgttaattttaggagggaaacaatttgtttttacactaaaatattgaactattaatcaaatttaaaacatttaaaataaaaataacatgcaattataaatttcataattatattataggtaattttaattttatactcaaggaaaaattagtagatcaaaagaaaatagttttcatgcaacatctaccatagtattacttattaaattaataaaaaaaaatatattttaaaataattctataaaattatggaagaataaaattaaaaaaaaatatattaggaagaagatttgagtttcttttatagataaataaaataacatttaagttgaattgaaagtactcattattttttaatttcaatatttgtaataagtaaaaaaaaaacaaaaaaagaaaaataatattgatatagaacattaatatagtaatatatacatatacattacctttgccttaactgaattagaattaaagttatttttaaaatacattaaaatgaaccgataaaaagaaaagtttacattagccattaaaaaaaaataataattacattttaagattatgctccggataatccatctcaatcacgatatgttttattgttgtttgttattaatcgaataaaatcatgatacttttttcctttatgaaaagaaatcatgacactttgatacttgaaaaatgaacgctaattaagttgtaatgaaaaaagggtggtttcaaaaacataaaataaaaagggaattgcatgccacagctacttttttccctatatatatgcggctaagttttttttaccactgcttgcaaaaaaaaactttcttttaccactgatttcaacaggaaataactctttattttattaagttaatttattttccttaaatatatccctaatctctctctccttctacatctcccaaaatctaatttttccaacatttagattttctatctatttcctttttctctcatccgtaaattttaattttctgtctccttttttacctattttttttttccaaataaaccttcgtatcagcgtacgatactgtacatatatagaaaaaatggccgcctaaagaatatacttctacctggttacaaaaaaaaaaaaagaaagaatatacttttactttgtttattcagtaagaaaaacagaaaatattcctataacaatagtgattatttgaaaatggttaattagcattttgggccggaactttgacatgtatttaatcatgcctccagaactttgaagaccgtcaaaaatttcttctaaactattgagattgttggatttaaggacttttgtctaattttaataaaaaaaagtctaacatgcatgaagattcaggggcatgatttggtacatgttaatgttcaagtggcataatttagtaaatatcaaagtctgaagagcatga

SEQ ID NO: 221366 - DNA, 3174 bp, Cannabis indica
accctggaatcttggagtctccatcgctcacgccagattcctccatagagaactcggttgaaaaaacactggctactctctctctctctcaacatgctagtgggcttaacctctactaataccatgaccttaaaagggatgattgaccaacacggagtgacgctgcttatcgacaagggccactcataacttcctttaatctactattgttacagctacaaaacttcttattacgacaactactccttatggtatcatgttgggcacataggaaaaggtgcgaacagtgtggtcaagttgaattggatttgggagcaattagagtggtggctaatttcataccatcggatcttggaggagcagatgtgattctgagagtcaaatggctcgagactttgggtaacattcaattgaagtagcataccaaggttatgaagtttgaagcaggtagaacttgggtcacttaggaaggagatttgagcttttgtaagtctcaaatttccctcaaaagcgatgattcacacagtccctcacgaagatgagggattttgagatgaattcgatcatctaaccgtaattgaaattgagttacaagagaacattccaccagtcattgaggctatcttaaagaagtatgatcccatttttcacataccctcaggattagcaccacagcgtgatacggagcacaccattgttctgtaggaaggtgtaagtccagtatctatctgaccatattgttatgctcagatacaaaagggtgagattgagcgatcgatggtggaaatgaagcagtggggtatcatccggtctagaaccaaccccttcttgagtccggtcttattggtaaaaaggaaagatggcagttggcgcttctgtgttgattattgagctctaactcgtgaaatagtggccaacaagtttttgattccagttattgacgaactcttggatgagttacacaaagctaagatattccctaagattgaactaaaatcgaggtatcatcaaatccgtgtttgtgagagaagaccgctttggcactcccgaagggcactatgaatttctaatcatgtcgtttggcctcaccaatgtactagctactttccaagtcttgatgaatgcaattttttgagaagacatgcataagcatgtgttcattttttttttttatgatgtcttggtgtatagctcctccttggaaaaacacacttagaacctagcagcggtctttgagaagctaccacaacatcagctctatgcaaactgcaagaaatgcttgtttaggcaagctagtgttgagtacttgggtcacattgtttcagtcgagggagtctcagttgaccctcataagttggcagacatggcagactagcccatacccaagaccttgcaggagcttcgaggttttttgggtttaacgggatattagtgcaagtttgtcaagggatatggaaccattgccaagtcgttgacagatcagttgcataaagatgcttttggctggtcagatgaagctcaagatgcttttgtggctcttaaaacttccatgtgcacagtatcggtattagccttatcaaaattctcactccctctcatcgtcgaggttgatgcagggcagttctaatgcaaaaccagaaccccatcgcttactatagccaagttctctctcccagagcacgtacaaagtctgtatatgaacaagaattgatggccatcgtgctcgccatacaaaaagggcgtacttacatcttagggcaaaagttcatcatttgcaccgatcaccgaagcctcaattattttttggatcaaagattggtcaccacagaacaccaaaaatggctcaagaaaacccttgactatgactttgacatacagtcccagccaagacttaacaataaagatcgcggatgctttatctagagtgcactaggaggagttgtctctagctgccatatcaatccctagtttgattgctattccaaaccttcaaacccatgtggcagctgacccctttttgtgtgaaatagtgcaagagttacgaaaggggcatgattgcaaagggtacacactgcaacaaagatgtttaaagtttaaagggcaccttgttttaccttcttcctccacattcatccctagtttactttgggagtactataacagtccaataagttgacattcaagggtcttcaagagttttcagagggtgatagctaattttaacgggctagcatgcgtcgggatgttcaaaagtttatgactgagtgtacccaatgaccacaaagcaagtacttgaccaatctccagttcggttgttaaatcctcttcccattccagaacaagtatgagacgatattttgatggattttattgagggccttctgagctccactagttttgactcaatccttatagtggtctaccgcctcagcaagtatgctcatttcattcccttgcaccgcccattctctattgtcacagtggccaccgtgtttgtttgttgtgttttcaagcttcatggaattcctcgttccatcattttttatcgcgacaaggttttcttgagtatgttttggaaggagctctttattcttcagggaacatctctaaactgcagtactgcctaccaccctagtccgatggtcaaactgaggtggtgaatcattgcctcgaaacttacctccgttgtttcatgtatactaaacccaatcagttggtcaagtggccaccgtgggcggagtactggtacaacacgtcctatcacacttcagcaggcatgactcatttcctcattgtctatggtcgagaacccccaccattggttcaatttgagcaaaatactacgactatctctacagttgagcagaacctcaagtctcgggattccattcttgatttacttaagctgaatctcactcgtgcactgcaacaccccgatttcctgagatgtcacataggatagtctgtataaaataatttaataagataaagacaataaaatacttctttattgaaaaatatctcagcatgagatctcactgtttaaaacaaaatacttttagtaccgtaaacttaaataagaactagttaaatcaaaataacggtttcacaatgtttagcaattaaaaacattaaaagaaaaatactacgccagcccctaacatgcggtccacg

SEQ ID NO: 221367 - DNA, 1096 bp, Cannabis indica
taaaataatttccaacaccaagtccttagaaacaaggcccagcgcctaagtagacatggtgatgggcctagcgctcagggtgacaataaaactaggatgctaccttcaatttctcaaatgcaaaatctgattcaaccattgaattcagaattgttagaaatggtggaggattcccttccctcaagttgagaagcctatgaattattaaaaatagaaccctaggagctcagtttaaggggcacaacgtccaggtcaacaaatggccttgtttgttggattttgcttatccgaatcagatgtcgttttgatcgtccatctagttttcgacaagttcaatgatctatgaaattagaacattcaaattcacaacttcaatttttttggcaaaatgacttactcagaaatatgaagtttcgagtcttccgtttcaacgaaaaagtaatatctccaagaactaatgacaatcttcgccaaaacatataaatggactaagttgtgtcaaactatcacttgtgcatcttataggacaccccttggatgttttaatacttttacaatgtgcaagttaatgtcagatgtcaacctgtgcactgggatgtcaactagggcgctggatgtcaacctaggcactaggacatgaactgtcttccggaaaatagccataactcacttaattgtcatatgattgattcaattcaatatgagttttgaagatatttaaatgcgctatcaagttgagtctcacaccctgtcataattctgaagctattgtcatcaaaattcatccccaagggaattacaaaaattagctctaagtaacttgcaacgggacccatcgggaaccaaaaattagctatcaccaccagaagctaatttttaccattagatcatcatcaatttaggaaaacaacttattgtaatttttcttatatttttgtgggtctccttaacctataaaaagagagctcctttagctcatttttcacatttagaaaactgtccacaaggttagagcttctctctctagactttctctctgtataatttggccatttctgacacttagtttaatgttgcaattacaatctcatgagaa

SEQ ID NO: 221368 - DNA, 3124 bp, Cannabis indica
attcacacaaggggatcttgtgtctccaatcaagggtcttggttggtatgggcatagattcactgtattttgtaaaagagtgtattgtttacaatattgctagtttttgtaagatacatctttgaatatagtgaaagttattaccctggttcgggaaacccaagcactagctgcctagaatgagtttctagggcaagtgaagcttgtaaaattctggtgttgaatctttgattttgttctttaaatcaagataaaatcaatctaaatatgaaaaagataggttagacaagaactttgggcttacatatttcataaatatactgccactatatttatttttttgttaatttcacgtaaatgattataatggtaatatataattttttttcctttttgatgaataagaatcattctatttctcaacgtttaaaatttacaaccaactaagtacaatacaaaacacaactcgaacgtacactactacatctaaaatttacatatcttagtgaaccaactctatgacttttgcctattttggcattacaagagtaattctaacttgtatttcgctttctattttctgtacagtgttagtaatatgccataattttttattctaatacacatcattgtagactctctgaacgtggtagactagagctgcaagagcagcatacatgatgttcttttaaatagcactcaatttctttgttttgtctatccaccgaattaattgaatcaggtccagagaagtctattttcaacccgtccaatgcttaactttttgcaaataaccactgtttcaatgacggtgaataaaggcctatgctcttattatcaactcacataacaagacatgtttgatccactagaggctcaaaattttgaatcgggtatctagtttggagtctctctaacatttctaaccaaagcaccattctatgattcggaatgctcgatctatcacaaactactttactaaaacttactgcaagtagttgatcaaatagtaaatcatagccaattttaatgctataccttatgctacaaaatatgacagatctaccttaaatttgaaagcatctgtaacaatgactagtctcttctagtaccagctagagtcagttggtcggtggtactcccaccaattcctatccagcaagtaaacattgttaatccatttcatgaataagttatcttttttgtggcaatttccaaacgtattttctcattgcagtcatgttccaacagaaccttcctaaagcccaaaccccaaccttctttggcaaacaaatattttgccaagccactaaaccaggaccattgctgtctttcgaacccttccaaagaaaatccctggaaatagcttctacatcctttcacaacttttttggaagaatcataatttgcgcacaataagagtgaatggtaatcaaaaaaaaattaattaatgtgattatttctatatatgacaaattcctagagctctaaactttgatccaactgacttttttctcaaggatttcattatattcaacagctgatattttttgtgaacatattaggatgccaagatacctgaaaggaaggtgagctcttgtaaatcctaacatttcaaggagtcgggtaacctcaccctccttcataccattgaagcaaattaactagaattttttcttcatttggtagtaaaccagaagttgaaaaaaagagtttcagacccttcaaattaataataaaattgaaatgaagtcaacatgacaaaataatagtaggtcatttgcaaagcacatatgattcaactttaaagtatcacttctgtcatggtataaacctttccaagaactcacttttctcattattgtagacatatattccatgcctagaaaaaataagagaggaaacatcaattaaccttgtctcatcccttcttggactcaaagaatctgtgcatttcaccattaagtagtaaacaaaatctcagagttttgatacacaccatgatgagatcaatgaaattctaaggaaagtgaaaagcaatgagcatttcttcaatgaatttccattctatggtgtcatatgctttcctcaaatcaattttgatcatgcaactctatttacaagtcttccttccgtaacgcctaacaatatcttggcataccattatattatgagctatatatcgcccatgtacaaaaccaccttggttctctggaattatctcagggaggattttccttaatctcagaaaaattattttagtagcagccttatatatcacattacaacaagaaattgacttaaattcttcggcaatatccaagcacttgactttaggatgagtgtaatagttgttgtatttatctatttaagtattttccctgtgtttaggaaactaatcacaacaataattccaaccttttctcccaccaaatcccaattatcatgataaaaagaactcccaaacccatcctagtgaggagccttcatactttgaatggaaaatatagtatatttaacttcttgaatagtgaaaggttgttgtacaatttgaatatactcttctgaaagtaaaggtccaacaatcattactgattaaaagaccttacttctgttgctcataaaggtccctaacaaagttatgataataacacacaaaaaaaaaaaaaaaaaacttgttggatttcctctggtttttctatccaaataccactctcatttcggatagaattaattctattttgagctcttcgggctttcaaagatgcatggaatatggcattattctcatcaccatttttaacccaatcaatctttgccttttgatctaaaaacatattatgagctttgtgttaatgaggatacctatctcaagccattgttcattctccattaattctctatttcaaggatttctattcaattcttcctagataactagcatctcttgctttgcccacatttcagtcttgtgtattttattaaaaccctcgctattaatagccttaagagcttccttaagcccctttaatcttcccatcaacttatacataggtgtacctgcaatgagggcctaccaactttattatcaaaccttttctacataattttaagctattttcca

SEQ ID NO: 221369 - DNA, 1694 bp, Cannabis indica
gatcttgggttaattgttaatttatctaacataaatagcgtgacaataccctaaatattgagaaaacacaaaaactaaggctcccaaaactgtgaaaactggcaaactagatttgtaaaatggtaaactattttctgagttctgcctgagaaaccaattaaccggttctagagaaatgggtagaaaacccaaagaattttgaaacatgctcaaagctaccccaaatcgtaccaaactctccagaacacctaataatggcaaaataaacataacccaacaagtatatgcaggaaaaacccctaaacttgatttcaccattaaaagctcaaactttggtctttctccacaacagttactaaaaccagcatgaatcaacttaaataaccataaaacatcagtagagaacattccaaaacaatcccaactcgaacagaagtaaaaccctaaaaattcatgcatgaaacctcactttctactaaagaaaacaaagggaaaaggcttactttggcttaacaatcaaacccttggattttttaagctcaattcacctcaaatctggtctaaattgatggaaaaaaaatctaatttcccccttggttattgttaggtttatctttatgtcttttttatagtctaagttaggatgtgttttagtatttttattatttttttgtaaagaactatgcttggttttgtttttatttgttctttaggaaaaatgtttggaaatcctccattttgataattttggtgttctacaagcctttttgagtaaaaataagaaaatgtaatgaagaaaggaaacttttttttaacttggagtaatttcctatttcttaaaatgggtcaaagattgcctttttagctctaaaattcatgttctagagtcaagaatgatcacttttcaaaaataaattgaaaaattctaagtttttggtgttcagcattctttgtttgtgactcaaaataaagtctgaagcttcataccaattttttactatgattctttcacttttagaaaaaactttctgaattaaaattctaaatctctctttcatctttccaaaatatcttgaatttcccaatttcgatttatattgagagagttatgcccaaaatcttatcagttgttgcagcaggaaactaaaaacgggagactacgaagaaaagaggaatcgtttgtaaggccgcgaccttagtagaaaaaaataggaaacttattttttggctctatttaaagggggctgatggcaaagctttgtcaccatttaaatattgagaagaattctgagtgtagaaggagagcaaggagcaggactccaaaccatgttctttctcttccatttctatcttttatgtttttcattcaatttttttttagaatgtcttctagtagctaagttcttttaaaaattattatgtgaaccacttgagaagattattttatatggattaatgtgatgatacaattttttcttcttctctttattcaatttccattcaatttattttagttttgcaattttttactgaccatctataatttttatttatgaattcaaatcaaaattcttaaaggtgagatttgaatatgctctgattgatatagatgtaaattaatttaggacgaaagaacctaggttgtttgtatgattttattagttgccatgtttaatgatatttgtgtgattaaa

SEQ ID NO: 221370 - DNA, 2117 bp, Cannabis indica
cccacgtcagttcaccatcaataacattttggtcctatgattcaaacccttttagattgatttggctgtttcaaaactctcatttcttttatctttagatggccagacattccacgccttaagatggccctgtttgttcaaccacagcaaaacacgtagcgtccaatgttttcttccaataaatttacctttcccgcaaggctgaaaaataaaccgaagtacatgtacttcttccagggcctttgaaaggccatggtggagagagttcaagcatgactaacagttccaaattccaagggagcacaatctgattcttctgctaaagcttcaagcatattaatgacttccgccgtgtcatccaaatagtacttggctttactcggtttctgtccaactgtgcatgcaaacaccgatgaattatttgagagtacaccacttgacattgcactgccaataatctcaaacatgtcctcgtcggatctgtcatcaccaacacacagtacaaaatcggcttgtcttccattctcattcattgttgtgaagatattttcagcaaccaagcctttacttactccctgagaagaaaaacgtctcaattattctatttcattagcaatatacaatcagcacaagggatatagacaaataaaagaatttatatcattgccgctgccaaaaccataaattatattgatttcagattatcttgaaagttaatatgattgaaggttaccaaatttacatggatcctgaattgtcgagaaaagattattgaaaatgtaagcgaccgctgtccattttctgacatcatactgttcttttcaagtgtcaattgccaccttaactatttccttagctatatcagctagacagctacccttcactaatcactaccctacgtttggtatggagcaaaagaaaaatgagaggaaacgaagtgtaggaagagaaaagtggaaagaagaaaaacacagtgagtaggtcccactaatttctttcgtttctaaaccagaaaagaaagtggagagaaaaagtagggtgattattgctaaaacttttgtaactacgattttcttccgccacaaatggggttttcaatacaccaggtctaagacaagtagcatcctcctctttttaccaaaaaaaaaaacaagttttataattacaatgggtataaaattattaaattatctttcctataaaaaatgtatattaattatataaggaatacataataattttatattaatccaattttccttcctttccttcttatctaccaagcaactacaaatgaaatatactatcctttctatcttctctttactttctctctcctacctatctctcctattttctttcctccatgccaaacaactataatatagtaagagtgtgttactgtcctctccttctcaatcgggtctactaaaacaacagcattatgagaaccaatgtaatggagaataatgttccagacatctcccctactttaaagacaaaaccctcgtaacaacatatggcaacaagctttccttgtagtggatatgtactctaggccaaactaatactcccacctctaggccagggtggatgaatatgtccaaagactttcaaaccaaaagttaaaataaaatgtgatgaggaaaaaaagggttatctggctcacaatcatatctgaaaaaagaagtgtcaacttacgcttgtccgtaatatttttctcggtggcaatttttcatggtaggttagctatgaataataaatatacaatgattcttatttctaagggaaaatttacatactagaagaaagcaacttgtgaaaaatacacgttgatgtttggaaaggtaataacaaataaaaaaaatatctacaaaatgtaatttcttcagtcttctttgtttctctccccatgcttagacatagataaatatggagcagcctaatgtgttgttataaaagtgaatcgatgaaaattttcatagtctactaataacattaattaaaattttattcttacaattaaacgataaatgcatactctcatcatccttatcttcttcttcttgttttgatatttgtgaaaataagaaaacaaaattgaatgaaaagaaaaa

SEQ ID NO: 221371 - DNA, 3123 bp, Cannabis indica
tgttctaatgaaattataagatttgacgtaaattaatattaattaataattttattaaaaataatagtaaaaataattttaattatataaactaatagaaaataaatagtataaaagtttggaacgtaataattaaatattaacattgactttcaaaataaatatagaagcaaaatttttacaaaatgaattatatttgatgctctaagtctacaatatatccaatgaatatagacggtttaatgcacggtccactatcaaaaccactctaaactaacacatatttctgagtcaaaaaactttatatcttcatataaatataaaatatatatggtacaatgtagtggatgattttgctccacattgggagagaaaacaacttgacatcgatcattgcaagttgataattcgtttgggtgagaaaggcaatgcttcctctctcgctagtccaaaaactggaaccaaattaagcttgctaaaagttaagaaatatctatcgatctttcataaacaaactgaaatgaaaaaaacaagaaagaaagatggccacgaatatgtatatgtcggtatacaaagccatttttgttgactcacactatttgactttctcatttacataattctcttatattgcatgaaatgaaaatacattgtattgtatattcttctacagcatatattttcaattagtgctatagtccattttctaaactttggcattattattagtttcacaatatatatatagcaaggtgatatttataatatataactaattgcttctaatacttacatttagtcaagctaagcttatagatcaacatgagagtaatgaagatgtacaaaacgcttttcttcttttcgttgctcaatgcctttgctgcagtacttattgttcatgcacaagagggccaatcaggtaaataatatgaccaacaaaatcatcatatatatataatacatatacataatgctaatattaatctttgttctcaggctttatcagcttagattgtggtctgccattgaactccaactatacagagccaacaacagagcttaaatatatctcagacgtacctttcatcacaacaggttcaagtcacagcatagcacccgaatacaaaaccggtgttcaagaacaagtgaaaaatcttagaagctttccagaaggaattagaaactgctacagagtaaatgtcacaaaaggaactagatacttaatcagagcaacattttttcatgggaattacgacaaccaaaatacagcaccagaattcgatctccatctaggagttaacttatggaccaaagtgacatttatcaacgtgtctataagttctatccgtgagatcattcatcttgcatcacgagacttcctccacgtttgtcttgtaaatattggatcaggaactccattcatttcagctttggagtttaggcctttcagtagtaacatttacaattacactgctacgtctggatattctgagtctttggcactactttttcgcttagatattggctcaaccactgatctagcatacaggtataaaatatataattagtataatataataacgatctatctatctacacacatgtcaattttgtttacttgtattttttttaggtacccttatgatttctacgaccgaagttggttatcctataatggaaaggggtggcgtgtaattagtacaacgaaatatcctcaaagccagagatactaccggccaccagctattgtgatgagcacggctgcaacgcccatcaacgaaagcgacccattggaattttctgtgttttcccctaaccagaatgctgatttatatttttatatgtacttcactgaaactcaattactccaacctaatcaatcaagattattcaatgttattgttaatggagagctctggtttgaagatattgctcctctctaccgaaacacgaccaccatatttagcacttcaggcaattctggttttagtcaatacaatttttcactcgttaagcttcaaaattcaactctgcctcctattttgaatgcctttgaagtcttctactctgtcgatgtttcacacttagagacagacataaatgatggtatacacatatatatcttttatatcttttacatctttgcaatttcttttttaagtaatacataataattccatgattttatttgattatatattatgaacattagtgaattcaatcaccaatataaagtcaacttacggagtaaagagaaattgggacggagacccttgtgcccctgtggaatacttgtggattggcctaaattgtagctacaatgattttgatcctccaatgattatatccttgtaagttattttatagcactccctaacttaactttttatttttaattttattattattgttctttataacatataattctaaattgattgaaattaatgatattcaggaacttgtcatcgagtgtattgactggcaatgtaactacacatatcaaaactctctaggattcaatctctgtaagtaccttaaatctatcatgattttgctctactttacttgctttttatctacaagttgtacaatcacaaactacttaattcctctgttttgtttcagggatttgtctaacaataatttaactggaccggttcctgaatttttgacacgattgccaaacttaagggttctgtaagtctttattaatagacaccgtacaaatttaattgtctgcattactaaaattttattattatatctgcattattcatcaaggtattctttttgctttgtactccagaaacttgagaagaaacaatctcacaggttcaattccaattaagcttattgaaaagtcaaatcgtggtttgctatcattaaggtatgtctgtcaaagcttgtataaaggctttgaccatttatatatacatattctgcattaattttctttttataaatttgtttaatatgcttcctaacataaattattccttggatcaatattataataatctatagtgtgggagaaaatccacatctatgtgtctcatctaagtgtgagaatacggagaagaaaaagaggagtattgttccaattttagcatcagtacttgg

SEQ ID NO: 221372 - DNA, 3610 bp, Cannabis indica
cagtcttgaacttgtggttgacgctcatagtaatatggtggtagcatgcaccgtggtgtatattaaggaacacgagctctaaagcatgaacaatgctttgatgcctatctgatatgaaggctaagttcttaacatcacccgcttattttctcataaaataggtctaagagttttggtttttactatcaactaccgcgaaagctatcgaaaaaaatgtggctgcctgcatctagtgccactgcacacaatatttgcccaccacacctagtctttaagaaagacccctaaacgcatacaacaagccgaccaaacctaaacccacgcctacaaggacccagcgagaagaaacaatacttgaagcgaccacgctctaccacaaaatccgttatggtacttggatttctcaactttagcatgtgcaagtaaccaggtaattttgagtatgaatcttcaagtgtatgtcgaactaggtgtagtgccttctctctacatctccaagccttttcataactcatttggatcccaaaatccttgtgcatatatttccttatatcagtggccaaatgatctgagccgtcagttgcgaatttatcattaattaggtgggcaactatcaaaggtgatacttcacagttatctttccttgaaattaagggaacatttatgtacattttgaaatttagtcacctcaaacatgttagaaagtacgttcttcttcactcttaatctccacctacaatttgtatccttacatgtaacgtaccaaacaacagtaccagacttccttacgaagtagtcgaaccctttcttcattgcatacaagccaacaaccatctttaaatgatctttgtctctaaaacctctcctagatgtaactctccacctggtgtgccacccataggtatgatactcgatgtcttcttttataaatattttctccttgaatttaccgtaacttgtcaaagaagaaaatggattgctaaatctagtatcattggtccctctaacatcattaggacctctaccgtcagtagttcctccaacttcactagttcttctaccatcactaggacttctagcatcaatggttcccctagcgccatctagaagactactctagtaccaggtatttggcgattttttctatggggcattcttttctgtgtcggttgcctagggagtatttggtacgatagtggagtcaagttcaaagctacaacaatagggacctctgtattttggttgtctcttacatcatcattgccttcagcatactatttagggtctgaaccatcataaaatcatcatgaaagggcatttgtgctataatgtcagttgtcggcatcatagtctataatttaggtaacacatcgaccactaacacctctggatttgtttatgggataaaactcccaacctttctacgagtatccttaacagtacttggtgtgggactaggatcgatacaaacattcttcttcttctaaagtcacaaacaatggaacaaattcatctggttttttttttggcaagcatagacaaaaataaccttacacgcttatcatttccaataatttcagggcgatacattaagcttttgatgtacttgtaattcactttcaattttaagtcatactgcactttgtcaacattgagttcttcttacaaaagatcaactaaatgtgagtagcttacgttcgtatcaatctcaaatgtcaaatttttggctcagttaaaaaccaatctctaccctgaagctcccaaacaccattatacataacaaacgtaaaaatagttgaaccagtcacaaaaataaaaaaaaaaacaccattacaaatttaaaacaaaaatctaacagaaaagtgataaaaaggtccttaaaaagccataaatctataaagcatcggacccagtcggacaccatcgagcctataatcgaacccatcaatcccagatttaggtccaagcaaaccattagacccatcaggcctatatttagacccatcagtcctagatttaggtcctagactaacattgatcatatatcgggcctatcgggcccatcaaccctaccgttaggtctaagttgaccatcgaactagcattaggcataattgggccagtcgggtcatcatccctgaccttagatctaagtaacccatcagactagcatcaggctcctatcgggccccatcagactagacaaaaaaaatgcagaaataactagaacaaaccagacagcaaccatttcaacacaaaacaacaaaaaaataacaacaacccataaatcaatcatgaaaataacattctaaactaaacataagaaccaaaaaaaaaaaaattacttacccattgattgttgctaaaagttgttgggtgccttaaaaatggagtctcacaccaaaatccctaaattctagttcttagtagcttggagaggttaatttttttttgatgaataagagtcattctattgctcaaccaaaacttttacaatttacatcctcttttttcaatccactttcctcatgtctcttagtgttctacactaactaattacatttacaattcaattcagcaactcagtattacaatgctacactcggtacatcaatctgttacaattagtttcctaatatccattgtttatcctcttcattgatcttggttgacaatcccagaatcctcaatgtgcaaacctgttgtattctctgtataataacctttgtatgccataatttttgatgccaaaacacatcatttctggctttccagatgtgatataccagcacagccataattgttctcaaaatgttcctcctagcagtcggtattgccttgcttttgctgatatactttgctatctgctgcatattagttgctgtcaatctccattgcagccaggaaattatcccctttaagcatctttggctatactcacactcaaagaataagtgattacttgattcttcttcttgtccacaaagtaagcatgtcaaatcaatgtttgtgttgtatttacctatcctctctttggtgtttaatcttccccagaacacaagccatagataaacttgtgcttgggaatgattaacctgttccaaacaatcttggaccaagagagtcgttccctgttgtcaaaaagaagttgataggtatgttcaattttatatctctgctgtacaaaaccagcagcatatgtcctttgcttcaacttattcttcacacctacaattttcctccaataccagcaacaatctaaaggtggttcataatcccaccaactaccatctttcaaatacacattatgaatccatttaacaaataaacaatctttcttacttgcaatgtcccaaacataccttcccatggctgctatattctaatttttgatgtttctaaacccgagacctccttcagtttttgtttgacaaatattatccaaagcagccaatcctggacttgagctctcttgtgtgtctttccataaaaaagatctgcaaacagcttcaatatctttcagcaacttctttggtaagatcaaaatttgagcccaataagtatggatagccaaaagtacagagtttatcaacgttgctccccccatgta

SEQ ID NO: 221373 - DNA, 1012 bp, Cannabis indica
gataactaatcaaattgtaaagagttttatttagggcataaaacccaacagtttgctccaaagcaaaatcggattgggtacttccacttcaaccaggtcagctactaatggttgggtgacaccaacaattaccctctatcaaaagttgggggatatgcccaaaattactttattgcataagatgtctaggaggtttgacactaccgctttcaacaagttcctacctacaagcgctccatccctaatctacaaatgagggatagagtgaatcacatcctatccctctctatagagaggaggaatatacttcggttggctagtgtagccaactttcaaagatatgatttgtaccctctgcatccaaagttacgggggccaagggcccattaggtggtgttgatggagccccaactactgaggaggtcagcccaggcagtggccatgctcccaacatggatgatgatgtaaccttatccctaatagccaggggtctatagaagagagtgagggccctccgccaacacttggctcgtggaggcaccgttggggatgctactctatggatctgacttggaggccagagttatgttgggcctacttgccctttaccaacaactaaaggcaagggcaaggcgggtgctgctgatttagatgattcctcttctaaggatgatggaatctaatagttgattgcaccatcttttatattattatcttgcattgaatattttgtaacttgtattcagactttgttacttttttcttgtagatatgtcttccaaattcagagatttagctgatggaccttcagatgagtcttcgggtcacccgagggccaaggtggcccagaccctccattttggtgatgttgcggggtcatttcttcctcctcctcctcttgggcctgcactagctgggcatcccaagatggtcgaccctccgttgaagagggatcagcctttgagcaagggtgcctagaaggctagtaaaggagaaggttcaaccatgggat

SEQ ID NO: 221374 - DNA, 2642 bp, Cannabis indica
ttaaaaaatttaaaaaaaaaacttgcttttaaagcaaaaaccataacaaaataagcagtttcgaataagaaatccagttcacagtacatattattacaactaatagtagaatacgcctcaaatacggactttgcatgttgctctattatggttcgaactgccatagctgttgcagtttcgaggtatcacgacacttttatcactagatgggaaatgtttctcccgtcttcttccagcattgctcttccttggacaacatattggtttcttctccataggtaccccaaccttcatgttcttgatgtattttgggagaacccaatcatcctcatcaccagcaaaattgatggtaacatcgtgagtcttcctctatgtatctttcgaataataaggagagcacaatgtttacacactcgtatttgttgtaaatttcgcagtacatgcatgagtacaaggaagttttagcaatgtaaacacgccacatgtgtttttttttttcaactaggttcacattaccgtctctttcaccattaggccctctactaattttgtacaaattagctctattttgttggatgcgcttgaatctcgcatccttataaatttttctaagttatattcaaaaagagtcgctaaagggttgagcatttgtctaccttttctaggcggtcagcgaactaagattgcagtgtgagctgataaattcagccaaagtagttattggatattttctaaactcttttgtcacaccgttgaagctttcggcagtgttgtttgtcattatgttgtaccgatcacccaaccaataaggtcgagcccacttcttaaatcctatactctctacatatgcaacattggaaaatttcatctgtctaagcttcttaaattatctatcacaatcagtcttcgaccatgagtaagctacattctatacctcattgtgaaaaacaacagtcttgaacttagaattcatgttcataaaatgtggtgatagcatgcatagtgggctacttcagggaacacaagctatacaacacagtcaatgctttgatgcatgcctatcaaacacaaacactaagttctcaaccacccctattgcttccctcaacttttgtaagaaatagatccaagagtcattgttctcactgtcaatgataccaaaagcaataagaaacaattggttatttacattgtatgctacgacaactaacattatatctccatacttcggcttttagaatgtgccatcgataataacaaccaatgacaaaaagtaaatcccctcctacatgcaccaagtgataaaaaacaatatttgaattgttcatcctctacatacagatcaaaaatggtacctggattcttatgtagcagcttgtacaagtatccgagtaacttcatataggataattttggcattcccctaacataggtaagtgccttttccctgcacctcctgccttcacataactaatctagataccatatgagtcaaatatgtctttctgtatgtcttaaacattgtacttagttccatcttgggtgtactttcccttaataaggtgggcaaccactcacggttttggttgacagcgatttgaatatctcgcatttaggttacatgtgtgttcattgtgaaatacagtaatctttaaagttttcagaacacatcttcttcttccctctcaaatctccatttgcaatatggatacttgcatgtaacgtacaacacatcgatgtctgacttcttcaccatccattcaaaattgttattaattataaacctagcaactagttgtcttgattcttcatattatttttgtacaaattgccaagttgtatctcccctgattccttactttgtgaaaaaagtagtaagttaatgactttctgttatatcttcctttgcccacataggagcgttgaacttggtacaaacttcaaataatgagaacgttgagaacggtgcatgacaaggaggaacatgttcttttgatctgccttgttgactactactagttccaggtgtattatgatttttattacaggattgtcattctcgttgtgtaccacggttgctcggtgaatactctaaccttaaggaagatacctctatgacttcatcgactcccaaatcatattcgtaatccatattcaaatctacaatataatcattattgtagaagggagcatcgaactcctaaaactaaccaaatcatgtagcttcttgctctacattggtaagaaccttctcattagcaccaatctgtgttaaagcaaaaaccatgacaaaataaggagttttgaataagaaatctagttcaaaatacatattattacaactaatagcagagtacgttttaaatacaggctttgcatgttgctctattatggtccgaactaccacagttattacagatgtaaaatatttcttcggcgtgtctttttccagcattgctcttccatagacaatctattggtttcttctgcacgggtaccctaaccttcatgttcatgtgttctgggagaacctaatcatcttcgtcaccagcaaaattgatagtattatcgtaaggctttatccatgtatctatgacatttaaaatgaacacattgtgctctcgaaaaatatctaataaaaa

SEQ ID NO: 221375 - DNA, 2250 bp, Cannabis indica
ttaacgtagaaggaaaaacgtgaagagagaaggtcgtctagggatgatgtgttctaggcactataagagacttcagatctagatatgatcaaaggtcggtcaaaggtccttattcgagccgtctcaaacctttagtctatcgttgcctttatataggcctatgatttgttgtgatccccacaattcggggtatctcacttctaatcccgtatacttttctaaaataatgaataaaaaatacaaacaaataaagatctaaatatcccatagtcataggcaaatatttcacaattattgtgtttctcgttgaagatggttatttccattttcttttgaacttgcttatgtggcattgtgctttgggaatggtaaattggagaaagttgaccatatgggatggcacacctaaatagagagtcacaagtgttttgaaacaactctcctaacatccccttatggtccacacttaataaaactaattaattcccaagtaaagtgtgctaacttgtcttttagcctattttgagctagataactttagaaatatgctatgaccatgagaaatgcctagaacattcttgaataaatctttcaaattcaagttgaaccaagtcttttagataaaaattgagaaacttatatctattttattgaagggtagtaagtacatttcaccaacaaatctgacatatgccatgtcatcatgattcgtgccacctcaatttggcccaagttggtcatacatgttctcggacacctcagggtatgttttaacttattttttttatggtgagctatattttgggggttttggggttccaaaatctcatctggacgttgaaaaccctaacgggaaacctgtgccatctttttagtgctaaaagatgccattggtacgctagggcttatgggaatacctttatggtgtttcttgcatagttttatcatatcgatgctagcaaaacactttcccacattagttcttggctaattagtgggagagacctgtgccatcttttaggtcacaaagatggcacaagtcggccataggtgttctacacctctttgtgacttttctcacttgcttttgttcccttgatgttggaaatatacttcgggcaaaaaaactcctccccgtttgatgtgactgacctgtgtcactttttcgtgcacaaagatggcaaaggtcagcaaggtggttttctacaccacttgctggccttcctcacttagttttgatgtgttgatgatgaaaaaaatactcttggaaaaaaaatctctttgccatttggggttgctgacccgtgccactcatttgtgcacaaagatggcacaggtcggttaggttagtatttgagtgaaaaatagtttctgttactggtgttgtaatccttcaccacttttggataagtcttctttggtgttttgagagtagaaacccatgtcatctttttatgccaaaagatggcacaggtcggccatgctggaatggcctccttgtgcactcttgactttatgttcaaattttagccatttcatgcttaaataactcaagtcattgttaatttccttgtcgaactgaggtatatatagggtgaaaagggtgaaagcccttatgcaggccaataaacaataggttgggcacacttgggtgtgggtccccgcacgaaatggttgctcaatattgtcatgagttttttagaggtgttatgggcctccaagtagaatgttttaacttatttggtctttgcgagtcttggtcaaagtcgcagggttgactttttaactcttcaaaaattgggtgtaacaaaaataaataaataatgatgtttgtatattttcaataaaatattaaatgataatcaataataattatatttttttacatttttaaattggagcacaattacaagtaatgggctcacgtaaatttatttttgtgccaaatttagcacgaattttatatcttacattggagatggtctctaataacttttgtaaaatattagtctaaaataatatttagtgaaaagagagtgtggagtgaaaaaaaaaagtagttgtgaatagaaaatagtagtacctagtttgtggtaacaaaccatgtatatatatcttataataaatgtggctatctcatcaaaattactagttttaataatttttttttttttgttaaaatttaatgtattaaactaaacacggttaaatcaattaattaattaataaatttttttagttaaaaaaaaa

SEQ ID NO: 221376 - DNA, 2815 bp, Cannabis indica
ataatcaaacaacgtattatttttgttgaaaaacgtatttttataaataaaaaaattttaaaccgtaaaaataaaattaaagttttttcatattaacatattttcataacttttttaaaatttaaaagtttattatataaaaaaaatttaaaatctctttttttttttggctgaaacaaatcattacattaagtctacaaataattaattacgtacatgcatatctcgtaataatattattagtgtgcaatagattgtgacccttaacaaaaatgttagtgcaacgtattctctagaagttagtttatttatagttctttgttaatttttattcatatgtattataatttattatttatatatatatatatatatatatatataactagctagtcttgtccagttagttgataaatttcttgctgtttaatttttttattactttaaaatttaaattgtgggcaagaatatttagttcgacatgcatttcttaataagatcgactaactactctatcttcattatgcatatattaaaagggtttttctttttcaaccataacataagaaagtgttttagtataacgtactatatgttatttggcgtaaatttttttatataatatataattatcactttcattgatttcaaaaataaaattatattaataattaataatagtttttctatttaaaacaaaataaatataactaatcacaaatgaaactaaaagcagtatatgcaagttatatatgtattaacattctgtctcactattgttgaaaaacacaagaacagaacaataggtttagagaagaagaagaaagaagagtaaaaaagagaaagaagagagaaaaaatgagaagattgagattgaaagagtagtcttaacattgatcaaagaacactaaacatgttatatacaagctcaatagaattgaccaactaaccaccaatctaactcctaactgaatcttaacagctaacataactgtcatagactaattgtcttgacactccccttcaaacttagaattgatgttgttaataatttcaagattggttcttaactggttgaaccttgagcttgaaatagcctttgtaaggccattatgtagttgcgagaacatgttgcatctgaaccatctctagctgagacagtttctttcgaacaaaatacaaatcaagttcgaatatgtgcttgggtatgggcatgtaaaataagattggcagtgagtagaattgtgctcatattgtcacactaaacggtaggaggtcgaggtggttgtatatggagttcagaaaacaaggaatgcagtcaagttactttagaaaccacttgagctaggcttctatattctgcttcagtacttgatcgagaaacactatgttgtttcttgtattgccaagcgattagattgggaccaaagaagattgtgaaccctgaagtagatcttctatcatcaggatcactactagctcaattagcatcacaaaagttagtaatatcatactcttttgagcatttaaagttcagaccatgtataataatatcactgagatatctaaagattctctttatattgcattccaatgagtatgcaaaggattagccatcaattgacagattttgtttacactacaagtagatttttggtctgttttgttaagtattagagcgcaccaactatagacccatacagttgaggattgttcactggatccccttcgaatgcagactactttagaccacttatcatgggagttggtgcaggtttggcatcttgcatttgagctttgcacaacaagtctctaacatacttcccttgagacagatgcaatcttttctttagtgtgttgaacctcaattctaaggaaatagtgaagattcccagatttttagagaaaatttgaatccaaagctttggtcaaagttgaaacctgttcagtgtcacttctagtgatgattatatcgtcaacataaacaagtatgagaaccacaaatttagaggtatattgaatgaataaactatgaccagacttaaaagatacaaaactagtcttctaccagacaatgttgaaatttctcaaactaggcccttggttcccgtttgagcccataaaagctttgtttagtttgcgaactgagtgaggaacatttggtaactcaaacccattaggtttactcatgtaaacttcttcttttgagtccccatttagaatacttattcacatcaagttgttgaatacactacccttgtacaagagccaaagaaagaaccatcctaattgtaacaggtttaattaaataggactaaaagtttactagcgaagtaaaaacctaggttgttaatgaaacccttttacgtctactaaccttgctttgtaatttgtttatagtgccatatgcattcaatttaatattgtacacccactttgtcaacctataggagtcgtggcagcgaaacataagtccaagttacatttttccttaagagctctcatttcatctgacatggaattgctccattcttgttgctgtaaggccatcttgacactaattggcttttgtaaaatccaaataggcttttggtttgtaaatactagattttgctttaattttcattttatgcttgtttgttatgacaccaggtgactgagaaggaacagggagggacatatctgtggactgtggtggttcaggattagtggatggaatagtttatgtgattgaaacaagctaaggatgattaacagagagaggaacatagacaagagtttgaggttcagcaaaatgactcattttgctaaagag

SEQ ID NO: 221377 - DNA, 1797 bp, Cannabis indica
ttgattgaaattaactaaatttatgtcattgatggtaggacacttacacaatatacacaaaactcacacaaagtattgttagcttttattacaattatcatcaatatcggatatttatctatataataaattgtggggtgtcaaatataaacacttttgattttgaaagggataaaataaaataggtgattgacaacaacaagttgttaagacagtaagaccaaccaactatttgaactgtccaagctcccaactgaaaatagaattgattattctatttaccactcatgtcaagcaccaactataacctaaattattcctaaattgatcaactaagtgttagacactattgtacaaagctagttatgaaccaagcttagagaaagttggtgagatgagaggatgggagaatgatacagttgtaaactcgagagagagtttgaaaccagattgttctatatgtgtttgactgtgtaatcttgttcaagatcatagtggattgattctcaggtattgtcggcctttggagtaggactatctcacattgagattagatttgaattatcttgactattgtttctataatttgagtatgtttatctatgattcgatcttaacaaattggtatcagagttaggatacaatcacagagcctatctttatttcataatcgatctgttgtaatcttcaagaagactcgaagacaatttcagaagttcatcatttcaagactatttgctggccaggaacaaagtctcaacattatggcaacttcgaagtttgaggtggagaagtttgatgggaagaatgacttctgtttatggaaagcaaagatgatggtacacatggagaatctgggactcgaagaagttttgaaagataagcaagatctcaaaaaaaaaaaaatggaaaacaaagaacatatactcaagaaagccaaaaatacaatcattcttaacttgagtgatcaggtattgaagaaagttatcaatgaagggactgcacatgagatgtgggtcaaactcgagcaattgtacatgtcaaagaccctgcctaataggattaatctgaagcaaaggttttatggtttcaagatagatgaatcaaagtctattgatgaaaacatagatgaattcaccaagctggtattagatttcgaatccatcaaggtggaggttgaggaagaagatcatgcaatcttcttgttgaactccctccctagagcctacgagagcttgagagatacactcaagatgggaaagagacattatctctagaagagttgattggagatgcataatccaagatattggacctgaaagaaaataaaaaatctagaaagaatcttgcacaaggactcaatgtaagagtaagatcagagaagagagaatccaacaaaaaaggtgaaaagggaagaggaaaatctagatccaaatctagaggaatgatagcatgttgtacctgcaatcaagaatgacacttcaaaaaagattgtccttagaggaaaaataatggactgaaaacaaatacaaattccaataataattctgttaatatttctgattattttgataatgcagaagccttcaatgtttattttgactatgctaatgctcttaatgtttctgacagattctcaagatgaataggtcatggattctggttgcacatttcacatgtcaccaagaacggagtgttagttttatggtactaaattaggtatgcagtggaagagtttcatattatctaattatcatcgtattatagcccaaaggatcttcagatgtgtgtacatta

SEQ ID NO: 221378 - DNA, 3367 bp, Cannabis indica
aagcttggtcttcctatacgagactaagctttaccataactgggcagaaggtactcgaagaaaaataaagtacggtaatagatttcatgtggattgtatggggagtagcggtagactcttattattgtggaatgatgattgaggtgttactgttaaaagctattctaagggacatatccttgcttttggaaaatttctaaggattgatcacaagattttataaaccctaaggctcaccttcgaaaagatttgttgctacttcttcgacacatcaaacaattttttaacttacaatggatatatggggaaatttcaatgagttctatctatgcatgagaagaatggctatacacatcaaagtattatggctatgaatgaatttcaaatgattcttgatgactgtatgtttgatgacttgggctatgaaggcccgactttcacttgggtgaataagagacaaggtgttgctaatttccaagaatggctagatcaatttatgtgcaatgaagcttggtccatgttttttccttcagtctgaatttgtcatggaaattttctttattctaaccatcgtcctataatttctaaacttaagaatatggtaacatggagtcatgagcatgctaaatgaaagttagattcaagcctcattggcttaaagatgatgattgtcgatcaattattttttgagggttggtagagttgtaatttagatgtgacagaatcgttaggactacttaattctcttaagagctgtgtaaaccatcttaagagctatgtcaaccatcaaacatggtgttgatacccaaagttcaaaaaccaaaaattgttaaagagtatcaacctattgctttgtgtaatgtaatgtataagatttttcctaaagctatgtcattaaggatgaagaatactcttggcccctcatctcttcttttcaaagtgcatttgtatcaaggcactccatacatgacaatattatgggctaatagaggtgatattaaaactactaagcgtatcctgctaacttattaggttgcatctagtcaaaagattaatttcaaaaagtcttctatcacttttagtctgaacgtgcaacaagtgtatcgggatgaggttctgcgactatgaggtctgacatctgtagctactcatgacaagtatcttggattgcctacagtcgaacatttgaggggatttgtgagaaggtcaagaagcgtgtttggggatggaagcgtagtttcttttctgctggtagaagagatgtaattaaatctatccttcaagatattctaacttataagatgagtttcattaagcttcttatggaaatccattgtgaggaaattttggtggggctcgaatgggggtaaaatgaaaatcccttgggtaaagtgggagacagtgtgtcagcctaaggtaatgggaaatctttggtttcaagattttcaactttttaatcgagctctagtggctacacaagtgtggagattgctacttgacctcgattcgttacctataagaattttaaaacataagtattttccaagatactttattttagaagctactaaaaaggatggatcgtctcatcttagttctatttggtgttggaagttcttaagagtagtctttagcggtccattggagatggaatgtaagtactgtcgttcaacgacctgtggatcctgagaccaaggtctttcaagccaatcatgagaagggtgaatgatgagtgccggtgagtgaatttattcttccatctggtaggtgggatgttgggaagctccaatagttatttttacgcatggatgttaagataattctgtctattccatagcgaggcgagtagtgggggatagttggtgttggcactatgatcaggatggaatttataatatttagagtagatattcattggcatggtcacttcaatttgatgagggagtaacaaactcatctaaaatggccagatggtggaatggtttatggaaccttgagatgccaccaaacatgaaagtttttgtccggcgtatgttccatttggtgatactagtagctacacaacttaggtctcagaaagttcaagtacctctttgttgtttacgatgtgaggaggaatttgaaactttagaacatgctttattcttttgttctggctaattttgatgtggcaccattttgggtctggccattgctttgtcaatgtgtgaatggtcgaattccagaaaattttcttttcctcttcaaaaagctatctcgtgagagttttgagttaacgatggtaactctttggttgttgtggtatgataaaaactcagtgttgtttggtgatatatagtcgagaatagaagcagttccaaaactagcacaaaaccacctatctaaattaaaagatcacgtttggcggggactccttttggggtcttcgtctccgaacccggtcacccaacgactttcacagtggagactgccaccaccttggtcctttgaactggcgaccgatgctttagtggttgttaggctgggtggggttatttaagatgaagcgaaggtggtttggctgtcatgggcaactagtgtgttgggggagttttctgttaatgtggtagagctgctttctattatactgttgttgacttttgcgcatcaatttggcttcaatatctttattattaatagtgattctactatagttgttggttgggttaataatccacattcaaatgttgttattcattctattctcttagatattaatttttatggctgttgtgggtagtggaacttgtaatgccacttcgcgatctgcgaataacgatgcctacacactgacaacatctgttgctagtttaggagagcgtgtatggacatatgcttgagtttgattcactaaaactttacaatcagactcaatcagttctaaagaaaattctacaaatacacacgagttgagagcccaaactaaaccttttgcttcaactagaagagggacaatttaccatcaaaagaggtagacaagccagctacaattttccctccatcattcttcacaaattttccaatcccaatcttcgaattgtgatcatcaatagtacgtagcatctacattcaatttaaagaagcttggtttaggtaaatttctaaataactcaccgttaccgtgaaccacttcaattaaatcttgattgatcgtttcacttagagtttcaatttggtgatcctcagctttgacatattcatgtagcaaagaagagacttaaaattcaatggcagaattgaagtaatttccttttttgaacaaaactttgttacgcttgttctatattttccaaattatatccaaaaacaaacacaactcatcctttga

SEQ ID NO: 221379 - DNA, 2689 bp, Cannabis indica
tttctgcagttttttagtttcgtggtgtgggtgcggtttgagaaattaaaaaaattgcatgtccgggttggtttgaaaaaatggtcaaaactgcactacccgcactacgaacacccctaataaaaataatatacaataacatgatgtgcttgaagggtacctcttatacaattatgatgaatggaagattacaaagtaactttaaggggaagaaggggcttcagcaaggggatccgatgtcgcctttattgtttgtgctcattatggagtatcttacaagaaggttgatgttggagactactgaaaaatcgtttaaatttcatcttatgtgcaagaatctcaagttggttagtctttgctttgtggatgatttaatcctttttttgcaaagggtctcctactacagttcatcatcttcaagttactttgcagagcttctcggaggttacaggtttatatcctaatgaggctaaatcccaggtttattttggtggtgttaaccctaatgttaaagttgaaattttggatatgttacaatttgttgagggatctttccctctcacatatcttggggtcccgcttaggctaaccaagtggaggcgagaagattgtgatgcaattcttaagaagatcaaattgaggctaatcacttgggcaactagacatctctcatatgctggccgaattcaacttatccattacgttctcttggggttctggaactattggatgaacattttcatacttcctcagtgtataattaaggaagttgagcgactttgtaggggcttttttgggggattaagggagagaaaagtaaaattcacttggctttttggaacaaggtttgcctccctaaatcttttggcggccttgggttcaaaaatggttctaattggaatagatctattcttggaaagttcatttgggctatcatggataagcatgacattctttgggtttaatgaataaatgacatctatttgaagggggctgacttttgggattatgacctgaaggtggatgcaagttggtattggaggaaaatttgccaattaaagaagaaattcagcaagaacaatattgttgctgctgtttgtaaagataagtttcttgtaactagactctataattggttaattcaacatgaaatagatgtgttctacaaagctgtatggtgtaatttatcccttcctaagcatagatttactttttggcaagtggttcatggccatttccctacaagggataaattcattagattccacatagagctagacacaactatctgccctgtttgttgtgaagaggaggagagtcatcaacatctcttttttggctgtgtcgtttccaaggaaattgtgaaagatgtgttcgattgggttggttttggggcttggccgattgagtataacatatggatttgttgggtgacagggaaggtttcaggtatcatcaacttgattattcttcctgctataatttatatgctgtggaagaacatgaacaatagtgtccataatagtagttgttttactatcttaaaaattgtaaatgatgtaaaagatatagttaattacaggtagcttaaaagataggaagcttattcaagttgaaaaaggcatatttttacgcctaattcagtagctggtttggtgggtgtttgggccggttgaatgtggccttggtatttccttgttttgtctttgattaatgaatatcctctttggtcaaaaaaataaaataaaataaagatcttgtaaagtaaaaatcactctctcgctatttatgatctcatatagattagatctctaactttgaagcaaccctgtctctcatgcccacaattgtcttagtcgagatcaccaagctttacacgatcgtccaattaattaactgtttgtttatgtgcattactatcagcttgcaataggagagtgtttattggcaaacatgagtataatatatattaggtagaaactgactgctattatcttcttataaatatatatagagagtgtgtgtgtgatatgacctggctattataataggataagagtgatattgtatgtctcctttatctaattagtcttttgcatgtaaactattgtcctttgtattttgaataaataatatttaacaattttatttgattaactctaagttatgctttttattcaaagctgtgtctttactccaaagtaattcatgttgtttcttattggaaaaagatttgaagtgattgttattttgggagaaaaaaaatacaagttttgtaccatgaaaggtatgctcttagcatggaatatatggaacaagagcatgactcaactattacttcaacaattatggtatggatatggattccctttcattgaatttcttccccttgacatatcgatgtgaattttcttttttctatgattattgttttgacatttgactcaacataggtaatacttggtaaaataattatgttttttaaaactagagttcaaagcgctccttagtctgatcacttgaacctgttgagcagattttgaattatcaacatagtgacaataactcaagggagaaaatataagattacaaaggaaattgaagtcagtgctcaaaatatattattatcattattattattataaggagaattatatattatttttaactttttttaaattttttttac

SEQ ID NO: 221380 - DNA, 2926 bp, Cannabis indica
atacaacaagtcaccaacaagttaccaatttaaactgtgatactcggtaccttaattaataaggtgggtcctaagatttcaaatttgtattttagtataatacacaagtatataatagtcttgctgtatggtatgtgtttttgtgttttctctctaaaagttattctttgtctttttgtattttttttggtatttgttggagatccttttcggcctgagtgatggcttctagcagcagacctttggaggaagtggaagatagatatgcttgcattgatctcgagggggaggatgagggagtggaaattgatactcttgcttcagaggaggtgctattcgatgatcagtttcgtctagtggggtgtttcttgaacgccagatcagtagattttaaagctatgcgacacacattggcagggttgtggaagcctagaaaaggtttgtttgtcaaagagttgggtcctaatctttatctatttcaattctatcatgaaatagatattatcaatgggagtccgtggccttcaaccgactcctttttctgtttggaagagtgccgcaaggtggtgatccaaagtctgtttctttgaacaagttggatatgtgggtgcagatacatagattatcatcggggattcatgactgagcgagtggtgaaggagtgactaagtaatcggtgaatttgttgagtccgatccgagacaatgatggctatggcgtgcttcttgcgtgttcgagtgagagtcaatatagatcaaccgataaaaaggcgaatgaagcttaagaaggggtggggggggattggttttgggcgccgttcaagtatgagtttcttcctagcttttgttatatttgtggcattattggtcacactgaaaatttttgtcataaactatttgatacacctgaggaggccattgtcaaactgtatggggattggttgagggctcaaacacgtcgaaaaaattacttgcttcactcaaaatatctgcgtactcgaacggaggtggatgagcagacttttgggccaagtgaagcggctgctgggttcagatccgacaaacaaccagcgacagctactagtgcgacaaacagaggaaaagaaaagctgcctttttagttgatggtgggaatcaaagcaaatcaaagtccactactatttctcctaacattatgggcggtaatcatgcttcccttttttcaaattctattaatggtaattcttttgttgctaataatggtcagaatttaattattgctccaaaagataatttactgttgatccatggtgaaaattcggaccataaaagaaggaggccaaatgatgtggaagttatggatagtggtccttttgatatggaggttgatttggttatgtcacccaataatgctactctctcaaaaaatgggcttttggtgggttctggtgtccaggcccaccgcgaattatgagtgtccttagttggaatttccgtgggcttgggaacccccagaccgttcaattccttaaggatcttgtaatccaaaagaagcctaattttatttttctttgtgaaactttgtgtcgtaaggaggttgtggaaagaattcgggttgctattgggtttgatggtttgtttgcgattgatgctgttgggcgtagtggtggtgtagcttttctttggcgtaatgatggggacatcaatcttctccattttgctcataattacattgatgttgaggttacttcttctgatcaaggtgtgtggcggttaatcggtttttatggggagcctaatcgtaatgctagggttactacttgggatcaactaaaaactttgtctacagcatcttcattaccgtggtgtgttattggggatcttaataacatcttgtctcatgaagacaagcgtggaggtgttccttatcctaactggcttattgagggttttcaccaaacaattcaagagtgtgagttgagtgatatggagcttgtcggtcatcaatttacttgggaaaaaagccgtggttcggatgcttggatcgagtctcgtttagatcgtgcacttgtctctaagcaatggctggtttatttttctttagctcaattgttgaacctggagttgagctcttctgaccatagtcctttgttgcttaatattgttggtcagtctcatatctctcgtcataagaagtttcgatttgagaatttttggctccatgagcctatgtgtttccaagttgtcaatgattgttgggtggagtcttctttgggtggcattcaagagaagattaagctttgtggtaataagctaactgagtggaatagtgattatttggggaaatttcattctcggttgaagcactggaagagtgaagctaaaaagtttaaagctgggcgtgatgatatgtctttgagtcagtttaaagatgttgagaacaatctttttgaagttcttaatcaaaaagaaattttctggcgtcaaagatctaaacagctatggcttcaagagggtgatcagaatacgaagttttttcatgctactgttactttgcgtcgtcgttctaattccattcataaactcaagagagatgatggtacttgggccgattgggacaatggtcttccgaatgtgatagttgattatttcaagacccttttttctagtgggacgtgccactccttgcatgctactaatgggattagtcctacgattactgaggatcataatgttgctctgctttcgtctatttcagatgaagaagtcaaagatgctctttttcaaatgcaccctgataagtctccagaaactgatgggatgactcctgcattttaccaaaagtgttggcatactgtgggtaaggatgtgattaagcaggtgcgatctttctttatgtttggcttcttacctgagggtttgaaccacactaatattgtgcttattcc

SEQ ID NO: 221381 - DNA, 1089 bp, Cannabis indica
ctctctctctctctctctctctctctctctctctctctctctctctctctctctctctctctctctctctctctctctcactcactcaatcactcaggcacaagtcgacgtcgacactaatgacctatgatgatggctaaggaccaatctactactcaaaaaaagtgagtttagcatcgatttaaaacctatcattcataatttcactccacataaaaccaatattgatgtttgattgactaagaagactcacatcgaaacacatatgaattgaatatgtgtagagcaatgaataattgtaagagcggagaatttagagagagaagaagaagaaacataatgaaatgaaatgaaagctcaatttgagatgtgagatgtaaggccttctataaaacttgttacaaaataaagtttacaccagtcgttaataacaaataactataaatgacagctaaggagaataacaataataatagaatgctaaaaccactaaactaactctaacacccccctcaagttacactcgactctcgaatcgttacttgtctctaaatatgtcaaattgaagttgtggtagtggtgttgtgaggatgtctcctatttgatgtgctgccaaaaaatgtctgatgtcaagttgttgagcaagcactctgcccgtaacgaagtgaagatcaacctcaaagtgttttttctattgatgaaacataggattggacgcaagagatataggtccaaggttgtcacaccaaagaatgggacatgagggaagttgtaggcctcattgaagagtgattggatcaagattagttctgtggtggcaaggaagatatcacggtattctgattctatgctcaagtgagcaacaacactttctttctaaaactccacatgatcagattgccccctagataaataaaataacatgtagaacgtctatcattaattgaacttggccaatcagcatctgtataggcaacaagattaagagaagtagctggtttgaagtgtaagccagagtccaccgtgccaacgaaattcaagaagacgtttgaaagctaaccaatgatcattgtggagccttgagaaatt

SEQ ID NO: 221382 - DNA, 2671 bp, Cannabis indica
gataactaatcagattgtaaagagttttatttaggtcataaaacccaacactaagatcctggtaaaataatttctaacaactctgtggtaaagagaaatcatctgagaaacctatgccttttgagtatcctcatgctccagatattaccatagctgatcttgatttcactgattttcctcatgagggtcaacctatcaaccctttccttactcactctgttggttttacctctttgctcaactcacgaatggcctctctttctagttttagtgctcctgggagatcgtctagtgttatgattcccaccccaatgaacccaaacctctctgcaagccaatctgttgtcactgactccactagtgttagtgacacccctgcctctgttaccactgatatggtccatgctgctcattcgttggctgcagcaattccaagtttggatcttggacatgttgatggtgttccctaggctgctactgatgaggctttgcggcttgatcctcaagtgaaagggaaggggctggcttgtgcttcttgtgtgaaaaggccatgttttcaaccttttcaagctcaaattggtggttctctgcgttccatgctcaagcgagctcgtgctggtgaatttgagtctgatggtgtctcttctgctgaagaatttgaacaggcgggtgttgcggagcacacccgcccagaaaaatgagtttcatgagttggaatgctcgaggtttggggggtcctcgagcattcagccgtctctcccagttggtcaagaatcatcggccaaatgttgttttttcgatggaaactaggttgaaggctctttttgttgataagtttaggtagactttaggttttgtgtctggttttgaagtcccaagacagtattttggtggggggcttcttcttttatggggagatgatgttaatattaatgtcttaaactcttcttctaatcatattgactgtattgtaaatattaatgataatatatggcattttacttgcttttatggctctcatgttagttcttttaagcatgttacttggaaattattgtgtgatctgtattctaatgctcctaatctcccctggctggtcatgggggactttaatagttatttgtacagttctgataagataggaagtgataatcttgatacctcttctatgtctctgtttgctgattttttgactaactttagtatgtttcctgttcagtttctaggaaataggtacacttggtcaaataaaaccatttatgaaagattagattgggtagtggtgtctgattcttggagtgatttttatcctaatcatagtcttcagcatctaggtttttatgggtctgaccatcgtgtacttaagttaagtttagctcacactaatacaaattataccactcctaggactaggcgtttccgttttgagaataattggctggaggatccctctttttataatgtggtcaaaaatgcctggagcaactctttggtcccctgttcaactcaagggaataatagctctcttataggttgttttgagaactttcttaggaagcaagtaaattgtatctcctctctaaaaaattggaatagggacaacaatctcctttttaaaatcagaattcaacatcttactcatgaaattgatatgattcaggacaagatgtttttaaatgatgaggatagggctcgattagctcaattacaatctttgcttgatgctctgctttacaaagaggagatttattggaaacagagggctagagttaggtggctaatgcaggagataaaaatacaaagtttttccataagcatgcaacctctaggcgtaaggctaatcatattaaatatcttaaagctgacactggtgaggttgtcaattctcaggaggggattatgggtttaattactagctttttctctgatctttttacatcccaggggagtgatatagaggctgctgcctctatttttgattgtttaggacctggtctccctgaccatgatgtggagagtctttctcaaacctttgtcgctgaggaagttaagagggctgtttttcagctttttggggacaaggctgtagggttagatggtcttaatgcctttttctatcagaaaaactggtttgttttggtaatgattttactgcagctgttttggactgtctcaacaagggtgttgattttttagaaattaattccactttaattgttttaatcccaaaaaaggctcgtgataatatgcttaaggattttaggcctattagtttgggtactactttttataaagtcatctcaaaagttttggccaatcgtctgaaacgagttttagatagtgtcatttccccttttcagagtgcttttgtttctggtcgtgttatttataataatattattcttgctaaagagttagttcataatataactaataggaaagtaggaaaaaggggttgggctgcacttaagcttgatatggctaaggcttttgacagggttgaatgggaatttctaaggcatgttatgtttcatcttaacttccctgtccattttgtttctctcatatttaagtgccttgcttctgctgctatttctttttctgtcaatggtgttgttagtgatcctattaagcctactaggggtttacgtcaaggggatcccttgtcacc

SEQ ID NO: 221383 - DNA, 4164 bp, Cannabis indica
acattacaagattaaataaaaataaatttattttataaagctattttaataggtttataaaataatttgtaaataaattgattgatatctaaacatcatatgagttacattaggaaaaaaaaagtaatcttaaggtatcttaaataataaaataagataatatagtctaaaaaatataataataaaaaaagaaacaaaaatagtttcttttaaaatggttattttattatttatatatgtgtaaaaattttgaaataaatttttttagtgaaagagtaaccaattgatatcttattcacataaaaaacaattagattgttactttttttaaaaactcccaaaaagcaaaaatttttgaaaacaagatttttctaattttttctattttcagtaattattttgaatttcggtatatatgctgatgtgacacaacggtatttgtgcaaataattttcttaaaagtatttttataaatgaaatctattttaagtataatattaaaaacaccccttttttcaatttaattatttattatttatttatttatttatatttttaacgcttattgaatcacaagaagcagaaaattaggcacacaaaagatcacaattatatatatgttttatttgtaccccatgtccctaaactatacatgttttggtaagttggtcatcaaacttcattttttagcaaattagtgcaacattaagttctcactattaaatattgacatttttattatttattttacttactttaatttatgtttttgtgttaaattcaaataattttaattttaattttactattttgattatattaatattaatattttaatactttaatttattatattcatatacattaaaaaaaagaaaaaaaaaagaataaatactagcggacacatataattgctagagagaattttagctcctcacatttttatattttagctcctcacatctatgccttccctttggttaaattcctttgccaccaatcttgccttgtacctaatttattcacctggcagtccttctttttctttgaaaatccatttgcaaccaattagcttctgtcctgttggtctagtaacagtcttccatgtcttatttttcttgagtgatgtcatttcttcatcaatggcagcaagtcatttatccctattcttacaattaacagcttcataataggcactaggaacaaagcattcaatttcttctgcagaagaaagtgcaaatgcagtgcaatctgcaaaacgaaatatgtcaagaggtttgacaaccctcctttccctatctctaacaaactgatacccctgagatccaccttgatttgtgtcattgtcttcagcttgttcctgattagtttcatcttgtctggcatcattttgagtttcttcaaactgaatttgcatactatctgtggcatttgtctgtgtcttggttcctgagtttgactctttcattggcatttcattctcattgaagatcacatctccgcttatgatgcattttctgaatccatcttcaagacaccacagcttatatcctttgaatccatcagggtatccgataaaacagcacttcagagcccttggctctaacttgtcttgtcttatatgggcataggcattacacccaaagacccttaaatggtcaatacttggagcatgtcctgtccatttttcttgaggagtttcgaagtttagtgcagcagaatggcacctgttgatgagataacaggcagtcttcaaagcttctccccagaattgtttacccaaaccagcagctgtcagcatacaccttactctttcaatcaatattctgttcattctctctgctatgccatttttttgaggtgtcttgacaacttttttgtgccttctaattcttgtctcttggcaatatctgttaaactcatcagaacaaaactccaaaccattgttagttcttaacattttaattttcttcttagtttgattttctatcaaagttttttaattaacaaaagtgttaaaagaatcatttttgttactgtgtaagaaaacccaaaccttccttgtatagtctttaactatactcaagaaatagcttgctccaccaattgtttttgttctggatgcaccccagagatcaaagtgtaggtaatcgagttttccttttgttgtatgcctatcttttgtgaatttcaacctgcaacttttaccataaacacagttttcacaaaattctagttttttaccaagtttacctttgagtatgccttgtttttcaagctcatgtaaccctctctcactgacatgtccaaatctcatgtgccacaactttgtttgatccatttcctcatttttggctgctgtagcagcgttaccaataattgttttgccagcaagatagtaaatcccatttctaagatttcctatcatcaccactgtagagtctttcaaaactccaagtctactatctattttgatgttgtagcctttaagagttagtgcaccaatagatagcaaatttcttttgaggtcaaggacatacctcacatctttgatggttctttctgatccattgttcattttgatcaacactgaaccaattcctgcaatcttacaggctttgttgtcacctaacaagacggaaccactgtcctgttcctgaaactgcaaaagaaatgtttgttaggggtcatatgaaaagaacaccttgagtctagaatccactcatcaccagtggcttgactagcttgatgccacaagtgcatcaacagactcatatccatcaagaacacatcctgcatctccagaatctttcttcttctctttgttgagttttgctttgagagccctgcactcatccttgaaatgaccctccttctaatagtagtagcactgttttccagcctttgagtttgtgctggaattcgatcttggtctttgaccattgctattgctcttcgagtgattactcctgttgcttgacttgtgattaccattcctggtatctctggaatctgttttgcttcttgcaaacattcctacaccattgctgtcaagtctttcttttgatttcttctgaatttctttcaaattcataactgcttaaacctctgacattgtcaaggtttccttcccatagagtatggtataaacaaaatgttcatacattttggcaaggaactcaacagcaggatcccttgatcctcatcttcaatcttgacacctatgttgctgagatcaagaatgattctgttgaattcatcaagatgatttttgaggtgcttggcatcatcaatcttcaatgtgtacagtttcttcttcaaatagagtttgtttgctaaagacttcttcaagtaaattgaagcaagtttctcccataaccctattgcagtaccttcatctgaaacttccctgagtacttcatctcccaagctcaaaagtatggcactgtgagctttgatctcgatctccttgattttcttcttgtcttcacccaattcttttagttcttctttgtctatggcctgatgaattccttgatgaactagtagtgctttcatcttaatcctccataggccaaaattatttgtactcgagaacttgtctacctcgaatcgtgttgaagccattattgtctagtgatcttgaacctatcaagatcttgaagtggttcttagtaacccgaacctgaagctctgatgccaattgttgaaggaaactcgaccaaaaaccaaacacaatacacaaaaatagagataggattaaacacagataatgcggtaccaatgctatagcaattagagtgaaaataaacaagcataaaagatagaaaatggagacaaaaattacgtggttcgaataacaataacaacttgttattgtgcctactccacggccagaaacaaccctttgggcaatgaactttattgattgaaagagtacaccagaattacatcaaagaactgtaaagaacagttcataagcccccgaaatgaagctatgcttcagctacaagcagagaacatttctctaacacttagttctagtctctctctaactcttctcaatctttcttgatagtatactaccgaatttctaaacctctgcttgaatatgaaatgagtccccttttataggttttgaacataggtagatgatgtcataat

SEQ ID NO: 221384 - DNA, 1200 bp, Cannabis indica
caccaaacctcctcaaagtgagaatgacttttgcacttgacctggccacacttagcatcattcctcgaattgggatatctaccacaaatgctttgtggtcagattcccaccactctgtgagttgaatatctgccccttcaaattattgtagccattcaagattgcacaatccacgatccatacattccattatcaaattattttcatgctcattacattacgtcaactctattttaataaagctaaaatatataagttgacgctcatctagaacttctttaaagtcttcatcgatgtagagctcctaccctgacctctaaccttttcagcaagacttgcaatctcactaagagttaattacggtaaaactcccaaaactttcacttcgctagaaattaacccccaaaatttaattttttggggcgaaatccccaacacctgtgttctattagtaatttgttatttctatccatttctaggtgttaagtaccatgttgaacatttcatgtgcacacagtgtgttgtctatgtggacacagtgtatgacaaaattttattggcccacataaataattattaaaaaaaataaataatttaaaattaaaataccaatttaaaaaataaaaaaaataaaacatattataatttaaaataaaaacaaacaacaaatatataaaacaaaattataataaattgatttaaacttttttcttaaaattgaatttagtaaataaataaaagaataaacctaaaaaaagctaaacaaaaaatattatttgtctaaatctaattttgcctattctgccccctctctcatcctcaatcttcaccttgtctaacccagacagttgcctgtaacggaaccaattggctccgaaattaattttcctctatatttcttaccattttctcttgcacacctctcccaccccgaacaaaacctataagtgatccacttgttgtgttccttctctcttgcacgagctccattagaacctaaacgaccagacggatgattgaacacagacattcatctcgtcttctcagatataggatctcgtctttttagatctcatcttctcattttaaatctcatcttctcgtcttctcatatttgagatctcatcttctcttagaatttaggtatcacaaacaagggtttgctttgtaactaaatgagatgtggggtctcagttcttg

SEQ ID NO: 221385 - DNA, 1830 bp, Cannabis indica
acatcaaaatcttccagatttaactctatcagatcaactgacagcttcctcccttccacaaatattggaagagacctaacccatctgttggtgataaccagttctctagtaggcatatcactaggtctactcaagttttcgattactctacttgaaatataagaatgtgtcgcaccggaatcaatcaaaacaaccaataaagtaccagcaacagaaagctgacctgtcatagtggaagggccagcatcagcctcggccttggtcagggcaaacacccgagcaagaacaggtgcatcatctttcttcagttttggtcccagtcgcaatgggcaattcctcttcaagtgacccactgtcccacattgaaagcaggcactggcctgacactcaccctggtgacgcctcttacaccttgaacattctggaaaagtctgctagcttttgtttccaccacgacggaatccttggttactttggaatcttttgtttggtcctacagccaatgaatcattggacttcttcttacggtcaccagagtcattacccctaccagtactagacgtttatttccatagttcccgtcttacactattcttcttttgtatctgatcttcttcaccctcagcagctagggcgaactcaactatctatgcatatgtttgaatagccctaggttgtttagcagcaacaatcacatactgtgcgatatgctcatctaacccccgaataaacttagcctttctagcagcctcagtagccacttcatctgaagcaaattttgccagtcgatcaaacttcgtggcatactctatcaccgtcatactgccatgagttaatcttgtaaattcttttgccttttctgctcggatagactcattataatacttctcgtaaaataatgtccagaaagcatcccatgtcatgttattcaggtcatgacgttgagacacaatctcccaccagatgcgggcatcctcacacagcatatagatggcacatctgacctaatcattatcctcgacctgcatgaaatcagaagtggatgttatcatactcatccactgttccaccttgagtggatcaacaccaccctcgaacactggcagattttgcttcctgtactgctcatacaacgactccagacgattcccaacttcctgtggcactaccagaggtgtcagaagatcaagattgggtttcggaacaggctgagctcgttgttccctcagttctcgaatttgatcaccttgttttcggctggtctcctgcatcgtggcatataattcttcctagtttggtggtggtggaggattctcgccctcaccgccaaccccaagcccagcaagctcgcggttacccctaccggtcctcctcggtgcataatctatacacctgtggtcacatatctaagtaatggcaatactaataagtatttccatacatctcaaccttcacactttctaacagctaacatattccaaataaacatgcaatcagataaataacaaataatctaataattaaaacttactaaaccatgagtcgaacgagtatttgtagtcaatgtacatatcaaaatataaatattaatatttacagggatcccttattaccaaaatatttacattcggaactaaaagtgcttttacaaagtacgtttatacttcaaaatacaatcaaaatgggttatcctatccgccgggccgtggcactgcgactgatatgaacattgctgctgcgacctcaaaatcatggctgctcaactttggccttccctttacctgcaccatttagcacccgtgagtcacagagactcaacaagaaaagtaa

SEQ ID NO: 221386 - DNA, 2770 bp, Cannabis indica
attaattagaatatatataccttcccatatcccatgtatagtataaattaaagaaagataagtaaagatttgatgatctgtaattctatgtataaaatgttcattttataccaccttaaaatgtattaagtttattattatcatcttgttcttttgttaattaatgtagtatatttgattgttagtatccttttcatagctagatttcttttaaactcgagcactctttatttgaaaaataaataaataaatagtatgtaggattaaataatattgttctacatgataataataaatataaaaaaattaaactatacataaaacataatttattttatttattatactaattaattttgagataaaaccttttaaaatagtaacattattggcctttcactgtaaacccatgttattgttattagcgtactttaaacccatgaactttaattataccaaaagagaatttatagtcaaaaaattcatgatgaatgtttagattcataaaggagtggccactgtgagaagaacatccttatgaaaaaaactcatcataatcttcagaaaatacaaaccactttagcctctcacttctcacttttgccaaaaaaaaaaaaaaactttactttttgattaaagttgctaatcaaaatatctacgtgtgatatgctctttcatcccacgtaacaaaattaattaattgactaattattgtattatataattttaaaagctaaaaaaaagcacaatgatgattcacgttgcctagtgcatataagagatcatatattatatatattgataaaatattatatttctatgtcctttttaattgacaagttcgacttaagtacattttaattataatatttaattatatgaataagatggacactagtagtactactggacactacgtataaatatagttatctctgttaattaattatatcttatcattgactccaacgtacactctctttcacctatatctaacatttactatatatatttatgcatgtcgatctaccatttatgttttttttatttttaattatatgataaatgggtgcatgtataatgtaataaataatgataaaatcatttttgatgatgagaatgaataattaaaaatcaaatcaaatcaataattaatttttaattaatttaaattattgagtttatgatttccttacatttacattaattaaggaattaatattattgaaacattttaaatatttcttattaaaagaagtttttattctaactgagtattaaattaaaatatgaggattacgacaagtcgttatagtattaactcataatcacttcacgttcttattcattaatgtgttgtattttatttttttttctttacattaggggtgaaaaaatttgaatttgatatttctatttgtaaaatgaagtgtaatattcctatgattgacgacaatattttcttataatattgacaatatatatcttccatttatataagtttgccaatattttatgtaaagccataaaatttggcaaacttatataaatggaaaacaagttaattttttttatcttccattgaatagtttattttacaattacggaaaacaagttaattttttttatggaccaacatttttattatttatttatatgcatgaccggtttaccaacgatgatcatatcttcatttttcatactctttgtaatttagttagaaaaaactaacaacaagtttacttttttaggccttttttcatatattataaatatattttgatccataccagttattttcgacctccaaaactaggacaatggactcggctggagccccttggaaactagatgaaaatcttggttataaaagctactctctttcttattttgaaagctttggttattataatattcatactaaaaataatttattttaaatagtaataaaaaaatgaaatttaatttttaaaaatgttgggaagcttggttgtatatattccaaaatcttcattttttgttaagggcattttgagtccattgggcctcagtcctgctccaaggggcccactcagcttaggtaccaatcaattttcgaatatacacacaaaatattttgataaattttaaaaatactacatatctcatgtccaataactaatttctcctcagggctggccgagtctaacataaaagtgcattggaaattaaaaaattatgttataataacaaggggaatttttatttttataatttttaaagtataagtttgtaaaaatgtagttttttctcaaaaaaaaaatatatataatttgtattgttttaactctcaacaataaaactagttttatatttaaaaaaaaaagttattttaagacaactttttttaaaaagtgaaaagatctagaaaaagcctccttatattaactggttactcttaccagattttctcattttttttttcagctttatctttaattttcccacaatataacctttttgaaaaataaaagggaaatttacaaaaatactggaatttgggttaacttttacaaaaatactgtgacacggaaatcttttcaaaaatactgtatttttataaaacaccagtaaaacacaatgcaaaacaactcaaaataacagtagaacaccaataaaacaccagtagaacaccagtgaaaatttaagacagtatactgcagtataaaacttataaaaaatacagtaaaaaagtaaaaaaatactagtctggcagtatttttataaaaaa

SEQ ID NO: 221387 - DNA, 2413 bp, Cannabis indica
actagaatagactcatgtaattaattcaaaactataattaattcaaaaccaaaattaagtaattaattcacaattaactacccacaattaaagaaaacgataatgacaccttgaacatgttcaacctacctagtcgcaagcttatcacctaatggtctgggcctcacgaatacaatcctagcttgtctatttctcatgtaaactccccattagagggaaagagaaactaagcataattcttgtgagcactataaatactcaacaaatccttcagattaagggttgaactatcttgcaatattatttgctcaagcaaatacaaagaacatatatttagtatattcccaaaggcttttaaactaaaatacacaataatatagaatcgtggactaaggctctttaatgccccaaccatgcaaaagactccaagtgttattctatttctctctttgaattatttattttttcaattctaatttattataattatttttctaaaaatctcgattagcattttagtacttttagtgagagttaaagaaagcagtgatatcatctgaggattacatatactaatcatggtactcacctaacataaatttggtcttcattatattgatcctaatgctaaggttggggatacacaagatccaaaagaggtgaccagtcgctacaaggacaatgtgggaaaactcaaaatcttgacaatcccataatcaaagatgaggaattagatgagaatagttctaaagatctcaaaaatgatgactaggatacaccaaaagatgatcaccaagacgtgcctactgatggttgtgctaaaaagaaggatgatctagacaagtaaggccctgtggtcataatggccaagaagttagagttaactgaaaataaagtaactcggatagaggaattcacttttctattactttaaaaaatgacgagaatggaggttgcaatagtaacactaacttttgaaaacataaccaaacaaacaactccaggggacaacaccactagaaaagctgatcctaaagatcctggaacctctaacccacataaggataaagggaaagggaaagtgggcgaaacctgaaaaaagccttctcaagctgagcagtagaagaaatataaatgtgtcagccaacctcaacagaaaaagaaaggaaaccatgcttcatggtagagtgacttgagtaattttagaggcagagccgtacaaaaagataagtctaaagctgaggttaagaagcatacttcccggaagcataaaaatcactacaatatttctagcatccaaagtggtgatgttgacgaagttcatccagtttcagacagtaacaatggaagtctctctacaaatgatcttcagagaaggttaagtgaaaacaaagaaaaggctaaaacagaattagccagacctcgcggaaatgatttgaggaatcatattaatgatcaagtctacgtaagggaatcttcaaatgatacaactaattggttggagcgcaaagtcaaacagttaacaaagctcacaaagaagattcctaaaggtaaaatggaaacgtttccgatttagaagaagaacacactgaaccacgtagttaattatagatgcaccactgccagagcacttcaaaatgcctcaaatggaattatatgaaggaaagacagaccccagggactacttatccaaatataattgcatgatgcaagtagttaaggttagttatgatgcaaagtgtctttacttttcatttactctgccaaaatctgtacaagactggtgaaaaaggctatctcctagatcaatccacaacaaaggacctccaagcactattcaaaaagcaattcatagcagcaagggactttgatctgaagccaattccctaactagtgtcaaataacatctaggagaaagcctaaaatgtacatccagtgtatgatggttgttgctgcaaaattaaaagttactgatgatatgaagatggtggctttgacattaggattgaccactggatctttgttatcgagaaaaatccaacggttgagagcaaaaactttgtctaaatttttgtcaagagcccacgggttcatcaatcttgaagacgcttacactcaagcttatgccagacttccaacaccttccactaatgtagcaactacacaaacttcacaaatgacagctttatcaattttcccttcgctaacagccttcataattcccactgtttgcagaccaaggcttccgcgcagccaactgcacatgctagttatttggggtttggagtggtaaaaataaagtgtcgctcctggacaaacgaaccaaaaacgtggaagctctagagtccaacgtaagccaatctcagagcaaaagaggttctaacggtccaaacttgaaatgatttgcaagaaa

SEQ ID NO: 221388 - DNA, 2232 bp, Cannabis indica
tgattttaggggatacttgttgtaaaatatcaatcaatatggtaattaactgccctcctatgtaattaacggccccatgatgtaattataaatagaggccagtcagactaaaaaagaggcaaaaaattcataagagaaaagatgctagagatgtatcataaatctaataagattgactcatggactatgcagaattttaactgcaaaaccacgtaaaaaccttcatgttcttactgttttttctttactatttctattttctgtgcaagtctatcaccatttaggctcaaatgtagttaacgaaaatctgctttaacagtaggcatgatcattttgcttgggaacaaagttcttttgaattgaccatttcgtcgttgaaaggtaagcttgatagttgggttgaaaatgtgagaaaggcgaagagtttgagaaagaggtcgagtatattttatactttgatcggttgtcctcatttattccaagtttagttttatgagtgttgaaaatatatgaatggtaagcactgccaaaaggaaatttctagtattccaaggattatttagtggacttgtagcagccaaccaactttcaaaattttgaagactacgatttttaatgtttccaaagacaaggtacttttttttttattattattcttagttgtttaatattgttagtaaaaatcatattgacaatttcactattatgtttttccagttgcaactatctaatatgaaacccacttctgctgagtttaaattcttaaaaaagagcagtttcaagtttgacactgattgcactttttttttttacaagagtgagcctattcaggaacaaccttctgaggttgagagtgacatatccatcaaacttaatagtttttctagaaaagtggatagtctagagcttaagattgatttgctgcacactttccagtagaagatttcatctaatttgattgagttgaaagagtttgttgctgcccaatttgtttcttttgctgcccaaatggctacaatgcagacacaattctcatctgtgttggttgattctgttgctaaggtatgataggtttttatgattgtttttaagttttgttttagttgcttatgtatgcttttgtttacaaatttttaacaggacaaaggtagtgactcttctaatgacgatggtggaagtaataatgaagaagatattaattcagagggtaatgaagaagcagatgataatgaagaagagcaagatgctgaagatgaagatttggatgatggtagtggtgatgaagaggaggagggtagtgatggagagcaaacagatgaggatgataatgaagattttgatccaaaggaaaatatgagaagggaagtgatgataaatgcgatgatagtgagaagaaggtagatcattagacaatgtaactaggttttagttactttgtatgttatattttattttaattccatttagtttatggattagtttttttatggttttttatattttggagtctttttatgtattaagttgctactattattcaaactctttttatgtacttcttatatttttagaatgattatattttgattatggttattatatttaaccatgttgtatgtttctttttttttactgtttgtttttcttgttggttagtttgtttagaattattcttaagtttctttttatcttccaaaaaaattacatttttttattcttatttttgtattttttatcatcaagaattttattgatgtcaatgacggagttactcaaattgatgttgaggctactgttcagtcaggtgtgaaagttattgagattatgataatgttgtttgttttttgatttctggctgttttatggttgtgaatttgtaggcttcttctaattttttttataaataaaaaattatacagatgtcttcaggtgagattggtggtgattttggtaaccaagttcaagatactgaagatattgagattaaggagcctcctgttgttggtgttgtggtatggttatttttctatttttagtagctcaatagttgtttatttaatgactaactttctatttttatacatatttgtttatatatatagatggtttcaataggtgtttgtgtagattctaatattcaagttgtagaagatgatccaattgcaattgaggaaacttctgttgttgaaaagaggaaatcaaagaaaccagtagctttgacgtctcccttta

SEQ ID NO: 221389 - DNA, 2364 bp, Cannabis indica
aaataatttccaacaagaccatacaataaacacaagttagagtttaggtcttcaccttgtacttttttgggatatagtttgaaccacaagggctataagtgtttggactttaaaggcaggttatacatttctagagacgttatttttgatgagttctcctttccatatgagcaatcttctaattctactacttctaaagtctcaacagaaatcccatcttttatttctgccttaattcctgtgtgttctcactttaaacaccaatataccatgagagatctcactgaaccaagtgttcagaccactgctgcttctgtgccttttattgatcccacttcacatgccttaaataatccttgtaacattgaccaacatgctttatgtgacactgtatcaatacctaatatttccattgatccttgtcctactaacattcagtgttcagtacaggagcaaccaaatgcaggtcttattcctctctgtgttgcagatgatacttcagggaatgcagacaatgtccacgaggaggttcctggtacagcaacttctcagggtactgaatctgttgaagctttaagaatgcagatgccaacttcagggaatgcagatgtcaccacacattctgcaacaccagtctcttcaccaggttgtccaacacccgattcgagacctcctccaatttgttcttctccagctgccttgccccttgtagctggctgtttgaatgcaccaggaaggtccaccaaacatcaaatgacaactagatccaagctaggaattttcaaaccaagggtgtttttggcttcaagagagccctcttctctcaaagaggctcttcaacaagagcaatggaatagtgccatgagtgatgaaattcttgccttggcaagaaacaaaacttggattctagtgagacttcctgaagggagacaagcaatagggtgtaagtgggtgtataagatcaaagaaaaccctgatggtagtgttcttaaaaataaggctcgacttgtggccaagggatttcaccaacaagcaggttttgattttatagagacctttagtcctgtgattaaacctgttaccataagggttgttttaactctagccttgtctaatggttggaaaattagacaactagatgtcaacaacgcctttctaaatggtgatttgcaagaggaagtctatatgactcaaccacctagttttgaagtccctggacaagaacatttggtatacaagctcaacaaggccctctatggtctcaagcaagcaccaagagcatggtttgacaaattacaacagagtttaatatcctttggatttgtttcttctaaatctgatcactccttgtttattaatcacaataatacctcaacaacacttgttcttgtgtatgttgatgacattttaataacagggagtgaccaagatcttattgatactcttgttgctgatctgaacagtcaattctccttatcttggtcctttgacttattttctaggcattgaagttgcctattctgatgaaggaattcatctctgtcaaacaaagtatgctcgagacttactcatcagggctcaaatgcttggttccaagccttctccaacaccaatgacaagtggtcttcgcttatccgctcaccagggggaaccccttgctgatgtccaattatactgatccatagtaggagccttgcaataccttacaattacaagaccggagttgtcgtttagtgttaacaaggtatgctagtttatgcaaaggcccctatcgactcattggcaggctgttaagaggattttaagatacattagtggtactatggacttcgatctcagattcacaaaaccagatagccatgatcttgttgcatactgtgatgccgactggtcttcagaccccgatgacaggaagtctacctcaggttatgccattttccttggttcaaacctgattgcttggaagaagagtaagaagcaacagaccatatctcgctcgagtacagaatctgagtacaggagtgtagctaatgtgactgctgaactcacatggttacattacttaatctatgaacttcacattcgcatacctcagccccctacaatctggtgtgacaacttgagtactataatgctcactcaaaatccagttctacatgctagaactaagcatatagaattggatctatactttgtgcgagaaaaggtcatgaacaagctggtgcaaatcaaacatgtggcagcctttgatcaaatagcagatggattgactaaagccatttccagccaacgattttccatgtttagagacaaactcagaattgaagaccatccaattcaaagtttgaggggaggtgttaagac

SEQ ID NO: 221390 - DNA, 2656 bp, Cannabis indica
ataaaatgcaagcaaacaagcatatgtcaaagttcaaacataaaagtacgaggcattaacagataaaataaaaagcaaagttagccatccaacttcacaaatttatctttacaaaaagtgccgcaaggggcaaaccattgtctcggccgaaatgccattttttttttaaaaaaaaagagataaaaaaaatcaagtctacatggtgggtgacttggttggattttcttcttcttcctttgcatcgacctcttcctcttctgccctggacttcttgcaaaaagccagaggctcctcttccttctcctctaggaagcttgtatccatattaggattcgccatctaggctcgatttacagtatgtaggccaactttgttgcatctttctatggtctcgatctccttctcagccagtatcttctcaaattcatcagcttgggccttaatggtcttcccgccttcttcctttaccttcttctcggcttcttcccgagctttttcgacttcttgtttgaggtagacgatttcttgttgggctttatctcgttgcttagtgacaacctcgcatggggataataatttttgaacctcaccctccaggtatttgagccgctccgagagtcgacgattagaagcaaacgagacaaaagaagcctggagaattataaacatatgattaagagaagagagagaaaaaataaatgataataataaggccaacttaccatgaggttgtagtccaagctttgtgaaagcatttctgttggactcccgaggttgagcaaatcccagtcaggaaaaaaagagcctgaagtttgcaccagcaaacaaccccatacgcctgggcaaattcagatccagcctcctccgcggtggccgataaggtttcaatgacccagctcgaggaagcagaggcataagctgtctcaggaggaggagcattggtgttagaagcaactggaggaggcacttgtttttgggcctcgttatcagaaacctcgagatcaataggcttagacaagaacttctttctgtgggcagtggttttcctgcactttttgggaggaaccacctcgccagctgtagggacctcgggattggttctaaatctctacagcctgtaatcttgaatatatcaagaggctcgattggttataaatcccaactcgcatctatatgacctgccctatcttccatagtgttgtattgctcagctataccataatatgactcatgacagttaatctagacgtggaatctaggataccagctgtcaaacttatgagcaattcggtctacgagaaaggaatcccaaaaaaaaacaaaaattaaggagggagtcttggaaggtgactaatgtgttacgttcacccctaagtactgtaggagaccaaccacattgattacctcgagatgctccttcaccggcttcccaaggggcattgttttgaagatattgtgcttgagccacacgatcccaggccttatcctcgtcccaaatgataatctgctgccaagaagaatacttgggaaatttgtaatcacaagtatatactccttgttagcaagaaggcccactgatcgcaggttggcctcgttcaaaaggaactcgcatgattgaagaccatagggaagggttatcaggcgcctgtgccgactgaccatctcgggggtaggagtaggccttgtcaagagagctgtaaaaacaacaaaacattggcagaaaactgaaagacaaggattgatataactgagaaagaggaaaacaatcacttacaaagtttgtgaaaggtggttgtgtcgatgggagaaagaccagatgtccagaagaagttgtctttgaaggaaactttatttggcaagtccacaatgattttgggctcgctagaatgagtaccgaggtagtagaagcccactgcggcattcttcctcgatggaacggccttaaccgagtagagatactcaatttctactggtgtggggcatccccagttcagaattttatacaaaaccttcaagctagcgagaatcctgtaggagatgggagtcagctgaaatggggcaactccaaggtgatttatgtagtccttgaagtagtctcgaagtggaagtatggcccctgcacttatatgctcaaggctccagacacctataccagtcgagccactggtactaatctcaccaccggtccctagagtactgcttgataaacgcgcaggagggaagcaactgaactcaccctctcgtattgatctaacttggcatgattgcctaagttcaattccacatgtcttcagtatatcgcctgcgtagcctgagatagatcgaaccttcaattctatcaactcagcttcaaaggtgactctggggtcctggggagtctttgatgtacgtggcttgggaggcattatttcaaaatccaagtcacctggttcaaaagcaattgtgacgttgggtaaaaacaaaggcttttccacatgaataaaggacacgctaggaggttctggccaggttgtgtaacgccccaatattttgccttactttaccaaaaataccattttaaatacataatttaaatagataaaaaaaatccttaaaatacaacaatgggttttagaaatcaaaatgcaatagagaaggatccttcatttgtaaaaca

SEQ ID NO: 221391 - DNA, 2245 bp, Cannabis indica
ttattattattttctttttttggtggcgtcgtttcataaccgaagtaaaataacaatttacatcagttatactttgacacaaaggtatttgcttcacttaataatagacgctaaaagttattactattagcgtcagatattaaatgaagcaacaaactttttgcttcggttaagaattgaagaaaaaataatagtatttgcatctcataacgtcggttacacaatctgatgcaaattttttatgtcactgaaaaactgaaacaaaaaagcctttttgtagtagtgataggaaaaactagggtcccaaaactacctcaaccggcagaccaattccccaaccggaagaccgagtttgttggatttcttggggactaaccggagttccagttcctacatgtcctattgaccagttcagtgcaggaaacatcaaaaacaccaccaacatctcaatttgatcccaaactgcacgaaaacttccaaaacacctataccaacttcaaataacatttcccaagcaataaaacccagaaacacacacagaatcaagaaatgtcattaatgaatcaagtttgagattctaaactcaaaattgatcattctcctcccaaatcaactaaaccagccataaacaacttattcctattcaaaataaactcagagaacatacaagaacaagattaaacctaaacagccactaattctcaaaaatacattaacaaacccaattaaagcttaaacaacaaagaggtaagagctctagagtttacctctacttggaaacacctcaatcctttgctctaactcaaaaaattgaagggaattgagctgatttcctatggttctagctagggtcgagaaagggtgaagataaacatagagtcttctagccatttcttgaaaataaatatcttaaaaaatagaaacaactaacattgaaaatagaaacaatttaacatcgaaaagtgaaaataattgaatctcaaaatggaaactataatttttaaaagagcattgttattggacactagtggtgcccaacaccttttataggtgatgccagttagctaacgatattctctaaaagttatttttttaagttatatgaaattcgatacttaattacaccaataatagtatgacaccaataaaatactagacactattagtaccttttcgcttttttttttttggaatatgaaaacaactataagtgaaatgacggcttaaaaatacattgataagccaattgggccaataaattgtttacagataacactactacaaaacacaatcaatttatatgtacatcatctctctctgaaaaaaaaaataaattatatgtacatcatcaaactttaagtatgtcaaactttatttgtacaaatctgattttacacaaactgaaatagcagcaaaagtactagtaactactttttttagatttagtttgtccatgcagatattctaagtttctaaccaaatgaaacacctcttcaatttaagctagcttcatttccattgagcccttcattcctaacttcatagcaattattatctcttctagcttacattataaactcttcccacttttctaaccaaactgaagaagagacaaaaggcgccacgaaaagtgtctccattgtcattcttgcttcagatagatgagttgggaaagctgactcagtagagcctaacatacatactcaacttcctcaacttcaatattctcaggtctcaggtcttaatattctaatccctcttaaattgccattatgagtatataattttcttattattttaggtgctttattttgcatccaaatttagtatagatcaaagatattcttgtaatccaattccaacacaactattatacttaatttataaaattgatcaatacatcaataacaatacaagcctgcaaactgtattttctccattatatgcaataatagataagatatatgaattaaagtaaataagggtatatatcaattcattgcttacatctaaaatttgatatttcaggcatggataagccttggcagagctcatttaaactttggagaacctgcagcgctatgtaaagctttgataaagcattagcaatgaagatggtgcttctaatactttcattcattatcaaaaattgctttatatctttacaacatcccatacccaaagtcaaatataaacaaaattaaaaaaaaaaattattaatatctaataaaaatttcagaatgta

SEQ ID NO: 221392 - DNA, 1511 bp, Cannabis indica
acgtattttaggaaaaatctgagacaacattaataatttatattaaataattaaatgataatttatagtgtatattatataccatatataatataatatatatacattatatacatatacatatatgcccaaaaatatatgtactatgttcgatcaggttcgggtcaagggtcgaccaccatggccatggcggccacgaaaaaaggagcaactcacacaaagaacaagtcaaaggactcgagatctagatgggtcacatgcagtaggaggatgagagcgaagggtcggaccttcggtcttattggctcacggtggcaacaggagaggtccgaagacctcagaacccaataggttcctcctccggttacaaccagaaccaatcctacaaatctgagtgatattaaccaagtatatataaataaaaataaaaataaaaatataacttaatgtatataaatatatgtatgcagattgtttgttatcaacttgagtataaccaaaagttgatacattatgattgactcataattaatttattaatttgttgataataataataataattaatatattaatgatctataatcatcatgtttggattatggcatatcaggtctataacttatcacaataacattaatatatacagaacatatatatgaaatttttgttttttttttctttatttattataatagttatcctcgtgataaaaataaataggaagaccaataaaaaatagaataaaacacaatatatatttatttgtaattatccattaatcaggaaaataaataaataaatagataaacattacttgtaaaatgaaattttcaaggaagaaaggtcaactataaattttgtttgtacaagggaactggtcaactttaattaattattatgaaaatagcaacttgtcaataacttaactgccaacgaatatagtaattacatattaccattttataataattacacaaaatttacatttgataattaattcaacaaagtgacgtgaaaattgacttatcataatttatttattttatattaaaacgtattattaatttctatataagaaacatattagctagttggcaattaaaaaaaagaaaaatcaataacataattctttaaataacatctgaaaatcataactataattaataagcgtgcacgttttcttttaattctgattaataaattatacatataattttatttttttctttcttttttttttgtttgacatgataatttatttttatcttaattgttaataagtggacataattagttgtatttttcattttttctaaatcttagaaaattaaattaatttttaaatacataaaacgttgagcgaaaggagtgtgtgtggtgcatttcacagcttgataatttgatattaaagataaaagagcaatttgcggcgaaactcccttatgttttgatttttatacacttaacccccttatctttatttttggtggcaaaacccccttatgttt

SEQ ID NO: 221393 - DNA, 2009 bp, Cannabis indica
ttaccagtgtcatgatcatcttttttagaagactccttgacctgttaaagaatttaatgttttatgagaaatgcacaagtcactctcttatctagtcatcaattctaagatggatactcgtaaaggcgtaaatctaaagagttactttataagaagcacagaggcatatacaagaatctcaatggccctcaaaccatacaatctggttataagatacatataatatatccattattagttctatgtgcagaagtcatacaaaccaaatgatccacagcagaaaaaacttacgaaaattccaataagcttgggaagaacatgttatctagatacaaaagtcaaaagcgaaaaatgatatataagatcaccaacagtctactaagctcccaagtaaggcattttgtcatttacaatgaccattccattaactgaactattctcatgattctgagtgcacatagttgctctataaaactgaattgaaatttgaaaaatctatttaccaaagcacgaattatttctttaatattagaagctaccaaacaacactatcacatgtagaaaatactccaaagtaaagacttttgcaggtagacacaactccataatatgaaaaggtgaaggaatcacaaactataagaatactgccaaataggaaaactatcatatacttgacaagaacaaattgtcaagaaatgaagaaatgataacttaacaaaaagtattcaggaaaaccaacaggtgaagcttctaagaaaaacattcaactatagtgtacttgacaagaacaaattgtcaagaaaaaacagagttattaccaacaggttaagcttctaagaaaaagattcgtcctttctagtaacattaggttaaaagtcacactcataagaagcacaaatcctacataatggacattaatctcgtttagttgttaacacattcccattaccaattatttttcttttcacattttagttattccaagccaaaccctctttaattgagatctgaagcaaaatatttaataaaacccagaaatgtgctcctttaatatttgaaataaaagctaccttatgaagcaaataggacaatttaaaattgagcagcataaggactccattgaagaaatttgcaggtccatttcataatataattcataaatgtgaggttatacatattgatattcagaattactatgaatcaaaataaacacatccaaaatacctgtttgagttcactgaaacattgggcagtcttcactgcttcctcatcatatctcgctctccactcagccgattcatccaacgcttctctgttagccaagtcgaactgtcgtctacccagtaaagaaaaaagttttaatctttgaaaacacaaatgtttgaaatattgttgaaagaaatgaatagtaaagagtattggagagtgtaagcaggtaacctcaagaggtcagcgtcgaaggaagaagcggagtaatcgatgctccaaagtcggaagtaaacggcagtgcctagaatgatgaccactgccaagcccaacactatttcgtttcttctccatcttcccaccattcttcgttctcgcctgatgttcattttggctctctattttcaggtgaaagctttgtttggttggttgggtggttggttgccgggtcaaattcagtgaatgtagggctttgggcctcatgggcctaactatcttctttgaaattatacccatttttttttctttttctcttttccgaaagtattacaaaaatactcatttatatctttcattatttttattgaaactcatttttaattaaacattctaattatgtctccagttcaacttattttgtactgtgcccaagcaaaatttatgtattttagtttattaagctttaaattggaagctaacaaagttaattttctttttgtaccgttctaaaattttattacacaaatgccaataaatttcttttacttgtatttcagtaccaacctgtaattttgattttgata

SEQ ID NO: 221394 - DNA, 5538 bp, Cannabis indica
tcaaaatttgaggagattttgtagatattaaagtttggggagcatggtttagtacataatcactcaaacagtaaaattgaataaaatgagacagaagttcttaaatctaacaatctcaatagtttcagaaaaatttttaacgacaaaatatatttaaaaagcatgatttaatatatgtcaaaatttaaagaaaaaattactaataactaatctccccactgcagacaccgccattataaatatttaaataagaagatataaattaataaatattattctaagataattatttcttttccctctcttggagagatctgccaatctgacaaacgtgtactaaaaatataataataataatatcttccaaatatatatataataacaataagaaataaataaaataataacttgcgggttcaaccatctttccttactttctctctctaaaattccctcgtaattttgtctgtgtttctctttcttacgtatatcttataatctcattctcaactctttaaaagctcagctgaggaaaagctgtgtctcttttcggttaatagcagccaaaataacatactcagctctctttcactcatttttgctctgagaagccgacttacactgtgttggcatttttctctctctcaatttttttcctttctttttcatctttttgggttgattttcagccgttttatttgggcagagatgggtgtatgagtattttgctggttttattgatatcgtggctgatactgagactattaacatcacttggttgaccccacttgccagaattcaatttcttttcctattctgttttgttttctttgagaaggcaaattaatcaatacgaactctttgtctctttacccattattgttggatgtgtgaggtgttcttgagctgttatatccataagtgggtctcttggtgctcaaattttggtgtatgggtttttcgtttttgtttgggacaagattgacttatcaactactagtttcagttcaattttcagtctttcttcctgggttcctttacgcttggagttctgcttcttctttcttcttaattagaggttgaatttcagttgccctctttgtggttagagagataataagttttttttgttgctgtcaaccctttccgagagttttattgtggtttgtactgaacatggatttcaagtgaagtacgaatttgaagatctagatttgcgtgtatctatctatatttaattgtattgatagatttcgaggatttctgagatttggtttagtttgtggagtgagtaactgataagaaaagctactgtaaagaaactgaggggaacttcttttgccttatcgaagcttcaaaagtcaataagcatacaaattaggatggcttcaagagttgaggatgatcaagaaacagatactagaggcagtatgtgggttttggatcagaagcttgaccagccaatggatgaggaagctgggaggctcaggagtatgtacagggaaaaggtaacccattaaactcactctctctccttaatttcattgatttcaaatgatttaatatgtgtcaaattaaatacaaaattcttatagttatacgtccaattattggttttaaatttctataaatatatcacattcgatgaaagttggctgtgatatgttggtgtaaatactaaatggggatatatttttggtgagtttataattgatttgctaattaaattaatagtagtgtggtagatgagtaaattaattgctatacagttggttataattctgtcttgttgtctaacacaattgtgaattgtgattcctacagaaattctcagtgttattgcttctgaggcttgcattccaaagtcttggagtggtttttggagatttgggtacttctcccttatatgtcttctacaatacatttcctgggaaaatagataattcagaagatgtaattggtgctctgtcattgataatatactctctcactcttgttccacttctcaagtatgttatcgttgtgtgcaaggcaaatgacaatggtcaaggtaaattaaactctcattatctttgtacatcatctgacatctactgcctgtcttttggttgaattatatgctgaatagaaagaacttgttgctgctttcattcatatgtgccgttattgttgactatttttccaatgggatgagcaatagatactaaaatgcggttgatcttttttttttttactttttcaccacatatgaatcaccactatttcatagtgtagttgaccctgattagtaaacctcatcattattttgtgcagaaaagaaaagggtatgataagtgcaccactttattatttatttattttttattattctgtagaacaccattatctttttgatacatttcatctctaagataggaaagaaaaggggtatagtacccttgtactgactgctatctcttggaaaggtgcctctagactaaaatgaatagctggttgaaatacataacaagtgggtagagcagttgaaaatgttcatcttagcggaattgttgttccttggatcttttatttgctgcttacaaacacagaaaatagaacttattgtttatgttgtgcaggtggaacatttgctctttattccttgctatgtcgacatgcaaaagttaaaattattcctaaccaacaccggactgatgaagagctaaccacatatagtcgttctacttttcatgaacagtcttatgctgcaaaaaccaagaaatggctggaagagtatgcatacaggaagactgcccttcttcttcttgttcttgttggcacttgtatggtgattggtgatgggattctcactccagctatatctggtacattaaagtctttgatcataaaaatattggattttgaataccgtcacacacttcccatacatcctatctttaaaattttcatctaaaaaattgtaactcaaggtacataaaagagaaaatttaatagtagcctggaaatacttatgacatttaggacaagactaagcacttaaaaacttcacagatttgtatctttatataactggaaattaaggcaatgtgatcggatatataataagtatgagatagataggagctttgtaatatgggcagtttcctctcataggcaggctagtcttcgcgattgatttctgcttaagtggttgtaagtttgtaacagttgatatgagagcctgcaccatgggcaacttgcgaaaggggtgactttggaaaaagtgtagaatgggctgcagtgaatgttgactttaaagggggtgcattgttagaggaccgttgtgaacgtcgactttaatggggttctgtgaacgatgtctttgatgcgggtgcattggctggtgttttaaaccagttgggcaccctcttctcttctcagctagtctttttgagtgagttctacccaaggggttgtaacaatatccaaccaaataacaaggaaaccttaataatttattatgaacaaaacacacactaacatgagttaagacccagatgaattgatacatcacaattcatgttggtcagtgatatgtctattgatgccgttttgataacacagaagtaaagaaaacaaaagttagagagataacaatcaggagaaagccaataaactatatggaaaagcaaaaaacagagctattttttcaccctttttgatacattctggactggattctaccagacgcatggcatattttatctaggagaagagcctaaaccatttaagttagtgtctcgcaatattaaccagtaagatttatcataaacaccaatcagcgatcaaggactatggctgtcatgtttctcagggatgtttagatagcctcttgtagatgtggccctgagggaccttctacccttaagcatagatggggttaacctttacttccctgagtacctgtaaactggtctagcttctttaaacccgggaattttttcgccactcaattttgttagaacaacatcatttcaattcttaacacccctgtcattttttgttacagtagtaaataacgatggctttcctttgcagtcttatcagctgttggtgggatcaaagtaagaggccccactatgaattctggtaagatcactgcttgaactgaaaatatttatgttcgcttgtttcttctgctccaccatccactgtttttttatgttctaaaaatatttaattgtttccgccttgttgtggaacagatgttgttatacttgttgcggctgtagtattagtaggactgtttagtatgcagcactatggcacagacaaggttggttggctctttgcaccgattgttctgctatggtttctcatgattggaggtataggcatatacaacatttggaaatatgacagtagtgttctcaaagctttctcgcctgtgtatatataccggtattttagaaggaatggaaaagatggatggacctcccttggtggtataatgcttagcataacaggtaaattttccacatataattttaacttttggctatcttaattctttaaaagctattatatctggtcttttttgttctgacaacatattgggaattatctcttgcaggaacagaggcactctttgcggaccttgcccattttccagttctagctgttcagattgctttcgttctaattgtctttccttgccttcttttagcttattccggacaagctgcataccttatgcaaaaccatgatcatgcaagcgatgcattttatcgttctattccaggtttgttttgaccttttctttacactgaaggcattttattgcactataaacccatgtaattctgttcacaattgcaaatactatctggtagaagtgaaatacataaataaataaaatttgtcacttgccaattgatcaaaggaaaactaataacatttctctggaacagccaaaattatttaaactttaattttcttatgctaatttgtgttagtgaatctcctaaaagataccaatgacatgagaatcaataatccaatgagaatctcctaaatttgggttctgtttttttgcttcactctcattcttactggaggaagattaggatagaggggaattagtacacatatcttgaatttactattatgatttgtcttatcaatgcttatttcttcttactcgccagtaagcatatattggcctgtattccttgttgcaactgcagcagctattgttgcaagtcaggctaccatatctgctacattttcaatcattaagcaggcacttgctcatggatgttttccaagagtcaaagttgtgcatacatcgaagaactttctcggccaaatatatgtgccagatatcaattggatcctcatgattctttgtattgctgtgacagctggatttaaaaatcaaaaccaaattggaaatgcttatggtacgcttttcatcagctaaatctttttgtctgtaatttatcaattttttaaatatgtgaaatgcgtgtgcttcgtttttttttattttttctgttc

SEQ ID NO: 221395 - DNA, 3008 bp, Cannabis indica
ccgtctgtggtctttgacaaggggatcctctttctccttacttgtttatcttggcaaccgaattaatgtctagactgtttgaagaagctctgggaagcggtagtattaatggaatccgtctttcctggggtgggctgactttatctcacacttttttttttgcagatgacttgattttagttggtagagccactttaggagaagctagaggcttctggcatttccttgagaaattttgctattggtctggtcaataggttaataaacttaaaacttctttttttttcttttttagtaataacactccggacaatgtgaaaaaagagattagagaagctctaggaattagagggtcagaaggtaacgttaaatacttaggggtccctcttttttggtctaagcagaaagatgttgatttaaactttgtgctggataacctgacacaaaagcttcaagggtggaaagaaaaattactctcgaaagctaggagagcgacactcattaagtttgtgggtctttccatgccaatgtatgccatgtaaactaccaagctatctaaccatctagtcaataaaattgatggtatggtctgtgacttctggtggagttttgagaagggaaaccacgagatttatctaaagacctgggataagctatgcctccctaaatccagagggggccttggctttaggaaaataaaagaaatgaatctagcgttcctagctaagtggggttggaacttactcactggtagtcagtctctttgctgtcatattctaaaagctaagtatctaaaagggaaggagcttctagactgcaaatataaaggtttagactcttagttctggaagaatgtggttaaagcgaatgacattcttcatgaagaagcttgtaaagtggtctctaatggcagggtcacaagaatttgggattatccatgggtgactcatggaaattccttctttcctaaacctaatgggagacctacgaatggtttcgataaggtggcttagttgctgactgataatggacagtggggcgaatggaagttgactagattttatgacaaagaaacaattactgctattttgaaagggggcaattcgtctggtataggaactaacaagtggatttaggccaaagagagtaatggccgattttcgtgtgaatcagccttattcaagccttatagagagctcctcattgtgaggggacaccttcactatttggaacaagttatggaatagtaaaatcatagagagatacaaagtcatttggtggagaattctgtctgatgctcttccctttaaggttattcttaagaagagatttcatgtagatgaagtgaattgccctatttgtggaatggaggaggaatctatggagcatctgttcctttcatgtaacttagctgtccacttttggagatttttctcgtgaggtatctatcctatttttgattcgagaattcaagtttaggattgggtcaaattcatttggggtctcaattctaagggcatgaatgttgaggatgtctttatctatgcttcagttgtggtggatactatttggcgtgtcaagaataaaaatgtccacaataagtgcgagcctaatgtgactaaatatattaacactatccattgttcctttatagatttaaaactccctcttttacctgttgcgaccccggtctagagggatggctggagccctcattcctaggacaggcttaagctaaattgtgatgtcagagttggtttggacaattcgtgcattgcggtggtcgctagagaccattttggcaaggtggtctgggtttttacggctagattggactttgcggatgcattgtgtggcgaggtggctggttgttgtgtagccatggagtttgcaaagttcaatggtcacaagttcatcatcgtagagatgactctagggtggtgatcaactctctcaaccacgtgacgtcgtgttgggagattgagaattactattcttcttgcttagatctctctagatgttttggtggttgcattattaattgtattctcagaatcagtaattttgttgcccataatgtgtctaagtggacgtttacccaaaattagtttgattgcttgcctgttgattatttgcctttaggtttattttgtaataactgagaggtctaattttctctattaatgaacgtttcctttgaaaaaaaaaactaaacttatatttatagcgggccttcaaaattctccaatttcatgtctttaaattttggttggtgtaaaactaattacatgcatgtaacagttcatttaagtaaattaatataaatattaaagcttagcaaaatttgtatcataatccgacaactatatatgtaaatgctgtataagaatcaatgaaatcaagggtgtggtatcatgtcagatcttgtttcttaacttttttctttcaattgtacaccaaaagacatggaaaagagaagatatacataaatatatatatatatatgtagtatcaatatatatttgatacgaaaggaggcagattttccaactagtaatgtagtagtggttaattaagcaatggcattaatatttttatttttcagtcacatgaaaactaatatttttttaatatgttttcttggaagaaaagaaaattaataaattaaagagtaacttaaaagcatattgtatattcatataaatacttttaatataattattagtagttcgataaagttaagtttaatgttaatatatattatatattacaaagaacaaaatgcagtcagatggtggagtttgtgggggtttgagaaaactcataccagctttactagatagaatattcatcaaacaaatgttacaaagtcccaaaaattttctcacttctcgataagattttccgggaaaaagaaattaacattttaacgattttgacagccattaacatgccaaaatgtactggttatattttatatatacaactagtattagacaaattacata

SEQ ID NO: 221396 - DNA, 1711 bp, Cannabis indica
ttttgtcgaataatgaataactcagcgttagctatccagcgtgttcttcagattcatcacaaagcttcaagtcaatttcttaatacacaaaaatcgatcatgtctttctctccaaatacgatggtgtctgtacataattttttcaaccatactttggttatgccaattagtgagttccatgaacggtatatgggcctcccttcttattttggcaaagataaaaaagaactttttcagtaatattaaagactgtattttgaaactcatcaatgcttggaatgataaactcttctctataagaaagaaagaagttcttttgaaaacagtagtacaatcaattctaacatacgcaatgagttatttctgacttccataatatcaatgcaatcaacttgaggctatgatggcaaatttttagttggggtcaaattagaatggatcgaaaattcattgaaaaaattagaaattcttatgcaaataaaagtctaatggaggcatgggcttccgttcctatgtacattataaccaagcattattggaaaaataagcttggagaatctttgaatcatcagattcacatctgagtaggttgttcaaacacagatatttctttaattgctcttttttggatgcaaatattgggcattctccttcactcacgtgccagagcatctgttggggaagagaattgctcctcaaaggtcttcgatacaaagttaggaatggtcatcacattaatgttattagcaaagatccatggatccctggtcataatgaatttcgcccactgtcttattcgggacctctatcacttaataataaagaatggaatacaacacttttaaatgctcactttaaaacaattaatgtgggtcgtattcttgctatccctttcagtttcttcccaacctctgatcggcttatatgaaatttcaccactaccgatatgtacacagtatagtcaaggtttcacttggctaccaatttggaagaagctaacgcttaaaaaccctgtgcttctcacaaagactaatggaagttcttttggaacctaaattttcctttgaagattaaaatttttgcatggaaagtcaatcaaggtgcctttccagtggcgaaaagtttacaccagaagaaggtaatttgattcagctacttgttcaaggtgtgcacatgcttggaaatcgattgggcacactctattctgttgtaagcatgccaagactgtttggaaacaatttaattttcatattgattatggtaaagctcaccaattacacaatagtgaatatatatttcatctctcaactgtgcaaactaaggtagagatagaacaaataatttgtattcagtgggatatttggatggagcgaaacgaagtcctccatggtagcactagtagagatggatcataccaggcaacatatgtgatcaactatttggacaactatattaaagctattagccattctcaaactcttacatgactcagctttgactgcctttaattgaccaaaagatggtgttccatggaaaccaactgacctccatggcctcaagctcaacatggatgttgccgttaacttaaacactaacattttgggtgttggagcaattatttagaattctgaaggtgatgtaattgttgcactgtctaaaccagtctaaggttattttcaatcagacgcaatggaagcgaaggccctctttc

SEQ ID NO: 221397 - DNA, 2720 bp, Cannabis indica
atggggtaatagattcatcacacttctgaaggtatgcatggcaatactttctggtatgatcaagtttgccacaataaaggcaataatcaggcagcctttcatacttaaaatccagccatttgataaattccttacccatcttaaagaaacgaacattaatgcctcgcctgataggcttgttagcatctataagcaatctgatacgaagatagggcccagtcccctccttcacagtggtattatccacttgaattagatcacccacacccgaagcaatgattttggctaaatcaaaggacttacaacggaaaggaataccatacacctgaacccagaaaggaacatagtgaagctgatcaggagtaatgggaaaagaggcatcaagagcagcaaaaatggtgagactctgggcaaaatgccatggctgtccatcaagaattctcctcttatcaccctcacaaccaaaagtgaccagaaagagcccatcagagtgttcagagacaactacaggaaacctacactgagaggtccagacttgagatagagttttgatcaaggagggtcgactatagtgtttgacagtgaacagttttaagagaagattgatattatcagtggaatcatcagggacatcagcaagggtataaacagtgttttcatcaggggtaagggctaaagagtgagaagggaaaggattaagagcatccatcgtagaactaaaacccagaacaattacacagagagagaaagtacagaagaaaaatggtgaaaaccaaattgacctaaatctatctttatataaggaataaaataggctatgaagagtaccccttggcttgcctctggtcatagcttggcctctaacctgggtagatatcatgattactccattctcccaagcatcatcaactctttcgattctcctcgccgccaccttaatgaaggaaattggatttaagagatatctggtgatttgatagttagatacttggtagaagaaaagagaagataataaatgcaaatgcaacttaagagctaaacgagaggctagaagataataaatgctatagaaattttggtctgaagaaagattttgaagataatattcgtcaggaccattaatgttgtaattaatgaaggaaaaaaagaaatgatgaggattaaaaccccaaaagaggtaccagataccaccacaaaaccgatttgggtggaccaaaaacccagtttgggtattggagggaaaacagagagcatgcatcctgaaggctctagagaaatcttgcatttttatatttaattatttatttgagaagatattcaagccaatatttcacccacatcacaccttccaacctcataatttcttacttccaaatttatgtagaacccacataattgattttcatttttcaataaatttgtgaattcccaaatccctctactaaacacaacaataatatccacatcactttaaaatcaacacataaaagtgaaaacgacattaataaaaaacgacagcaaatatggaaagtaatagaaccatttcaagcaaaaatacaaaacaaacaatacaagagtaaatataacaaatagcaatgcttaccatgcaatattcaatttcactagtaccaaaattttaaattctccatatattattactgaaagcatttatcatttttcaaggttgatctttatcagggtattgaaacatttcgaaagaaagattaacaatattgaaacctccatcgatgataaggttatgtacactcacgtaccttccctcttcactagctaagaatagagaagcattagcaacatcctctgccttgagcgtcacatgctttaagttcgcagccgagttcaacaaattctcgagctcctcctcatcaagcttacaagtggccttagccattggcgtggccacgccataaggtgacaagcagttaactctgataccaaactgtcccaactcaacagctgcattttttgtaaggcctaccacaacgtgctttgagcatgtgtaagcgtgtgagttgacaccagcaatgtatgagcttgcactcgctgtcgttatgatgctgcctctttttgcagggatcataacctgagcagcgtgctttatgcaaaggaagacaccagttacattcacactcatgacgcgctcaaaatcagccttctcgttgtctataatctggggcttttcttcatctattaccccagcattgttgagcattatgacaagttttccataggtcttccactgctttgtccacaacattcttgatttgggatacgtctgtgacatcatagtggacaaatatatacagttgttttggcctaaggattggctgaccaagtggccaagtttgtcctggatgtctgctatgactactttagctccatggtgagcaaagactttagctgtacattagccaataccactggccgcccctgttataagagctacctttccctctagtctgaaatatttttcaaagttgctaatgaataagactatttatccataatcaattaactattgcaaaagtttcaagtgattacacagaagaagcaaatcaagtaccttcttgatgctgcagaaattaacgatgaagtgcttcgtagagagatccaatctcgttaattaataagtcttggagccaagaaagaagagcagcaataactaacaagaacctgttgagtcattcaaatagaatatg

SEQ ID NO: 221398 - DNA, 2219 bp, Cannabis indica
agttaaatgtagtagctcacacagtagctaagggacttgccacttcatttgacaccggttattattaatcaatcccatcaaattgtcttatttaacagaatgagtagtagggtaacatgatatcaaactaaataaggataattttaatgcacgaaagtgaccatatcatcacatattattacatagatgagatagaagaagaagaaggcaataaaaatgatgaagtgaagtgagttagtcgagcaaaggacagctgaatcggctatcgacaaaggagagtttctcagctcttgtaacagcatctaaaggaagaggtatgaaacttccagatggtccataaaaatgggggaaactattcgactcatccgctttctcatataccaatccatccccaagctgcaacatttcacatccccaattcaaaaatcaaatcaaccaaacaaaagatgatagtgatgatagattatagaccttgttggcatcgatttggaggaggtacagctcatggttggtgttgaggaagaaattttgcagagtggactgtacctgaatttgaagattacaggattagattaataataattagtgagagaagagaagagaagagaagagggtttacctggttatgatcgctaaggtgaatgaaccgagaagatttatcaaggtctccgccgaaagtagagccatttctctgcaactcttcccattcttctgctatgctgatccggtacacaaatttttcctctcttccatttccacccattttctttcaccttcaaaacaattcgttttgttttttcttcctcagactttatcttgcattttatttgtttttattcttcccttttaaattttaaaataaaattaaaggcctgacttcttcagattcaatttctttaacctaattttttttgtgtccattgctaaatcgagaattttggcatgtcacgcgtattaagttttttgtcatgataagaaattgggacgagttggcataaaaaaatataatttgaacatgacaccgtaaacacgacacacacaaatttgaaggcacaacgtaaacacaaatagagtaaattaaaaccacaaccaacatgttaaaaactcttgtaattttgatgatagtggtaataataatatatatgtatttattaataaatattcaaattctaatcattctaattaatttttttttataattatttataaagtattgttaaaaaaatagattttttttaataataggcattttagggtatcattttacatttttaccttagcaaagaaaattaaataaaaatcaaaatcaaaactttttatttttaaaaatacgatgaagcttctccttcttcgttacctagccgaaccacacccatctccatctccacaattttcattctcaacccaggcaattcagctccaacgataattgaccaaggtggaaaaaattgaggatgtgatgagtatttattactcattattagtcattattagatggattagtatttattttgtatagaattgatgtattttctccaagtgtgtaggtttgtgctgaaaaggcattttgtgatagtctgagatctttaagcccatttttgacaatgatttcatcattttctcgaagagcttatgaaacccaaaatgatagagctcgttcccagctttccaaaacatgttaaattacctcatttgaagttcggacacaaaagttaagcatgattaactgagcaatgtcgaagcaaaaaaatttggtgttgtgcctatagaacggggggtaagcgctatagcgcacggctggaaaaaaaatattttttacggaaaaaaaaaataatttcagcacatgagtatttcgggatttgttttttcgcttaggcgctatagcgcagcacttatcattttttttaaaaaaaaaatcttaattctaagaggattgatctatctctattggcttatataaagaagcatgtaaatcgtattgaggaggactagagagagagaaacaagtaattttgagattagaaaacacattgaagagcaagatagaagagacttcaagcaatcatcatcaattaactatcatcattagagttttcttcttcattcttctttattctttgcttagttatttaattatgaacatgattattgtggttattatgtttgtatttatgaactaaacactcattctagagtgttgatggaactattttagatta

SEQ ID NO: 221399 - DNA, 2077 bp, Cannabis indica
gagagaaagagaaagtgagctgagaactttttattagtttattctaggatttgtttgtttggtatagagtttagaaaaactaaaagtttctttttaaaaaggtagtgataaaaaaatgtttagtaagtagttaaaaacagcccattttaagaatttatagagatgctacagttaaaagctaaagttagtacaatccaacttttaaaaaaaatattttagattaaaaggctttataataaattattttatattaaaatatatttaattatttattatatacttgatttattgttacatgcattacacgtatattttattagtgatgaagaaacaaaattcttttattaaaaataaagtgaaattgaattgttttcattacattgcgaaaaaagaggagtgacatatatatagacacagtaatagactaactaatttaactaactgaaccgactttaactaactgagttttaatagcccccttcaagatgaagtgtataattttttatattcatcttggatacaatatagtgaaactgattagggaacaaaggtttagtaaagatatcggctaagttggattttgatgggacatggttagtcttgatggtgccattgttgatcttttcccttatgagataacagtctatttcaacatgtttggtacgctcgtggtagactagattctatgcaatgtgaagagcagcattgttgtcacaaaatagagtagatggcagtcgaacattgatgttgaattctgagataatggagtggagctaagtaagtttgcaggaagcattggccatggattctctgcttctgtagaagagcgagatacagtttgctatttcttggatttctaggaaatgagagattttccaaggaaaatgcagtagcctgaaattgatcttcgtgtgtccaagcatgatccccattccgcgtctacaaatgtttgaaaatggagtggtgtaggagctgtttcatagaagaacaggccttgtctaggggtgcctttgaggtattgaaggacacggttggcagctgtgagatgtggagcacgaggtgtttggaggtactggcttaatttgttgacagcaaaggagatatcaagttgatggtgaggtagagtagcttcccaatgagacttcgatattgagtaggattgtcaagtagaggtcatatttcattatttagcttgatattgggatccataagtgttgtgactggtttggatccgaagttccctgtttcttgtagcaattggagagtgaatggtcgttgagtgacagatatgccattgttgtttcgagctattttaagacctagaaagaaatgaaatgaaccgagatctttaagtttgaaatgtgagtcaagattattgatgaattgattgagggtagggatgttatttgtggcaataatgatgtcatcaacgtatattaaaattgctaagaatacattatttgagtttttaatgaagagtgaatggtcattcttggactggatgaatttttgttggagaagagttgtgctgagtttagcaaactactttcgtgaggattgttttactccatacactcttctttagtttgcatactgcattgttgggaatggggccttttggtttgtatccttgaggtaatttcatgtatatgtcctcatggagatcaccatgtaaaaaagcattattgatgtccatgtggtggagatgccactgtttcattgcagctaaggcaaatagtagctttagtatgttgaattttaccacaggggcataggtttcgaagtaatcaatgccttgctgttgtgtgtagcctttggctactaggccagctttgcatctttcaatagattcatgtgggttatatttgattctataaacccatttgttgctaataatgtgttgtccaagaggtagtgagacaactatccaagtattattggattctagtgcatcaatttctgcgtccatggcttggttccatattttttctttgcatgcttgagcataagaagtttgttcaagtagctgatatgtagcaagtactgctgccctgaaagcaggagatagtttatgata

SEQ ID NO: 221400 - DNA, 4651 bp, Cannabis indica
atgttagtcatgatatttttctttgttacccgggtgaaactgtttgacatatcttatgattcgtctcataaaggtagagctggcaggtatggatcaaaatttcctgttggtgaggtgacttgtatggatgctgagtacctgcctttgcttcattcatctctgaatgctccatcccccacactagaggtaaatttatgactaagctagcctcttcatggaacattcattaggactccagtgcttgtgttcatattaattagatgttcttcattttttctgaattaatgtgattatcataatgcagagagctgggttgtttcctaattttgatctcatatttacatattcacgtttgcatccaaaaagaggcttatatgagatactagtaagttcattgtttatttcttttttaataactatgttgttttattgtcatattagttatacggtatgacagaataggaaagagtaccgtatcggaagttaatatttcttaatcattttagggtaaatactattttggaccctgtttgcaaaagttattaattggatcatctgttttgttaaatgataaaatagactatatattttccaaagtttacaaatagaatcctgaactgattttttgtcaaaataaaacttaataataatctgatatagagatgttatgacaaaactggttacattttctgtatctgttcgtgttaaaaaataaaattattgaaaattgatgagggtcctatttttaccattttggaaatataaggttcattttgtcatttaacaaaacagaaaatccagttagtaacttttgcagaacacaggtccaaaatggtatttatcaaatttttttaatttgacaagattttgacttttgttatatttgcctattgaatgattgtaacaaaattcgatatataattgtgcaccactggtaaatgtactcttatcgcattgcccttattgagttgaaaattgatattgaaactatacaattacgtatttttctattccaatgagaccaagcctttatgtttccatatgttgatcttcttggtttttctactttctttgcaggaacattttgtagagaatgccaaattatcatataattattttattgctgattgtgaagatatgatggtatgaatatgattattctccaattgctcctctttttccaatcaattgagtcatgcctaagtattgtttttgctgtcagaaatttgaaaaaagaatctgaaattgttctgcactttcatatttgcaatcaaactttgcccctttttgtacttgaccagaaagttgctgctatcatcgatgagttacctcttggcttacatgataagtaccttttctgtatcaggtacaggagaactatcattctatagaactgtttactcaacttgtttgttattgttagaaagaaaaataagaaattataggcaataacctacctacttgggttgagacttgttaatactctttaacttgcagcccagttgacgtggatgatgaaatttcatctcaaggtcttacacaggtaaagatcaatcagtagttttcttaaataatatctactttaaaacagaagcttatataaccaaatctattgtggttagtttgctgaaaactatgcgaaaaagggcattgttcgacttcgagaaatattcacaccagggacacttcaggtgccaaaatcacaagccggacttaaggaaatcgaatccattcacaaggtatttatttccctttttctgttttgttatcagaaagccatcattagcttctacaactcactctcttgatcaaattaatattatttaataatcttttaatgttttcaatactagcatctaaaatgatacttctatccaatttgaatatatttgcattgtatgaatttcaaagtaatctggttgttgattcttcattgcttaaatgccctcctgaaggtcttggatctttatgtatggttgagttatcgattggaggattctttcccagatcgtgaactagcagcatcacagaaagccatctgcagcttgtgagtcaaaagtgctcattatacattttgcggtgtccttttaacagtatttaacacagttctatataatttgcaggcttattgaggagttcttgaacaggtttgggtggcacaagccaagggctagcctagcaaatttgaagtctggttcaacttccttgttatcccaaaggattaggaaatatttatgacaccattttttttcccttttaacttcaatagtttcttttacagatttattttgtaactctcaaaagtatatttacatgaaatacacgaagagttatttagtggctcctaagtgggtactctacttgctcttgtattctcaatctcaatgtccagctgatcaatgttctcttcatcatctcctgttttaacaataaagtatacatgttttccaatgtgaacatgtaattaaaatttctttttattgatcccaactcgttacatttactttttcatgctctaaattcgttgtaagtgacttgtggcagatgttagcaactcaaagcgaaccacttttcattacaaaatggtgaaatgaaccataaacataaaaatgcaaacacaagatatattaaaactaagcaataaaactcttaacagatagttgtgccagttgccaaattgttcacaaacttacactgttttgatcaactaagcaattgtcttacttatcctcaaaaacaacttctcaatatcttctttttcctttaccatattcttggcctcaagttccttcttcaacctattataaacactgtcctgaggaatcatatcctttgaaatcatttccttaaagaaagaataagcatattcaactctcccactcttgcaaagcccactaatcagaatataataagtcgaaaattcaatagatatatcattgtcaaacatatgattgagcagaaagtgaagcaccttcatcctcctcttcttgcaacacatctttaacaaggcagcataagttttgaggtctggtttgcaagattcatcttccattttcttaagcaatttcagagctttctcttcttgtgaatggtcacaatagcaagaaatcaatgtattgtaggttaccacatctggggtagctccttgctttgacatatcatcaaacacatcctcagcatctttcaaccttcccgctttcccaagaacgaaaatcaaagagttgaaaaaagaagaatcaggaatacagccatcttttttcattttcccatatatctccacagcttcatttatctgttttgccttccctaaagcatgcattataatagtgtatgttacaacagttggagcacaatctttggccttcatttcatcaagaatggcatccacatttcgaaaatccttttcacgacagtatgattcgatgaaacaagtataagtaaatgcattgggttgatacccatttttctccatatcctccataaccgtcctagcagtatcaaacttcctaaccttgcaccacccatgtactaaaatgttgaaacttgcagtattcacaagtattacatccctaaactcaagaaaaacttcctgggcatgctcaacactattctccttaaccagtgtgtctagaagtatgttcaaacctaaaacatccttgcttataccaagtctttccattcccctaaaagcagctatggcttcctcatacaaatgagctcttgcaagtctcctaatgacttttgccattgtaaccaacgaaatgtaaccatccaaagagctcattacctcaatcaattcccacatatgcttgaactcatcggcttttcccaagatatcaaccattagattatatgattctggggaatgcctataacctgtttgtattcctgcccaagtgaaaaaaccaaaagccgaaacccaacagttgctaaatcgctttaaaacctgttccactaaactatctgataaatttaaatcacagccatcaagagcttgagctacttctttaggagaagcgtacctttgcttaagaatattgctcaacttatcgatatctgactcggtaatctcgttgagaagttgtttacgggcttcaagttcaacaagccttcgacttggtgattcgacccattgagcgagggaaggaataacaaaatcatcgtcttcggcgttgtcatcttcaccagtggcagttttagagggaacggctttgacccaactcggaagctcaggtgattcagtgagttgggttgagtcagtgttggtgcatagggagttaaggaagaggtaccgacgcaaggcattggtattggtattgggtttaggagtggaaaggagcgttgtagctctctgcaatttcgagagcatcttctctgcactataactctattgagcacttagctctaaagcatatatacagctttatacattttgaaccgggcaattgtcatgagttctactctaaaaatgttaattattcttgaatttgtttaaaagtgttcaattttgcattggtcaaaatttggggcaaaatgctaatttataatgaaaattcaacatttatataatcgaatactaatttggaataattacataaggcaccattttttgtaaaatatttatatttttacgttcaaagaatgtattttt

SEQ ID NO: 221401 - DNA, 2301 bp, Cannabis indica
attaatattttgagataaattatttgattcatcttttttttctacttgaaattttttatatttttatttagtgtattattcaaataaatcaaacaaattaatacaacaaaaaatataaaaaataattatcaactatgtgatactagttatgtcgatcaacatatactgtaggataagtcaagtcgacacatgaataaaattaacagatacgcgaatatgatatgtagacacatgaacatgataggtcgacacgtggatatgataggtctagttatggttgagctttcctgatacaaaatataaataggtcgagttagaattaaccaattagacgcaccaactcgcatgacacaatcacaagaattatcacccactccaccatcttatgaattactacaataaaataattcaatcaataattatatagtttttcttctatttcaaaaaataagggtctagagatcaaatatttatgagagcttgagttgagaggtgttaatggtaaagagttattcttgtatgcttctattgtggttgatatgatatggcgggcctataatgataagatacacaaaaataatctgaatatcattacataacatatcaaatctattactcattgttatgcagattatgtttcttgtattttaccgccttctcatgctaattctacgagactttggaccctgtccctgaatgacttgataaagatcaattgcgatgctaaggtaggggtgaggcaatgtgtgtggtggctttggctagaaaccatcagggagaggttctatgggagactaccaactagctccaattttctgctccccttattggtgaagtgaatacttgcttactggccttggagactgcggtcactatgagacaccattttgtgtattgagatcgattctaagattgttatcaatactcttaaaggaacttgttctttgtagagtattgacaactacattcattaatgtaatactctctaatttattttcaagttataatttttcttttgatctagatggtgtaattttgcatccttaataggtagatgtttgcctaaaacttaactcatgattgatttatcaaaattaccacaaaatatttaatgatcgggatgtctaatttgacctaacgcccttggacaccatggacacccaatcgtgatggaagaagatgtggactgaaccaattctctccaaaattaaacattttctttggcgagcctactatgatattctcccaactagctacaacctgcataaaaagaagtctttgcctttaccaacttgttgacgctgccaataccaagacgagaccctagtacatgctctcttcagatgttcaactgtctagaaggtatgtaaattaacaagttgtttgtttttttttttttttacatttatatctaatcatgcctcactaacttgtatggatttacttcacttggatgctagcaccttcacagctaacaactttcagttttttgtttgtttgctttggaagttatggcattgaaggaatgaatactcacatcacaactcagttttggtacccaccaaagtaatacagttgactgcagactacttggaacagtatcagcacaacaatcgtcaacataaatttgttactagtgtctcaccgctacaagcatcataccgtgagcaaaaaaatccatcctaccgatcaaagctcaccgtggatgctgctgaaattgaaaaaaaccaataaaatagattttggtatggctatttacaataatcgcagtgaaatacttttgactttggcaactccattgcggggactccatgcacctttgataatggaagctcatgccttccagattgtaaaattcttgttgactatatttgtatcaatattactcatcatctccaccttaacagatttgcaatgaagattcaaagcttgttgtcttcttttcctaatgctttcgttagctaatacctcgagggacaaatgaaatcgctcatcacctttaaagttttggtttttctatataatgttgtattttggactttggttatctttattaatattaaaattttggatatggtgaatgggtttcatctcaaaatcaattggcaatgagaggagtagctcattcctcttatatattttattatctttccacacattagcaatgtgggactctttaacatcccccaacgctctttttgctctactttttggatcggtattttcggtagctctctttttttcgcttactattcccgaatcacaagtgacattttttgacttttggctcttggatcagtt

SEQ ID NO: 221402 - DNA, 3908 bp, Cannabis indica
aaatctaaacacaatgaaaatgtaattattttaaaattatttacttatcgtattttgttttacaaatgaaggatccttctcttttgcattttgatttctaaaatccattgtggtatttaaaggattttttttttcttttcaaattatgcatttaaaatggtatttttgtaaagtaaggcaaatatcggggtgtcacaagagagatgcttatgacaaagagagaaataatgcaaaaatgagtagtcatcatcaaaatgttcctagctagtaataaaatagtcttcatcatcataatcggcagcggcaggaataactacaaagccaaagccacctgaaaacacaaatgaaggtcatgaagatcatcaacatagttgcttctctgatcatcatcatcgtcatcattaagttttggatagtttcatcggtgcaagatggaaaatgagttttttagattgtctagctaaacaaattgttcatctatcagttaattcatgtaaattcacattggtcatccagggaacatggattaaggactcttgaaattttggataacaaacttgttataaaatctaacaatggtccaagttcactaataaataattaaataggaccaagcacttatagaagacaataggtggagatttgtaatattgtttagtctaccaaatgtagagttatttaaaatgtcatgattaggggttagggactggtgtcctgtcagttaatttagttgctgagctgagctagatcgaaggctttatataggtttccaccctaattcatttggcacaatcttgtaagacactttcatatcaataaacctaaaggtgtaattattctaaggctcaatagtcattgttttgtttgttgtggttgagtgaaagagagatcagctgagttgagagagacttcacataacaacattagagatcatttgagttgtgagagaatttgcataaaaacataggtgaatgaaattaaatggtgtttaattggtttggtaggttaacttattttgattgatacactcaattattttagttttgtgattgtcacctacaatttgattggaatgaaatggaatgattgtgttataacttcttgtcttgtgtgaaagaaaatcatatgtttttttgagaaacactaaaaggtactcatggtgcctagcatccttgtgatgtgtaatatcattattagtgcaattcaatacaaaatctcacatattttactttaataaaaattataaagaattgctaaccaattttaagaccatagcaatgctcatgatattttgtataatgtaaagggttccataataattttgacataaaataggggtgaatgtgaaagtaaataacttgataagaatggaaagaataacttatgacttattagggtttcattcatttgatcagattgagagaggagaggagccgctgtttccttctcagtttctctattctgtcatcggagagagactgaggaaagtaaaatgaagactattctgtcatcagagacaatgggcatacccgagggagtcgagatcagggttcacgccaaggtcatcaaggttgaaggcatttcttggtgactttctgataggccttagttattaaataaggggtataagggtaattgtaatcgggtaatagtactatatatgagtgaatactgaaggaaaaaagggtgtgaagaatttggttttagttagtaactttgggagagaaccaggctctcgaaatcctgggttttaatgaaaggcattctgccattttatccaaaaactatcgttctttctctattttctgcaatttattaatcttgataggaaaattcctatcaaatggtatcagagcacaagtccatgggacctgagaaggacactaatatggagctactgggtgtaagaatggaagtcttacgctcagaaattcagaaggagatttcagacgttagatctcagttggaaaaagaggtttcgaaaacacgagctgaaattcagcgcgtgccagagataatgatggctcagttaacccgtttctttgcagcaggaaaagagatggtggagatagtccccgccagcaacaaaatttgtcctcgattcgtgcacggggatagctctttgtcctcaactccgacggaaccagaggttcgatttcctccatcgatgatggctactgccatcaaggagtttcagcctcaatcagtaaacagggacggatcatcttcctcaattacaatcgaaccggagattcgatttcttcgatcgccaatacctcaaagccagtgtcctccccaaccttccccacacccgaatccatacccccacgcccaattcccaccactaggaggtaaggagacgtcacttctcagaggcgaacaaccccgaacacgtccattccaacaccaactagcagaaccaaagataagttgtgagcacacagataacaaatcccgacaagcttgcagacgtgaggaggagatggtgcagcttgagggtgaaccaccaccgaaattgatggtggtagattggcaagagatggagcgacttcgagctgagcataaatcgtttgggaatgtgtcgtgctatactcgggtgagccatatggactatagccccatttttgtttctgattcgagttccaatcgatgcgcacctgagcctcatcgacgcacaccggagtcggagagggaagagacatgtgaatcggtacaggagaagaacttgaactgcgaaggagaagatggagatgaagatgatgtcggacaacatggcaacaaacaacatgttaatcatctcgagtctccaacaaaaatgggggaagttaaagtgtcgaatcacaattctcaattaatgatcatctctagaaaaacagtaaagaatatatccagaattcagcgatccattctagcaacgaagcttgcaaagtcggagatgcacgagcagcccctgacatcgccaaagaagaaacagctgctggaaacaatgccggagaagaaagagacgcaggaagggctcctttcacgtgctttggctagggcttttctcactgtgtgggatccgggcctgggccaatctaattttgagattttacttacttcaatttgggcccaaagcatactttgtacaactcccctaagtaaagaaaatagcccattattcaagtgttatgggccaattatttggggtccacatcaaatggaggaatcccaaatttctgaacgtttggaatttgatgaacgacctctctatctcacgagcttcatacaccatggacggtcggcaacggaaccgcggctaccaaattttcccaagaaatggtgcaaaggatggcaagggatggtctgttgtgccatggggagggtaagagtggaccgacaaaatggactttgtcttctccaccctatgggattttctcatagagagacacgtgacgttgaaagagttgtactatgggaaatggtagagtccaagcagaacaaaacaagtatactgaagcttgatgaacagtcagaaagtttaatgggagataaaagacgagcgtgggaggagcagttcgaactcatcagctccatttctaacattggattgatcatactctgtgtagttcctgctcgcctgttttattgttcaagtttggtaatacaactgggagtatctgcttggttgcgcgaaccccgagataccaatttgaagcctatcttccttgctgccatatttcaacagtcacatgttcatcctaccaaaggaaggaatatgactttgctcaattggttcttcgagcgaggtcgacttattgaaaggacggtcctaagcttgaacaattggcatttattggcttggttctttgacagaggaagagtaaagtctgagactacactcagagttgatcttcttcaccttgagg

SEQ ID NO: 221403 - DNA, 3195 bp, Cannabis indica
cataaaatccaacagaaagtagcaacctccgctggaagaacaagaggttaaaaactagtatggttggtatgcaaaaagtgttgagtggcatactcaaaggcaaagcccaagcctcacactttcatcacaaaagccactgagtgggaagcaagatctcaactatgtacgctgggaacgtgattccatgtcatccactaacagcaccccaagagatgaacacgaaaagagcctgtctcgagacaaaagctcaacagaccaagtgagacaactcgtgcctacccaccatgagacgatttcattgagggaagcaccccatagcctaaggaagagacttcacctaagaggtctcatgctagggggcacttcgcctatggttccccaccaagtgcaaggtaagcagaaggcctatccatcagctttagtggtaagttacacgttgttcaaacaagaggagtaccctccacaagcccagtgcaaaccacacgaaagacccaagttccacttattaactcccaagagtggatgagtgaaaggaggaaggatttggaggtagaaatgcaagacctaaatcgatagatagctatcactatgaagggggacttgaatgatgatgaggagtttgatgaagattcccttctctcgagggagtatcaaatggaagcactcccaccaaactttaaggagtcacatatgacactagatgatggtcttatcaacccaaaataccatctcagtgtgtttaatgagctgataaagatgaaaaggtgtctaaaaaggcaaggtgtcaatattttgggatcacattaaaagaagccgtgtataaatggtttagatggctaggaccagggacggtcacatcttggaagaaactcttaaataaatttctctaaaaacatcaggctggatgcgataacattatgcctgtcacaagtgtcaccaatgtgaagcaagaggacaagaaagtttgcaaagctacatccaaggcttcaacaccagagttaccaaagtagggaaggtatctaaagatcaactcaagttttccatagccgctggcatacacattaggagtgaactgtgggagaatatgttaaaaagagagttggatggcttagacgaattttacgaaagagcggagaaatacaccatatagaggaaggaaatagagtcttaagagaagacaccagtgagtgttctttaagaagcttgtcagatctatacaaggtctattagatgctactcctgacgctcataagtcaacacattcaagtaaaacctccaacctactactcgtaaaaatcaaacatctaagatgttcctcaaaataaagtaccaccatctcagagagcattcctgacaatgaaaagttctcttatgactatagggatcgacctcccctaacagtctaaggaaagagttaaagccaaaagatagttccacaagaaagagcactcacaataacaagggggatgctcctcaaaaatagtcctaatggatgcacgaggaaactaacaaaaatcagcaaaaggtcgagtcagttcacaaaactatcatctcccttaaaaattaaaaataaaaggttgagtcgattcacataaccatcatctcccttaaaaattgaaacaaaaggttgagttagttcatagaaccataatctcccttaaaatataaaaagccaaagcaaaaggttgagtcgttcacagatgcatcatctcccttaaaatattaaaatgaaaaaggaatcgaatacgactctgagagggatgcctcactaaaaagagtattgattctctaacattcaaagtgggttctacggccacagatacaacataaggggttgatcatagcctaagaggccataagctcccccaatacaaattaaatctataaaaaggtcgagcgcaacctaaggggcaacaagatctgttatatccaacaagtaactataagaggatgagaatgctctcaaagctaatactcactcaacaaaaaggttacaccataaaaaaaagggagcctaagtgtcaaaaagctgcctcaaataagatgagtagctgagaagaggtcaagacagctctaagagttggtactcccttaatggaaaggttacacaagtgaagaggtcgagaaaggccaggtggcaaaaggctccctcaacaaaatgatgaaatctaaaaggagaggttgagaatgctcaatgagctaacactccctcattgatgtgagtaatgatccccgaaatgggtcaagataactcataaagcctacactccttgtgaagggtaacaaaaagggaaagagaaaaaaattaagttgtaaagatgaagctcaccaaacttagtctacaagaaccctttaaagaattcttatagaatagtgccacattgtgagcatgagatatagtgggagaaatgccataggaatatacattaaataactacattaggtttccctccaccagtcgttcatccctcagctggccctccatcagctagatgtccatcagctggtcatccctcagctggtcctccagtagctggtcatccctaagctgactgtccctcagctggtcgtccctcaactagtcgtcactcagttgggcctccatcagctagtcatctgttagttgttcatcccttagctagccctccatcagctattcgtccctcaactagttgtcccttaacttgtcgttcctcagctagtcgtgactcagctagtcctctattagctagtcgttcgtcagctagttgtccctcagctgaccctttgtcagctaattgttcctcagctagttgtcccttagctagccctccgttaggtggtcatccctcaactagtcgtccctcagctggttgtccctcagtcgattttccattagttgatcctccttcacctggttgtttgtcaactagttgtccatcaatttgttgtacctcagttggacatttgtcaataggctggctatctgtccactggttgtgcatcagatggttgtgcatacttctcatccgcgagcacaccaacacctcaatacaataataaggggatgaagaacgattagactaagtctaaaagacctgtggccgataacaccagccttgggactaagcgatgaagacacagctcaccaaaattagtctataagaacacttaaaagaattattatagactagggggcaagtgttgacccctaaa

SEQ ID NO: 221404 - DNA, 2170 bp, Cannabis indica
tttctttttaagtttactttttttgctcctcctcacttaccaaaaaattagacccccctcactttgaatcctaagtccacctctgctgataggctctaatcataatctagtatcatgtatatctataataaatattaattccccataatcatcatattaaaaactttcaaatactactcataataattaaactaatttccttctaattgaagtcattagtgagttaatattaaaagattacataacaactaacttgaggaaaatttctttatatgccacgtggactaatcacgacaataagcgacaaaaattagcaaacacattccaagggtcaagatttcttgtctaacaactttgtacacgtggacaaatcacaacattaagcaaccataattagcaacatatttttaaactcttcttattggtcaatatatttgagtttatttttatttatacataattagtgtattgtcgtattaaacttaaaatattaactatgttaataatgaataaacatgttatgattagatataacgcaacattatttttattatattaaacgagttaaatatgtcttaaaataatattaataaattcttgacgcattaattataattaagtagtgtttggattaattacggtttattacatttcacatgtgaaaaacttcaatatgtaatgtacgtatatactactataatcatttttaatgtaaaattacttgtttattttctttttttaaaaaaacttatggataatttatagtttctttttatttttatttgttataaccttaaaagcatcataattgattgtgtcaaaataatttcattgctataaaaaaatatactacttcaatagtgtcttaaaatatattcaaatttaattagcctttaaaaaaaatagcacatttaaaaaagtttctttaaaaatattaaaaaaaattataacaacttgagtttatgtataagggaagttttatttgttagaaaaattaataatcccaacatataaaattgtattcaataaataacactataatatatataataattagataataattatgtttgtctaactgattgattcatagaattatagtattagtaattaccacaatttgatagtgcaatacgataaactaagtcttcctccctagttctttaaatcaaaagcagttttatttatctgattattaaaagtatagaattgtgatgagacaatatatatttatatagttatggaagagagttagctacataactctaattggactggacttgctcatcaaaggctttcgttaactagaaaaacacacacttctgtttcatttagaatttatacatacagatgctaagtccattaactatcgatcaccaacaatatgggttaacacaacaaagaactatcaaatcaacccaaattttaataattaaaaccaataaaaattaatgtaagttcaaataaaagtctaacattatataatacacaaaaaaatgacataagaattggacctaataatgaaaaccgtttgcacattatattgattaagaaactacgaggttgaatgaatttactacaacaatttctactgttgtgtcttccaagcgataaataaaacagaatataagtattcttaaggttaattgtgatgttgtaattttctttcatctaattttattttaattttttgggctaaacgatctgaaagctaaacagttaattatttgattcattttttttgattttaatcttgatgtcctaattaaattacaagctattattttagttaattatcattaacaaaatttcattatttattaataataaaaaaaaaatatacaaacataatacaaatatattttgtatggtattattatatagattcttctacatagaaaaagagtgaaaattttgtagattcctttcttcaatgaagatacaaaccaaccatatatatgtttacaaaccgatttaatgtgtgttggcgtagtttccaatgccctaacttactttaacactctttttctttttaagccctcttcttcaatctttgacccatatttttgactggtcaactctcttgaccataatcccaacctacgatgttcatacccatatggcccccaccacacccacacaatcaatttttcatttttttttttaaaaa

SEQ ID NO: 221405 - DNA, 1776 bp, Cannabis indica
tcctaatttttttagttttgactcctattttattcagtatacaaatatatattgtgttcattattcaaagtctccattattcatttttaacaagattaattcaactacaaataaataattagtgtattaatttcattaggatagcataattgtaataaaatagtaagattatgattaattaatagacacaaataaatcaatctaaaaatttgacatttatcattcaattatggagagagtacaaaaaagagtttccttagcactcctcaacataatatatctagtccaaaagacgcttatctcggagtaataaataagcaaagcaagcttgtttctttcatattatttgtacattttaaaagaaaaaacctaaatttctttcaaattctcccaaaaaaaagacagctagttttcaagacaaaactcgtcgaaaggaaaaagcatgtacaacacccaaatacatagaatacataaaactaaactaaattcacttgcccttcttgttggcatcttttagttgtagtcccataagaccaagcaaattagaagcaggaccaggaaggccttcttgggaagaaaaggaatccagaaagcttttaacaaggttcacgtcggcatcaacaggagtaaaatcctcttccatgtcggctgtgctggtatttgacgttccctgcaaaatggtcaatataacatttagacaaacaaaagctagaatacagaactagtctatcatttatcttaacagcaaatatatcaatttggtttaaatagagtgtagttataagttcttcaggatagagagatcttggtaattctttttcttttgtaaacttttcttaacaaaaattttggtggtgcatttatttgcagtgtacatatgtttgttgcacagatggggattgattgattcattctttgctttttctcccacagtccaaccattcaatctaatttttaattatttacagaaagagtatgattatcaatatatatggaaacttgactgtaatagtctgtgcagagagtgagaactatacctcgtcttttttggcaacttgttccttagcacgaacaaaacttttctcaagtgtgctggacttcaactcctcattcaaaacatcagagtaagattgcataaaagtatccccaccatcctcattgccttcagaaggttctgcttcatcactttcatcttctgattcttctgtgattataaatattaaaacttgaaactaaaaagaccccaaaaaatagaactacaataatttatttcaattgtgtcctctgtttcagaagaaacgtgtacaggctgatattcgagatgtcatcctcaataacacgttagaaaatgtaagatgaacacaaagcaaagacgagacacagaatacgtttatgtttaaattatgcaacaaagacaacgagtgcacaccaaagcataacgtatatctcttttactgaaacattctacataatctcaacttctcaagccagaaaaaacatcttataagatttttccaagaaatgttgtcaacaaaataaatgcacaaataaagaattataagtgcctccaataataacaaaatatatttcttaaggaattttttttttctcaattcattctgaaaatcttgcttttaaaagaggttgtttctgaaaacaaccagggagacaatagcagagtgcttctaagagacatttgcactaataaaaaacagttcattaaacaaagctggcttattccactaatatatacgttgcaaaacataccaaaatcaa

SEQ ID NO: 221406 - DNA, 2276 bp, Cannabis indica
agatcatcatcttccctttgattcctctatctctctccctagtatatctaagactctctcacacccttgattacaagtattacaccccttttcattgcttaattaatataatgcttaaacagctatatatatagtagtttacaatgcttaattaaacttaattatgacaataattttaattagtttacatatgaaacactggtataattgtgcattacaacaaccacaatgtatattattcttgttgatgcctggaaacatcaaataaaaacacaaaattaaacacaattacgtccttagattgatgttgattcatctaggaaaatttgctctattacagaaaaattaggtctggtgaatggtgataatgtgttttgtttggttatgtagttcttgtaatgtaagctaagtagtgttctttgttttgtggttcaaaattgatagttatttatgtaattatatcttcttattttaacatttctagtttctgatgatgatgtatctttccctttttgatcagtataacaaatatttggttaatttatttagatgcatagccttcccaaataatacatgagtgtcccacatgatacaagagaaagagttaatcactttataaagctaataagaagagagagatgtgttatgttagtttgagagaacaataattctgcaattatgtatcaagtcagcctcttgtatgtgacgacaaacaatgttactttgagtcttaaaacgagaaaaaactctaccttcgataaatgaccactcttcaaatcttcctaaaaaaattccttggaaatgagaatcttcaaacaacgttgtttatgtaacttcatataaaaaaatttccttggaatgaatagtttatttttatataatttacttctttcacttactttagtaatttgttttataagaagttaaaaggaaaatggaattcttagttacgaaatgggaatcatatttgttccattttagcaaatgttggttgtcaggtttgatttcgatttgttttagagctatatacattttcctttagtttttgttataacaattctactgaggagattaacaatatttatttatagacacaaactagtcaaatcaaagcaattgtattgacaaaatgttcaaaagaaagtaacaataaatgagaaaatggagaccaagatttatattaaggatagacaatggtagtacattaacattaacaatggtgtcatgtcagcctcttgtacaaagtttctgagttccatatatacatatatacaataaaattcaaaaccccaaatcttacaactgtactgtaatcactctagctagtgtattattcagaatcacacaccacattcaaaataaaagtaagcaaattaagagagcttaagtcatcatagatgtttatttggtggtaattgagtagttgcattcttcaactcaatccaattagtcagcaataatcacacaaatcattcagaaacatcaattccactactcaatctcactatggttggtttgatcctacaaaaacagagtaattaatagcttggttatgtatacatatttacataatttcaagtaattttactcctaaccaaaagcatgcacacacaaataatagaaaattatgcttctttgaatgcgtcaagaaaacataacagcaatcaaaactaaaacagtttgatcacaaactgtaatgatgacaaatagaatcaaagacaaaaacagaatagaattacaagagaaatttaacagcaatgagacctttcttgatgaatgaaatcagtacatgagagaattgaatcaatggagaattattgatctgaaattacacatgcactcacactgggggatcaagatcagacacacttgaaccccttttacaaccctcctgccactgaattttctcttagttttctgatctcataacatgactttaaatgaaacgaaatgtacaaggtctatttatagtatggggacagttaggaatactaactaactaacccgattgtagaagctgttaaaacagttattgacacatcagaatggacaaccttaaatggctgaactaacaccagaaatgtagagcagaacatcacaaaatataaaaaacgaacatttgggctggggccagagggtgaaacaagtacaatacatgagatgcttcttccaataaatctgctataaacacacagaatctatcatatcaacctgggagtgttgtacacacaacacaacacaaccttaaacgaacacaaatcgaagactatttgatt

SEQ ID NO: 221407 - DNA, 3088 bp, Cannabis indica
atcaacggaggagtgggatgtaccactgttactcccccgcaacttatttcctgagaccaccgatcatgttagagaaacttcaacgtggcagccactgtgggacttcccgcctatcacaccagctgtggtatctgaaggaatcattcaactgaccacggcccaatatacggccctacaagagcaaattcaggctttgtaggctgaggttaatggaagggtcaggattcgacatcctcctcgagtaccaaacacgcgttcagataatcctcaggtaataaatactaggcgacaaactaataatcgcactcacagagaatgacgaactggacaggagggactcgacttgaaccaacttacgcaaagggaacaagtcgcatgaaacgctaaccgtgaggtgccataagaagaggatcccgagcagcgcaaccctcaaagtagagcccaactgcgaaatgaggtaaatgatgttgaaacttattcttcgtcctcacaaagtcgttcttctagtgtttatattaggtctggctttgtggagacaccacgaggagggagataccatgtccacaggggtgaccttcgcgatcacctcaatgcagtttttagggcacgatctcaaatgcctcgaaatcgcaatgagcctcgtgatccccaagtgagcgatcaaggcacaaataatggtaataacccagcaaatgttatcaactcgcctaacgcaccagctgcgaataccgaggtagtgatcccaactaacataactgcgattgctactgcgctaacaagaactcaaaacaacattgtcatgtcagggggtgttgatcagagtatcctgctacgagcattgaaaataatggagcagcagagaaagcccatttacaagctccatgggacttatcctttcattgaagaagtgcgacaggctcgacttcctaagggattctggttatctgaatcgctaaaatataaagctactaataatataatagattatttagaaaaattcaatataattatggaagtagaccaggtacctcaattaacgaaatgtcacatcctggcggcaaccttggaagataacgctcatgattggtttagccagttgcttgaggagtccatatcgacttggagacttttgtagatctattcttgacgcacttccaaccaatgatgacgtacaaaccgccttatacaaccctggctaacatcaagcaagaagtcggtgagtccctacaggattattttaagcgttttaatgctgaagtaaccaaggtcgagaaggcccccgagtcttcattggtgtgtatgttaattataggtgtcttgctaagaaccgatttctggaaggagttgcaagctcgaagaccagaatcgttggtagaattcttctccatggctaagccgcataagagaatcgagaattctttgggtgaatcggaaagggtgaaggagaaacacgagtcacctataccacgatcatgctctcgaagtcctagaggaaagaaccagaggtagaagcccgagaagatgcagcctcagaggcagcgaagtccaaagcttgccaagtccccttccaagaaggaaacatctccaaagagaaaaggaggaccacgctttgtcaattacactgaattggtggtccctcgcgatcatatttatgcgattgaagaaaaaaatagtcttcagaaagcttctcccaatcagagggaatcgtgacaaaagggatccgaagaagttttttgaagtaccataaggacatcggccataccactctagaatgctggttcttacaagatgaaatcgaagaattgatcagacaaggaaaattcagtaagtacaagaagaacaaagaaactcatccctaagcggatgagaatgacgacacaaataatgcgagtggttcacgaactcctcgcaatatcttaactattattggaggaccatatattggtggagattccaaaaagtcgcaagagcgatatgccaaagaagcaaaagaaaaatcactcaccaatgtaaacaatctaagtgagcgacttgagaagtttttcaagaagtaatgcgatgacataaccttcatggagagtgacgccaggtgggttcatcatccacacgctgacgcactcgtgatagtcgcaaatattggagggataatgtccaccgaatttttgtggacaatgggagttcaattcatcttctcaatttccaagcgtttaagcaaatgaggttgcaggagaaggatttacgacctgtaacatcgagtatctatgggtttactggagatacaattgcactgaaaggaatgaaaaggaaaatcgggtaaaatgtgatatatttacttgaaacaccacctcctggacaggaaattcttagaattaaggagatatcgcatgttgaaaaaccaatttggatccgagaatccttgattacactaatactgcacaagctgcagaagaaataattgaggtaccaatcgatccttttgatcatgataaagttttaaaaattggttctaaactaacctttcaacagcgagaaaagcttgtcacttttctcaaacaaaatctagatattttcgcgtggaaacattcagacatggtcggaatatcaccgcaggtaatgtgtcatcgattgaacattgacccagaagtgcaaggtgttcgacaaaagccccagaaaatggacctagaggtaccaagcgcttaaaaaagaagttgatcgccttttggcatgtggcttcataagggagtcattttacccaaactggttagcgaatcccgtacttgtgccaaagtcaaatggctcatggcgcacatgcgtcgatttcatagattttaataaagcatgtcttaaggacaatttccctttaccaagcattgaccaacttgttgatgctaccgcatgtcatgagctccttagtttcatggatgcatacttgggatacaaccagattccgatgtatgaaccagaccaggagcatacttctttcattacaaatcaaggtttatactgttataaggtaatgccctttggtttgataaacgcaagagcaacgtaccagaggctagttaacatgatgttcgcagatctgata

SEQ ID NO: 221408 - DNA, 1573 bp, Cannabis indica
tttaattaattgatgaataaaagaggtatttttcaacttacccctaatgtaaatggcatgggcctagtactgatcaatcaccgtctagatccaagcccaccagcaagtcatggataatgatatattaggtagttggacatgaacaatgttatttttattaagaaaacttgactgaattcacccttttattaatattattttaatcacaatctttactatttcttgatgccacgccattgcgttagatatatgttgacaatagttggaatgattttttgtctatgaaattgatcattatggtagaactgtggtgttggttctaataccaacttaagagcatggtacatttggaaatatttcactggctttgaagaccgttatgttagttgcttcttaatattctactatgtttgcaagctataaacagagttctatacatatgatttttggcagagagagagagacaagtgaggaagaatgagtttcgtttcaaggcttatttagtgttcagaattcaattgtggtcttgtatactttttattactccctcatcggagaagttacccttttttagaaaagttattttaaaatagaaataatttttttaaaaaatggagaactctctaattggttttatgattgtggctctgtgtaacacaatttccatatatgttactacgttttcccagtcaatggtttatgatccaaatacatattttattcatttcaataattcatatttaatgaaggttccatcttaaaaagtagaaacctttggtttgttttgtaaagaatatgcaatttcaaacagagatatttaggtcatagactagtggcaactttgttcaatataaaattgcttcattatagtgatatttctctgttttcatattatttcttataataattaagaatttacaaaaaaaataaaacaaatggttagattgcatatgcgtggggacccgtcgtaagtcactagaaagtgccattcttaaaccctcatagggtcacatgcctgcctaagccaacacctctaaccccccttagggttggcggcatgcggtggttcaagacttcgtccactagaagtctccactatcttaaagcaatggtaccgatcgcttcctttaaagatggtggagatgagcacggttccagatgactacggccccattcatacgcattctaaccatttattaccccacttggttacaggcccgcgtgactagacccggtgatgagatttcgtaaaatgacgtatataaggattctgaaaaaagtacatttgcccgatgtgggacttccaacaatatatcattcgctatttagctcaaataaaagcgtcagcgttaacagctgtatcgttttgattggttcaaacttcaaatttatttaaataaataaataaaataaaataaaattaacagtactaactgtattagtgtttgctaatatctctatatgtgtagttttcaacttataataatagagtaaataatcttcttaaaagataataatcataatgagatcgatcttgctgattatactgatctagatcgttttcgaatttaaa

SEQ ID NO: 221409 - DNA, 1770 bp, Cannabis indica
gggggtaacaaaatggagagaaaaaaacaggaagaaatttctcaaaccaagtaacaacattcattcaaaatgaatcaataaacaaaaacaaataccaaaacaccaaacccaaaacatttccaataatggttccaagaattaagggcagaagaaacaaatccatgttagaaattcaaaaaaaaaaaaaaaattgttggaattttcgcgcattctttcaaaaaacacaaccaaaagcaataaagtctaatagaactccacaaatgtaagcttagtttagaaaatgagaaatagtgaagagaaaaaggagaccaaccaacagaagaggggatatcagttcgttggattagaggttttttgagccttttgtaacaataagcggcaacccttatggcagctgaaggtccttgactttgagagagggtttgtgagctgaacatagctggcttcttcttcttcttcttctccagattggccaaagttggttcttttgagtgcagagaactctactaagcattctgcttaagaagaaacggttcggctgtgtacccaatagactggacccaaatgggaaacaaacaaaaaataaatacgaagtaaatcagttaccaataacagcaacaattataaaagaaatgttttttttttttaattactatttattaaaaaaggttcgatttttaaaattatattctagaaaagtttataaaagtaacacctttataatttaaattattaatattaattaatttttagttttgtcaaaattaatatagataaggactattttctcgatatttgaaggtatatttttgagaggatgcagtaacttttgttagcatgactttcattaaaaaacaaatggttttgattttttttccttaaaacaaagacattattggttgaaaaaattataataaataatttttctttttttgaaatggaatagtaaataaattttatgcaagtaagacatcacactcttttgggtgtttgcttgtgatttatattagtgacctgtccaattttcgtcctttgacttttttctaaaatcgcataaatttactactctcatacaccaacattttattggaaacattgggatattttctcattaaacaaaaattagaagtttttcaaacctgacattgaattatacttattatggttttaaatgctcttgagcatttttattgctacaataacaaatattgcatgactatcatggtgtttagccaggttctaaaccaagacgaatcaaacctatatttagaattcactaaacaaaataattttcttctatgtaattttcaaaatactagataaccttacaagaagggtccaattcaatatattagcgtcctataaaatgtcatattacttttggtgtaatttaattactgatcttacttaattactttaacaataattgtaaaaaaatgctaaccattaatcagaggtgctaggcaccacaacacacataatagcaaggctcattttttatataaaaaatcactgtccactcctaaaacctcatctcccattgatgacattactgcttaatagtaatgttattttataagaacattattttaggacattaaggtatttaacactactataaggtaacatcttataattggttaccgattttttataactttcaataaaataaaataaataaaacataatattaaattgcaccaataatgatattacatctcacaaatatgttaactatgcacagtgatgtcttttagcatttcttatttt

SEQ ID NO: 221410 - DNA, 2507 bp, Cannabis indica
tgaaaatatttttatttcacaagtaactcatattatatccacgtatttcaaataaatctccgtaattaacaaattacgcttatttatccactaatcaggtcttccttcaggatcaccgaacctgaaaatatttttatttcatatatagctcatattacattcacacattctatataaatctccgtaatttataaattacgcttatttattcacttatagcaaaatttaaattttatgctgaaataaataagtaggatcataatcccacttattacctgattaacacataatataaatataaaccctaattaattaccattagacctatcgggatattacagcactagtggttaagcagagacactcagcagcgaaacattcactagttcattttatgctcctcctatacccgaactagatgcatgtgatatcccaaccatgttgctatgttgagtgttcaactgttggagaagtttctttaattgttgttgagtttggcattttatttccttagactattgaagtctcttctccaccaaaatcatttgctataatcaattgttgaccgtctcttttaggtagggcgtggggtcttaaaatattgtgtctgggtggcgttcctccccatgcctctaacacgtctaccatgttcatttatggcaagcgccagggttagaatatctttagtgcctttgagcactagtgttccctcgttgacgtgctttttaaggtcattctacatacaaaattcaagattaaattagctacacattgtgaaaaaccattataaatttgaaattctgaaacaaaaatatatagaatttacaattttatccacgacttttgtgtctcagcatcaaactcatccttcttgttcttgtacatgttgatccacaaattagcttgatcaatgtcatttgtaatatcccaaaaaatattataatatttaatcagacgtattttattaaatatgtgactttatggatattagagtaggattataattttacttaagctaattataagttaattagtggaatttgagtaaatgaataaataaagcgtaatttattaattacgaagattttatcaaactatgggggtattatagatacgatttttgaaataaaataattttgggtttgacggctatggaaactcgatggagtggtcagaaatgtcacgaaaatagaagttgagatagattggattatactggacttgttagtatttgctagatagtggtttagtcagggtagttagaatgaccaaaatacccctaggctttaatttatttaagtgttgagtgaaaggggcaaattagtcttttcactaggttaaagttttgtcttttatggatctactttcttagctaaaatggaatttataataagttttatttatttactttaagtgataaaaataggaaataagagataaattctaacttagcaaaaaaaaaaacaattacactcaaagactctctcttccttctcacctatttgaaccctagaaaccagcaacagcaaagaagatttctccaccaatttcacaatttcttagctgaattgacaaggtttagggattgttcaagcttggatgtaagtcttatgtcttttatcctttaatttcttaggtttgagttgcgttttgcttaggatttagcttagttttggggctgtggatattgttggagtttagacatatttttaagtttaaattgatggtggtttaagattgaattgagtggaattgaaggttgttaggtttgagttgggaaaattgagtttaagaagtcaattttcactcaactatagtattttggttattttgatgaatttttgagttttgattgattgtatacattgtattcatgttatagaattgttctatgaagtttgagaacaattagttagatttggaggaagttttggggctttgaagatctaaaatttttgagtttctactgtagtgaatcggaattctggatggtacagggctgtaccaactggaatttcggatggtctgtttcgggaatcgccgatttctgtattttggccataatttttcactcgagtgtccgttttagacattctatatacaatttcgaagcttatgaagagctctacaatatgagacatagattagagccaaaggatgtattttattttaaggtgttttcaccataagattcagtagaaaaccctaggttactttatgcatgttttagatagtgttttggaatagacccttactcatttactgttgtcgtgatcatcgagaatcattctactcaggtcagcccgcacacctcactttggacttgaggtatgaaatgctttatgcactactaaacgtgttggtaagaaacgattattatcgtttgtgactcaattatatatgatcgaggtaatgaagtgtatgttgggttttatgccctaaataaaactcatttaaatataatcagatttacttattaataaagatcagaaataacattttatgtt

SEQ ID NO: 221411 - DNA, 1142 bp, Cannabis indica
aaaaaaaaaaaaagaaaggaagtaacaaattactagtgtatttcttccaataaaatcaataaataaaattaggaagaacttctaatcttgttgcttatctcatgttttagccaagtaactttctcttccaaagctcatggtttttggaatcaagagatttctctcgctttaagcgcattgtataattgatgtatttgttaatacagtagataatccatttaagaatactttatttaaaaataacatttaatttattataaaaaaatcaagtctcaatttaagtcagttataaataagacatctaaattgtaataaataatatattttctaaatctcttattaagaaagtatatctctatataagaataattatatcttaattaaatatatacatataatttataaatttatttatacaaaactaataattttatttgaattgtaatacatgtataaagattatagttactcaaaaataattttattatgatataatattaagaattgcttattgtcattattgtttcattgatattttttggcgtttttaatttttctaatctaattctatttagttataacttagttaatttcaaatatatttttaaatataggttctattgtatgattgttcatgtttaaatgaaatgttttctaattttttttttaattaaaaaaaaaaaaataagctacaaagaaggttgccatccccaaaaccaaccaaaataaactatttgtataattaattatgtctcccactaatttttagttatttatcctaatcctaattatttaataatttatttacgtagttaaatatatgttgtttggtgtctattgtaaaaatcattttagacaaaataacaattttaggctggcttaattaatttaaattattccttcatttaactctagtaaccaaaaaaaaaaaaacaaacaaacaaaaagaacaagaattaaaaaacaatgtacttaaattaacattgaccctaaataattaaacaaacaacccaactactgtttttcaagtaaaaaattaaaaactactaaacatcatttatttgtttttcaagtaaaaatctgttttttaatttttcttatttaagagctattttttcttttttttcttctatcattctttt

SEQ ID NO: 221412 - DNA, 1361 bp, Cannabis indica
tttgggtacaatacatataaaaagaggtatgtttcaattaaatataaaattagagataaatttgattaattgattaataaaaatagtatttttcaacgtaccccaaaataaattgcatttttacggaactacagcgtttttcacttttttttttattttctttttacaaaaatatggtttgttattttttagttgttcttaaaaatgttagtttttacgttacaaaaatatagaataatgttgtaacaacgtgaaaataacattatattctctcttataaaaataatagtacgtaaaaatgtaaaggaaaaaacagatcagcaaaaaagtaaaatatgagcaatattaagtgtttggtataaatttccataaaatattacttattaaaaaaataatgataaagtgagtgaaaaaataaaataattttttattattatatatcacaaaaaattactactcaatgcatactaccttatataactataataataaaattaaccaaactattttgtgaacaaacctaagaccatctccaaaagaaataaattagtaatgcaaaattaaaatataactcactaaaaaatgtgatgcaaatttattagtagaaattacactatttatgagattttttttagtctttacttttttatggcatttttaaataaaatattttgtatatgagatttatgttttgtttttccttttatgggttttatgaaagttatatttttgtaatctttggccaaattctcatattttattttttaaaaaaaaataaataaataagctacaactactgtagctaactttttgcatggagtagcttagtactcattgcttatcgccattgcttatgcttcaatcaatcacacattttgtcaatctctcttcattttcgtttcattttctctcagcttagggtttcattctcttcttcttcttcttcttcttcttcttcggtgtgctgggttgccattaacgatcgaagcaagcttcgattcttgttgccgtgtgtgtggtttcttcgtttgagatcattttcaagttagattgcttggttaactgtggtatttattcattttcttcatagtttttattgtaatttctttagtttagtgattatagttttttaatttgatgtttattgtttcttttttatttttcgtgatgtttttgccatggtcggttgggattttaggttgtttttggtattttggtgtgagttctttctaatttttaaaaaatttgtccccatttggtggctgatcattgttttatttagtttatttttgttttaagtttgtgtttgtgttgatttttttttttttttggtttggcagttaaatcttcatgatttttct

SEQ ID NO: 221413 - DNA, 2098 bp, Cannabis indica
tgtcttatatatatatatttatataaagagaggagagatgtatatgagttttgaggagtttaaatttatttggattttacaatgatagatgttaccgatttcaggaataagctagagattcaagacaagtactgtctacgtggagcagaatggggagttggagattgctcagctgagggaatgacagctgaggagaaggatagctttatttccatgctcaagcagaagactggtgttaaacaataatttatttatctttactcttttctatataaaaatgtataaatataaatagaatattctcaaatttgtagaacaaatataccatttctatccacaccaatggaactgaacgacactctcatttatgtcgttcaacacaaaatacgtgcattgcaatactaattttgccagaaaagaaaaagaaaagtctcttcaagggatgtatgtatcttgaaatgctatctatgatccatcctatccaaaccaccaagaccttttcttatatgtttttgttttgggtactcaactgtatcaaaatttgcacttcaatcaaagtaagtgcaaagataaagcaaaggaacttttcctaaatatgagactagttatcaatcaatatgtcgagttagaatctggacattattatgttcgtttttttttttttttctatatttacgacaaacaacatagtaacatttcccctgaaacgacaacgctactctttttattataaactcattttataaggtttcgaggaaataaaaaaaattaataaattattctggagaaatttgtcgaggggtattgttgatatttggtcaattaacacaaaaggacaaaagttatataataattagaaaaaggcataactattttgggagatgatccagcaagctcatcgaccatagatgtatttcggtatcccaaaagttaaaacataaaaagcttaattcgagagaaataccgaaacaacatattcgaaaagttcaattcttacacccagccccacagtttcaggtactctttctctctgaagatttctcttgtgtttggacaattttagattagggcttcaaaacaatctgtttggttttgaaccttgaacgaaattctttttcggcttattggaaatgaagcacttcttttaagcttattgattctgtgtttggggttggattcgtttatagttttcttttgctttttttttttccctatatattctctcatgccaaacggaaatgaacctcaattgtactagttttaattttgtttcactttgctttgtgggtcttttatttcgatattggatatgcattggaaatatgtgaatcgtaattggagtatttgtgtgtgagaatattagttgcagggatacttttcatttggaagtaatggtaaactgcctttatttggctgaactatgtagctatatgctaggttgttttgatcagttacatggggtatctcgttgttttcagggttttctgtcattaatttgggtatgcaattttgaatttgtgttgaggaagtgcttaaatttggaagggatcttggtttttgttagcattcttagctacagctgtgaggctgtagtttgagatttgctaaaatgtatagggctgtgcctacggcaacagccacgactcgggggggatcaccaaccgatagtgtcgattatgttgttagtttggatcaagttccaagatggagtgacgctgagcataggacttctctggaatttgagaatgaggatccttcattttctaattcatacttccctgatccattgacgtcttcatctggggcagaggctggcagcaatggtatggtttccagatttcctgttgatcatgaaattaactctaagatatatctttggagagggaatccatggaatctagaagttgatgctgttgtgaactctactaatgaggttagcctctaaatttgttatgacatgtgtcaagatgacgaaatttcaccatgttaagctatttatgtatgtttttgaacaaaagatcttttgctatattaatttcaggatttgatgtggttatgtggtttgttttatatacaataatgacaaaaaaaaaaaaaa

SEQ ID NO: 221414 - DNA, 1618 bp, Cannabis indica
agggcatcatcaaaaatctctagcatttttcacatttatttacataggcctttgaatcttccatcatggtcggcaaaaaatatcctttccttagtgctttctttgataggctttctcctactgcgtggttgccacagaatccttcatgtacttcagacatgagtcgtgcaacttcttcttttgttacacatccaagtaattgcatggggaaacctcttttatacatcccaccttctagtgtgatgtaccgtgcatctttgctcatccttctcggagctttgtttttatcatttggaagttctctagtattgaggtaggatattatgggtgtcatttagtttggcgttgtgtctatcattttgatttcttccacacaattgatactaggctcttctaagaattggatagggactaggttggccttatctgttactgtgctgctcgcaagtcgggctaaagcataaccaattgttttttcttctcttagaatctgcatgagggtgtaacccttgaattggtcgagcaggtcttgtatctagcttagataggccatcattttctctcctcgggcctcgcactctcctgaaacatgattcactatcaactatgaatcactacagacctcaatatattcggcacgtacctcccaagaaagttttagtctatcaatgagagcatcacactcagcttcattattggaggccttgagcctaaatttgagtgcttcgtgtaggcgttttcccccaggcgtgacaagggcaattcctggaccagaaagttggtctgtggttaacccgtccacgtgcgatttccatgtaggttgatcttcgttgttttctactaggggttcttgtacttgctccgggttgtcccctatgtcgctttcttctttccatgtgcactcaactacgaagtctgctaaggcttgtctctaaactggtgttaggggttgaaagataatttcgtactgacccaactctattccccatttgagtaaccccggagaggcgtcaggttttcatagtacttggcgtaattgttggttgatgtatacctgaacatggtgagcctagaaataaggccttaacttccttgtttctaagattgggctataagtgagcttctctattaagggatattatccttatggttcaactagtcttttgctgatgtagtagactggatgctagacgttgttctcttttcttatcatcacggtgcttacagcatattctgtgacagctaagtatattcctaattcttctttgtcttggggtgttgagtgtacgggaggttttgcaagttgtctttttagttcttggaaagcgttctcgcattcctccgtccattcaaactttttgtttcatagaaggatgttgaagaaaggaacactcttgtctgttgactacgaaatgaatctactgagtgtggctattagaccagttaagctttgcacttcctttgtctttgttggagatttcatatgcaggagggcttgtattttccctggattagcttctattccatgaccattgacaataaaaccaacacacttacccgagctgaccccaaaggaacactttaagcgattgagctttatgttgtattttttgaggat

SEQ ID NO: 221415 - DNA, 1714 bp, Cannabis indica
atcaatcctctagcaaagcaagcatgtatcacaaagtccaaatagttacatttatcaatcatattcaacttttccaacaaaccccaaagttaagcaccaaaaataatcaaatcaagcacacagtataaacaagttaaatcaaataaataacagtagatggtatttcagttcgctaaggtttacttatgatactaacaaaaatttaaagacacacaattaaaacacaaaactaaaaaaaattaagttcacctcccacccccccccccaaaccttgattgccgcattgtacctagtgtgacactaaagactagagaagagaacttacctggggtgcctcccaagagagtggtcgttaatgtcatatagttggacgctgaatttctcttgcaagctttaacttggataaagtccacctcttgcatccatataagggctcttgtataccaaatgaagaaaattgtccatcaatgttgctaatgtcgaagctatccataagactagatccccctccacgattcccacacatcagccttattatacgacgtcgaataattcaaaatcgttctttaggctttcctttcttcttcttgacaatcacttcttaaaatctttcactaattcaaccttacagtaggtaggaatgtcaattggagaaaatacattgaaactcatctcttcatcttgaacttgcaacataaattctctttttatacatctattaatgctctctctgtggctaaaaacagtcttcccaaaataataagaattgtttaatcttccataatatcaattattaaaaaaaatcaacaaggaagataaacttattaccaacatttaccaattatcaacgaacggtctgtcagttgtagtgcctgttgtcggtttggcttctctcaattttagtcttttaaaaacagacaaggaaattaagttaacgcttgctcccaaaacacatagagcttttatttccactgaaccccctatcgagcatagaatattgaaactactcaaatctttaattaagcttgggtgatagtttcatttgcatattgcattgcagtccttagtaagtgtcattgtctcatattcctccaattttcttttctttgctaaaatctccttcataaatttaaattaagttggcatatgctcaagtgcctctataaagggaatgttaatgtgtaatttcttaaatatttcaagaaattaaaatcgaaaggggcggaccttcttccccattttctagttttcatctctctctctctctaaaaaaattaaaaaggaaccactgcatcgcgcactgtaggatgccatgccaccacccctctccaacatcgcccgagagatcaaacctcaacccccctccactatcgtccaataatttaaggtaattactaaaattctaatttaatttgtaattttttttaaaaagttttataaggtatttgaatttgtgtataaatgtgtacatgtatttaaattgtgttaatttatattatttgtatataattacacatattttattttaaattttttgaccgttatgtatgtacatatgtaatagctttgtagaaaaatccttgcacaaaggtaaacaagtcgtcgctaaggacatgtttggaaaattatggaagaattacatttgaaataaatataaccggaaataattgtacaatttgatacgtttgtcccttgtaattaaaattaatagaga

SEQ ID NO: 221416 - DNA, 2273 bp, Cannabis indica
gagagagagagagagagttgtcgacgttgctggaattggtggaggtgcaaggacgagcgttggcaggaggtgagagagtgaaagtgagagatatcgattgtgcaattggtacactgagtgtcgttaaccctaaaataaaattagtaatctatagtaaggtttcattaagtgagttttccaagttggcttatttttagtttgtgtaaattttaaaccaatgcaaatgaatttgtgtctgtttaaaactgagaaaaagttttgtagatttacactaatggaaaaattttaaattaatcaattccgtttattttaagtattgatagatgcaaaagaactattttggaatagtagcaatttgtgtccattactaaaaaaaccactattcctgacagtcctaaaaatattttttctgggagaccgtcgcttaaaaaattaagtatttaaaaccatcgagaaaaattaagtattctcgacgattttaaacactcgtgatgtattcttgataattttgaagtgtgccttaaatattgtgatttttttttaaataaggagaggtggcgtcggttaaaaattgtggcatatagtataggctacggtttaaaactgttgcctatagtgttaggccacagtttttaaccgttagtttttagttcaaattttaaaaaaaattcaaataatgtgtttttccttgctctaatataacacgttttacattttaatttttttaaatctctacattttcaaaatatcgatctcttgtctctcactctctctttctcgctttctctttcacgagctctaccatagacgaaagcctattcaagctccaccatggtcgaccacagccacgagctctaccacgagaactaccatcactcctctctctctctctctcttgtccaaagacaaatgcacgatcacgaaccaccacgagcattgatcagtcttctccctctcgttcactctttctcgtaacttctttattattatttttattttgggatttatgtaaaatttttgtatatcaaagatcgccagatatctcgactattcgggaattttaaggtcaaacgaaattctcatcttggtttcgaggaggatgaaggtgatgatttttttttttttggaaaatccactatagcgacgatttaaaattgtcggctatactataggccaagttttaaccgttgcctatcctataggcgacgattttaaaccgtggcctatagtctcgactataatcgacagttttaaaccgtcgagaattcttttatatatactgacatttttctatcgtctcttattctactcagtattcgcgatgcttgtataggcaacggttttatagaccgttaaatttttttttacccgacagtgtaaaacaattgggaattttgaattttaagtagtggtcacagttaaaaactaatgcagatagattgtaggtgtgcattaactttcaaccaacactaattaatcacacataagtaatgattcttgtagttttttttttctggaaattgtgaagtgatacttcataagataataaataatattaattgtacatgtaaatatatatatatatatcaatattttttgcaataagttccatggcatgtgaatttgataccctataatgattaaaatcaccagaaaatttatatttattgtactgaatcacatggaactgtaaaacctttaaattaatatgattgatttgatgaggaaaaacatgtatatataatatacttgtaattaatctttataattatatccaatttatatgtgtgggggtccaatttttatgatctaatcatgcggtccttgcttgtttatcattaaattaaaataaagaaaaaatgtctcctatattcaattaatttccaaacatttttcttcaaagaatttctcataaaataaaaattcaaacctactatttattatatatagttctatgcaattatactctataggaacgaattaattttctcatttaaaatctttcctaacatagcaatgcatacagctcgaataataaagagggaaatttatgaccaatattttgtttgatagaaaaattgtaactgaacttcattgctggattcttccatatctcaacttcttcaaatttcataactcatatttttgactcagtaaaaaggtgaaatattcttactgtacaattttgtttttttgtttcttttaataattattctttttccaatacatgcatgaacgaaactgctattcataaaaaaatcatattaaaagaa

SEQ ID NO: 221417 - DNA, 923 bp, Cannabis indica
aaattcaaatagctaggaaaccatcataaattttaaaaaatagtatatgagataattttcctatttttaaatatgtaagtacctgaacaaaacaatcatgaaaatgaaggcgaagaaggccagcagcttgggcaatgtcatctttaaagatcttgatgagttgttctctaataatgaactcaagattaggacatgattttgcatagaattgccatgagagaccatcctttaaaggaacacttttctctactccttcaacttcaacattatttgatgatgacaaaacacaagataataagatcattatcatcatcaaaactaggttactactagtactactacccatgcttaattaattttaatattattaattaaggaaggagagggtttaatgtgttttaattatttctagcttgatggatgtgatgatcaaataatgttgtattactcttacatttatagccaaatttaagataatattgtgtgagtactgtctatattgtattattattactatagtttagttgttattgtttatattttctttcttgaaaaatgcatcattattgttgtttttaacaagaaaaaaagtacatcattttcattacttaattaaaaatgactttgggcgctgtagacttttaattgttaaacgcccatgtggtgaccatatccggtatcccatttattaagggttttattttttagttttatttgatgactaatatataatataccaaaaaataatggatttgttttttttttgtttaactcttgtttagtcatttatggtggctaatttgtatcttgattagggttggtagtgctggttttggtggatagttatgccttgtatggtggctttttttgttttataatttaaaactcaattaaagtttaaggtacgaatagatcttttaaaa

SEQ ID NO: 221418 - DNA, 3058 bp, Cannabis indica
ggcacaaaacccaacagtaacaccttccaacctttgtcaatgcaagcagggccttcggatatggatgaaaatgagaagattgaggcacaagtaattactattggtagtcatgagatcgctgcaactgaacattcaaaaggaggggtagatcctcctctccaacatggataggatccttagttggaatgtccgaggaatcaatgacccctataaatagaaaatggttaagaatttcattcttaagaaaaaattgggttagttagtttgctcgagacaagggtaaaagcccgggctttatatcgaagtatgttcaagggttggttctttacaactaatattgcttggcacaaagggggaaggattattgtagcatggaatccccatagtttcaatgttagcattcttaagtgtagtagccaacttatccatctatttgtttccactatagatggtaagtttaacttttatactacatttgtttatgctttcaatgaggctgatgggagaaaggaattatggagagatttacaagaattgtttgtgaaagaggaatgggcagtaatgggagactttaatgacatattgaggaaagaagagagaataggagacaaggtgaaatacaaggaagcgggtgactttattagatgcattgaagaatgtcaattagaagatctcaagtcgagtggtaactttacttggtccaacaaaagacaacgcaaagagcgaatttactcaaaaaaattgatagggtgctagttaatgacctctggctggagaagatgcccaattcagaggctgtctttcacactgaaagcacctgtgatcacaccccggttgttatgactatctatccagaaatgcttagtgacaagaaaccatttaagtacttcagaatgtggtcatcacacaaacattttccaagcattttgggcaagaatttggcagcaacgggtcaaagacactagaatgtttcatcttgtgactaaattgaagatgccaaagtctgagttgaagaaactgaacaaggaagccttttttgacattgaagcaaaggaaactgagttgaaagatttgcttactgcccttcaaggaagtcttcaggaagatccttttaatagtgaattgtaaacaaaggagaaagacaccaggggggggggctacatacaagtgcaaaaggatttgtattcctccttgcaacaaaaggcaaaagttaattggctcaaaggaggagatgacaatacggcattctttcatgctagcattaaagacagaaggagataaaatagaatactttctatagaatcaaaagaaaatataagatatgaagacccagagcatataacaaaggccttcctagatttctacaaaagtcttcttgggacgaaaatggagaataggaagcaagtgaaaaggaggaggccttatttgggatcccgggatccaagactcctgggctagatggttactcaagtttcttctttcaagacaactgggaaactgtaggagataagctatttggaactgtttcatcctttctttagactggtcaacttctcaaggaaataaactccactgttattacacttgtccccaagatgaagtgtccaaacacggtgagtgattacagacctattgcttgctgcaatgtcatttacaaagtagcaataaagatgatttgtactagactcaaaaagatattgcctgatcttattgctcagaaccaagggggcttttttactgggaggttcattgctcataacataatgctttgccaggatttagtgagacattttggggggaaagttaccaaaccaggatgtgtgatcaaacttgacattcagaaaacttatgatacactggattgggattacttggaggaaatcttgcatgcctttaggtttccctacaagtttataaagttgatcatgaattgtgtacagactcctaggtactccctgatgtttaatgggactatgcatggctactttgaggctagcaggggattaaggcaaggagatcctatgtcgcctttgctttttttttcttggcatggaatacttatctcgaatactgggaaaagcaagggaaaaggaggagttcaaatactttgagagatgtaaagatcttaaacttaaccacctctgttttgcagatgatgtgattttattttgccatggagatttcagaagcatatactgtctattgcaagctttgaaattgttctgttgctcctctggattggagcctagcccttcaaaatcagctgcctattgttgtggcatggaagatagggaaattcaacgagtggtggacatttcaggcttttgcaagcaagaagctccattaaagtatcttagcatccctatatgtgctaagaggatctcaagcaaggagtgtgaaatattggtggaaaagatgactactagaatcagagtttggagttcaaggaacctctcatatgccggtagagttgttttaatcaatttagttctactagctattcacacatattggagccaaatcatgattttgcctaagaaaataataaataagataaaggccatatgtagggcttttctatggaagggtcaaagtacatcacaggggggctggtttggtagcttgggaatcggtttgccaatccaagacggcaagaggaatcaggtttagaaaggtggaagaatggaatttggcagcaatgacaaaatatatttgggcgatagcgaacaaagaagacaatatgtggattaaatgggtgcacaaagtgtacttaaaagaagagaattggtggagctatcaagctccacttcaggatagttggtactagaaaaagatagtggcacccaaggaaaagttgaaggtctcggctgaattctagcagctaatgacagggcaaagcttccaaatatcaaaggcctacaatttgatcaaaactgaatgtgaaagaatgcaatgggcagggattgtgcggaatagattgaacataccccggtatagtttttcttctagatagctgtccaaaataagctaaagataagagaaagactatgtaagatta

SEQ ID NO: 221419 - DNA, 1712 bp, Cannabis indica
atttgtgcatattgttatttcacgacctaatctatgtgtcatcataggtagatcaggtgtgcacttaggtgaaagacctaaaatctgtacagtgagtgaattgaatttgagcccttgtattatggtggttatcaggtgcgactatccagtttttggatgttgttttctatgattggtattgagagctaggagtctagtggacagtgtgatatgtatttgatgcttgattttatgattatttgtagtctctctactttgcttacacattttgataatggtaatgagatattttattttaaaagctatttgtttaccgtgatttttagaaactgaataaaataataagaactgaaaaaacaataattaaaagaaataatataataagagacaaacaatttttacgtgattggggcattaattagccttagttcacgagtctgttttattcagtgaagtgtttacttgtaaatattctcgaagggatacaagatgtatcttattatgtttgcttgagcaaaagaacacgagatcttcaacccttaatttatgagattagtttggtatttatagtagttggagaattacattaagtttttccattttctatatactggagagtttacaactaattaatgtctttggacttactcatgaagtccagctcatgaagaatacaatttgttgactaggcgaatcaggcttgagttaatcaggtcaaaattgtatatgattttaatgggagaatattctgaaataactgtcctacgcttgttatgggatttcttttttaattgcgatatgatcttccgggacaatctaacagctggagtttcgttattatagagaaaacaaataaggaaatcagaaaggtctcccgagaacgcacctccttttccttccaagctcatgataccggagcttaacatatcaagggcgaaatgtatcgtgagcacaaaaccaaaataacactcagaaggtcctatccaagtgggtttggaagccatgtgtattgtaccgaaaacgcggttaacactaaccatgcaggaatatttattaaactaatagtcatttgatattagttgtttttttactgggctttataagctcaccctctatatttcctttccaggaactcaattggatacttgtggatgtaggaaagtcgttgatggagaaccataagattagcttatatcccaccttaattattctattaagtttttttttttcaaatattagatatatatctaattattaactgatagtctgtattatttatatagacatgaccagttaagaatgaggaatattatcttagtatttttcgggttataaattttaattatttggtgattatataactgtgagaatattattgttgtatatatatattgacaagtaattttattttattacaattaatttttatttattaaaggagttactctattattttaaggaaaacttacaaaaatactagaattttggttaatttttacaaaaaatactgtcacacgaaaatcttttgaaaaatactgtgtttttataaaacaatagtagaacacaaaacaaaataactaaaaacaacagtggaacaactaaaaaacaaccgtagaacaacagtgaaaacttaatgcagtacagtagaaaatttacatagatttttaaaaaaaaaaaattccgtttcacggtataaaaattaaaaaaaaaat

SEQ ID NO: 221420 - DNA, 3549 bp, Cannabis indica
  modified_base (3546)..(3546): a, c, t, g, unknown or other
aaatttccctatatatatgcatacataattaattagtgtgtttaatatatactaaaaattcacatatcacaacacttatatatgtataattaaataatttagtattttttgtaccttgttcttgttcttctcttttgtaaattgttatataatatttttaatttacttatttatttcactatcttcttaaataattatcacaaagataataatgtctctatattttactgagaatctcatatatttttttttctttctttttataataattatgagttttttatattaacatatcattatttcataatattaacatatcattatttcataacatatcattaacatattattatttaaaaatgttacatataaattttctattaaaacgtagaggtgttcacataacttgcaattcgtggtttcaaattctaactaataatccggaccaaaccatttaatacatggccaaatgaattcggtgttaataatttggtcaatccgaaccatttaaaattctctagtttagtcaagctcttagaaatatcagtagcagttcaaaccaagctaattcatataagtattttatatatacttaatatatatcttggacaaaatgttcatatttggaaacaattttaggtaaaatattgatattgacttaatattgttatgataataattgttcacgatgtatagtatttttcttaatattattctctattcagcaaacaagaaagaaaaaaaaataaaggtttgaccagtacactccatttcccagtccacaatactaatagaggaaattatattttatacccactttactttatttgttttaatttttacctctatttttatatttttttaaatatacccacttttatagatgatgtccccattagaccccttaggttatgtaaattatatgctagacttcagtagatagtgagagtatattaggcaatctactcaaaaaaagtgggtatattttaataaaaaaataatatgagagtatttttgattaatgaatacaaaaaagagatatttatcaacttatcccatactaataggtccatatattgactggactgggcctaattttagaccttgctgtgtgggttgtagcccaacaataaaagagcatctctgcttatattttgcaaggatttttctttttcttttttcttttaaatagatgttggtttttattatttttataaatttaacattattttgtgagtttttatttttaagtaagttgcattgcattttttttttgaattccaaacaagcaattacataggattaggcatgtcacgctcaatagcgagacttacacaaggaggattaacctcaatccacatagcactagctttgttcaacaaagcataattggctaaaccatgagcgatactattcgcttccctatatacaaagaaaacacccataaccgcatcatttaacattaaagctctaatacaatctaatattccatcaatatccctacacccatcctcattttttttggattaattggatggcatgaagacaatccgattcaacactaaattgcctgtatttcctttgtattcccagtcgaagaccttccttaattgcgaccagttcagcatgtaatggaggggcctgctgctgcaaagaagtagcagtagcagcatgcaaaaccccccgcagagtcacggttcacacaacccgtgcttgacccacctccactcggcctggccccccgtcaacatttatcttcatcaatccctgaacaggaggacaccacctcgcacttattcgctgccttttactactctcctgctgatgttggccttgaaacttagacaagaacctagcacaccagtccaccacctcggctggcctaggtattcttccaccatgcttcgtattgtttctagtatactattgttgccaacacacaataagaaacaattcatagtcagccttagtccataccttagcaagcctaataagaaaagtcatcacatcttcatgcccaacacgctgtaacttgttcttaaactcgctgagttgccatacccctttgtttgctttgcaaccccagatagcatgatagatagtttccttcacccccgaatgacaccgctgacatccatagtcaatattcattcctcgcgaagcaaacgttgcatttgtaggtagccatgaatgagccaatttccatacaaaatgcttaacttttggggggatcttcagcttccaaatcaacttccaccagtcttttatgtgactgtcatccgcttgtcctacctctttcttcaattcaagcaccattcgatacccactcctgaccgaatactccccattgttactatagtgccacaaaaccttgtcttccatatgggaactagcaaccagtagttgtaggattagattcgcatcatccggattaaaaatagcacgaatgaaatcctcatcccaatcaccattcaacaatttcaaatcaatcacccgtagttgcgaaggaatactaggcctgtcatataccttgaaacgccgaggtcggggcagccatgggtcttctactattcgaaccgaactcccattaccaatcctccaccgatatccactgagaataatctccttcccgcacaccaaacttctccagacaaaaaaagcatgcgccccacgcttagcctctaaaactcccttgctagggaagtaactcgccttcaacaccctactacacaatgatgtgggctgccggatgcacctccaaatttgcttagcaagtaaggcttgattaaacatctctaaatccctaaaccccaatcctccttcatccttaggtttacacagatatttccacttacaccaatgtgtctccttatcttgttcagttgatccccaccaaaatctagcaaccattctgtgtatgctattaatggtactcttggtgagccgaaaacaactcatagtgtatgtcagaattgcttgaattatcgcctttatcaacacctctttccccgccatggaaaacatggaagccttccatccccgtagcttattccacactctgttcttaattacatcaaacaattgcttcttattacgccccaaaagagaaggcaacccaaggtatttcccatgattagccacaaccttcattcccatatatgtacccattgccaccttttcttcagcacccactcggctcccaaaacaaagttcagacttattgaaattcacctcctgccctgaagctcttgtgtatttccccaacaacacctaagatgattcaaagagaactaaaacactcaaataaataaataataatgttaaaatgaagtttgaatcagtatattgtggcggacctaatacaatatatataactaataactacttagatcaattgataaataaattacaataaaaataaaatagtgtatatgtatttttgtaaattaatattcaaactcaaatatagtaaatttgttaaagctgttaaacctagtttcttcatattaaactcctacatagaagttacaacactttcaaaaaaanaaa

SEQ ID NO: 221421 - DNA, 2722 bp, Cannabis indica
ggggcatttagggtactaaaacatttttatacccattttttcaatagtgataagtattagttcagggaattaatttaggactaatgtaagcataattaatcaaatttcccaaccaaaattatatattagatagaccaagaaaactcacaacttgttaagaaccgtgaacagaattataaaggcgtgcaaagagttacatggtttcacctatattttacaatccaagaggtctcttattataacatgtagtctaggactttggcgcattactgaggtgtttccaagtctggtcttcggtctagtacttctctttctgaatcatttggaaatgcatctggataggtagccaagatcctcgacttcatgctcctgataagaaagagttgaggtatatgtataatccaaattaccaggagatcaactaaatctagtgtggcatactacatggtgatgaaatcatcttgactgacactaaaaatattttacaaaagaacatttacagcagcatctccatccaaactaaattaggattgatatgcaatgaggtgaaattatacacagaaagtctaaacctgctggcaccctaactttgtataaatggtggcaaatcaaatcaccttaaaatattgttttaagaaaatgctcaagttgaccagcctccttaaatatcaggtaagtacctttcacataaatacaaacggttcaacctaaaagccccaatgtacaaagctatgaaaactggtgatatattgctcgagcttagatgcacataccctatggttaattttcaaatatacatataattaacttaaaacaactggtcccaacaatagaaaaataaccacaactataatttgtcagaccataatcatgagatcaaaagaagcaatcatgatctacatcagggtctcaccatttggaaatgggaacttgcattcaaatttttatttttttcttgtgattttgaattttatgaaaccaatggtattcaaatcaacccttctaagcataacactagaaaagcacatcaaaacattacaagttgacagttaagaaatagtgctctgtaacctggccaaaccccttgcacttatcacaaaaatagaattgcttgaagaatgcacaatttagtaacacaatgccaaagttgtaagaagtgtaattaaacaattataagaatacacagtaattcgaaatcaacccttctaaacatactagaaaagcacatcaaaacattacaagttgatacttaagaaatagtgctctgtaacctggccaaaccccttgcacttatcacaaaaaaggaattgcttgaagaatacgcaatttagtaacgcaatgccaaagttgtaagaagtgaagtcaaacaagtataagaataagtagtacaaatggagaatgctctatcaaaacataccttagcttcagaaaaacatagtcaagatctgttttcatagacttcaatactcgtgtatttctagaaaaatctccagaaacctccgcaaagcagttttctgagtactcgttaaaatgtgacagaacagcattgctgtcttgtaaccttcccaatctgaaatcaagaaaagaaattgtagcaaggaaacttttctatagccaaatgtaattcatttcagttgctgaagaggaaaaactctaaactaacaaatcaaggatatcccttcagatagtaaaaaaaaccatggttacttaacctgactccctaattgttgattagggcctccaacaatttacttatcaaaagaattccagtcaaaagtctccacatgtaaaacccaaactcaagaattgaagttatatgaattttcattaatacatatcacataatgcgcccattaacctcattcaaaaagagaatcatcttgttcttcaacacatataacatcatatcatttcatttcattgtaaaaaaattatttctaatcatataccgaacaccatttgaatatctgatcgaggtaaaaaaaaaaacattacccagagggatcaggtacaagaggaatggcatgcctcaaccaagatcatcacatagaaatgtatataggacatgttatgttattaaatccatgttctcttaattgtttccattcgcttcttcatacttcatgacattcattggaaaagggggatcttcctaattaattattcattttgattcattaaatttatgctggtattcaagggaatccccaaaacccaaaagctattttgaaagaaaagatataatttcgattttaatctaaccaaagaaaaattcaatattaagtttcgcttcctcaaattgagacatttatgggtgtcttgatcatcactctatcctccaaagcaagaatttttatcgtgaaaaagaaaagtaatgaaattaatagagggacactaattcttacatgagattctgcatttgcttgagggaatccaaatgttgagagtcgattagggttttaaactcgcgagatacttctacggatgcttcctttattgcttctttctccatttcttttcgcgtcatcagttcagttggacacaccaatcttacttcgaagaatctatatatataattgatgtggcatttttccttccatttctcaattttttttctattttgttatattttctaatttttttctattgaataataagaaaaaaaataatgtaacctccccattcttaattttttataaataatctattagtattcttttaa

SEQ ID NO: 221422 - DNA, 2794 bp, Cannabis indica
tttttaccaaggccatcctctcctgcatcaaaagcattttttctgtaatgtgggtcatttggatctccataaggcacaaccatttccacaaaactcaatctatgagctacaggccttctccctcgactaccatcgacataggccacagaatatatgattaaaccctccctgggtgtaaatccaatcctgaagttccactgccagtaaccaataaaataagattccaaatttaagcagataaagcaaaaattccaataaataaataaataaatatttaccttctgccattcaacaaagtacccattgacgcgaaagcttggaccttcaggctgaataatttgtaaaggcttcacatcacttcgatcaacaccacctcttgattcaccgggagtatagttcctcagaggatcagcaggaggtaagggaactagtttgcggtcttcaaactcaatcaccaccatgttttgcatgtcaacaactacatggattccctctacgggtcttgcataaccattttccattgggcagtcgctttcagttctacagaatatcagtggcttagcaagcctacgactaggagcgtcggcatcgctatgatagcccacacacctgagacatgtgacgaaaatagttagcatgccgatataatggaactagaaaccatagttagcatgctacctgagaaggtagcaacttaacttaccatgcatcaaccatcacgatatccatgtcttcaatgcctctcttcttcatagcctctctaaaaggaggaaagtctttcacaacagcttcacattcagcatattccacagcatcctaaagttgagttggaaacataagatgaagaaaacaaaaacattaaactgtgcaactaaaaatcatttaaaacatgttctatcctgctatacaccagctatgaaataggaacatatataagccctttactctattcatgttttctattttgtaagtgaataaacctgctatacacaacaaaagggaatgaaaagataattaccatgggaggctgcacatcgggaactacttgtgaggaaatcacttttcccctatggtgcccaccacgagtcgctgcgtgtacttctgagagctcgacaatccatgtgcttgtctcattcgacttcttgttgtaaacaacaagtctagctcgccttgcagggagcttactggggatcacaggtccaccttttgttcttggaagcaatgacggctggaaaggtgggaagaaatatgcatctgctaaagcaacgacatgtttatctggctcaagcagaacaacctcaacaaagcgcatactgtctctgagctgtaataaaaggagagtgaacatttatacacaaacatataacctaccaggaagaaaaatatatctaaaacataaattcttaagcgaacaaggcattgtgtaattcaacaaacctcaggggtagctcctgctgccctgactgtggcaactgccactgagatctcagctgcggaaagaggatccagaggatggctcgactgagctcttagcataattgggatccctgcaccaaccaattgtacagactaattcaatcaaattcggcatatgcattactattaaataaaagtaacaaaataactcccccattatcagctataccaccagaactagaagcttccagctttttttttttgtttatttatccacttattaattagaataaaaaataagataaaaaagaacaaaacatatcataaagatgtaaaagagacatatcaagtatagaggatgatcaaatttttccaaatttcaaaattaaaaagaaacaaaaaaataaatcaagcaggtaaaattgatctcaatgttttattttaattttggagataaacaataaggaaaaaacaaaggaaaaaccttttgttgaaagagtagtggatgattccgatatcaacgatgacatggccatcttcttggcgcgctgatcatcgcgcaagtcagtggaggagatagtccaatcctggacggcattggcggaaacaacggcgccgtcactggctggagcagcggagacagcgacaacggaggaggcggtggagtcacggtgaatggaagcagaatcggaggatgtgaagcaacaggaagaggaaccacccgtcgtctttttcgaagctggggccattgtaatgggttcgctagctcaccaattccaccgaaataagtctcaatacaatccactgacatacagcacaaatctctctcaccttctaacgctgcgtggttccgcaagcgaaaggaaaaaaaaacttcgagaagaagcgaaaaccagagagaaaatctcaaaaaaaaaaaactctttgcagtaaaatcaagatgaaaagtttgttactatgttggacgatcaccgagctagggctagatttcgattgaaatgtgaatgattttcttttttctgttctgaaactctgagagagaaagaagagaaaagagagagaaaaacgtgagtgaaagacgaaaaaggagaaaagagagatttgattcactggttgaagacagggggagatgaacaacgaagagacgggttttataggggagcctacacgtgcattactcaattctaattctactcaaattcctattttctaaaatacaaatttataaaatgatatgatataaaaatacaaatttaaattttttatactacaaagttaaaaagattacacgttcattactccaattctaattttactcaaattcgtatttcatcaaatatctttatatattaaaagtgcctatctaacggcatttctt

SEQ ID NO: 221423 - DNA, 960 bp, Cannabis indica
attgctcatacttatatttttttaggaaagagtctcaaccaccaaacgccaagagcaatatgtcctctaaaacagtgggggtgataatttattcaaagattgcatcagttatcaatagatccttgatacaattaggactctccggccactaaatcaagctgcaacttgttgttaatgcaagtttggctaaaacatgagcaataccattacaagatctcttacaatgaaaacaattaacaactttgagcctattacaaagattaagaatatcatccaatacaagacccaacaaagtgataatagagatattattttttattttcagcacgacactcaaacaatcaaattcaataataatattttcatatccaaaggaaagacactcaaacaaagcttttcaaatcgccaacgcttcagccacctcaggcaggaaataaccatctaaagaccagctcgttgaggcacaaacaaagcccacatcatctattataaccatgcccaaaccactgtaatttctcgaagaacatatagatgcatcagtgttgactttgagacaacttggaggaagggcggtccatttagacgctttaagaggggaaatctgtcgcagcaagggtatgccagaagagtcagagccatcaccaaaggaggaggaagaggaggatggctagtcaacgaactctggttgttaagaaatgtccccagaagttcatgagcccaaaggacaatgacagtaggagataaattaacattgttatagaccattttattaagtttgtaccagaatcttcacaagatcaccaaaaccaactccatcatctctttcgaataaggattaataaatctataaataaagtcaagaaaatccccacaagagcatcttccaacataaatgcacaaagctttctacattgagtgagagagctccaaccctaaagaacatggtgtgtagtttcttcc

SEQ ID NO: 221424 - DNA, 1541 bp, Cannabis indica
attcgtgggatcttcgagagggttctttgagttgatgaattgcaagtcttgatttccatgttcaatggaagcagatgggctttgtgttgttctggttgtttgatcttcaccttccattgaaatttcagcttgagtttcgcttgacatggagggaaaaccaagaacagagaggcagaacgcagtaacagggtatcggagaagacggaggaaaacacgatgccgttaccggagaagaagagcaagatcaggatcgttcagggaaagtatttctttcccgctctgataccatattgcggaagagagaaagtaatgaatttcatctttgtattaagttgaatgaattgattacaaaagcataggatatatatatagaacagaggacctgaacttaaccgactaagcctaagactagaacagaccaataaagctaacaacctactgacataaactaacaagaataacggaaaggaaaataactgttataacagtagcagtgaactaaaaacatagagaactatagtaagtgaatcttaatattcacatcaccaaagttctgactattcatttctttcagcatgtgtttgtaccttcttaatttttgaatatgaaaataataataaaaattaaaacatataaactaaagtgggtatataatatatataataaaatcataatcttattataattgttataagcaattgatacacttttaattaatggttatgcatgcatgatgaaataatgtttcaaattatattagtccatacaataattattctaacattattacaggtaacttatttaattaataatatgaattttgcttgtatataatcgtgtgtttgacatagtactcatcagtatatattaaatatataatcatagtacttagctcaagcccaacgttgcactattgaaaatgatgctatctatgttttttttgaaaataataatatttatatatatatatatataatatacatacattatgtatgttagtactacttggattaaataaacatatcatttgctaattaattaatcaactagaactaatgaatcttaatttgaatatactaggtctaggtagttgaatgaaggaaaacaaaatggctgaatcaataggaaagttaagtttgatttaggtggtttttggttggatgaaatgaaatggaaaaaaaaaaaatcaactttcatatttattagttttactattccttataaaagtagggataattttactttatttttctcctaatttatgtggactccattagtttttcactttatgtgaatcaatactatataattgattaaacaattgcatgcatcaataccatataattgattcccactatatccttaagtaaacgtcatcatttgtttagttgcaaatatatattgtttttttcgggtttttacactacatactaaaatttttcattttttctcttttttactgtgggacaatttttttttttttaaatactatattttcttttttaaaaaaatactgtgtattttttatactgtatactgtg

SEQ ID NO: 221425 - DNA, 1655 bp, Cannabis indica
aactgagctaaggtcggtttgtgaaaatgattgttaaaaacaatatttactaatttaaattatttatttatttatttttagaaagggatttatttatttatttattctaaaagtttttccaatatataaactgcatctgagaattgatcatttttatttaactagattaggattataatttataatcaacaaagaaaaataacaagcataagctacaaaaacaataatattgttttttgtttttttgttttttttctcaataatgttattaagaaattaaaaaaaaatatatcaaaatctacccaattagtaatacccaaaatttatgcaacaattttttgatgtagaatgagcataaaaagtaatttattgccaatatttgcaacaacaattttagataattttttgcaggaacaacaaagaaaaagtttaaagggataaatatttttttaaaggtaaatagaattttcattaataggtaaatcagacataattcatgctcatgaaacaaaatcaacaaaaatagactaaccaaatcgtttacaataattgacatatgactactctgattattctattatgaacatgttatatttattttcggttagtaatgtagtttttgttaaaagaggctttttggcctatgttgaagcttgctaaaaatgctagacagtcttacaacgattttttgaacggtaaatcccactcttccttagagttaatctatcccaaaccgaagttctttaagaaaaaaaaaaaaaagacccataaatcgctaactcgcccatatggagataaataatttaaaggaagaaattcttatttttttttattttttcttttgttcattcattaacatggaataatactaatttcactcaaatagtggaaaatttattccattaatagcattttaatatttttaaatacaaccaaacaataaaacaaaataaaaattaatttactttcattccattacattacaaccaaactcacccttatagtgaaaaatatgattaagaatggtttaacataatcacaaagcctttcttatataagcttatacaacaaacaatgttttttagataaattgcttcaagaactctgtggccactagcctccctctagtgttgactgacatcttcagttcactaatctctttatcaatatcctgccatagaaaaacttgaatatataaacaaaagggtctatcatgatgaactataacaatgcatagtgataagagttcaagggagaatgatcaatatcaatatcaagctttaatctttacaaaacaatgaaactcttaaacccttttccccaagagtcttaactaatgtatctgttgggtttacgggatgtttctaataagactcctcgcaaaggagccacatcagttggcttctaagaatatcacagcggtgtagttagagtgtgggcgtattggggtgtatcgagatatagtgttcgtagaaggaaatgaatatagaggaagtgtttagtctattttgaggtgtggagaaattagttggtgtaactcttgaagagaccgagctctcgaactcttgagtatctcagaaatacctattaaattggtatctgagccatgtaccctcaagtgagaccgacgtcatggaaggggcacagtgatcgag

SEQ ID NO: 221426 - DNA, 2928 bp, Cannabis indica
atcagattgtaatgagttttatttagggcataaaacccaacaatactacccatgattatgtataaatttacatgttaaaaatgtataaaattctaaataattaaccaaaaatagcaaaacatctcaacatagtctccaattaattccaaacattataattatattttagcattatattgaaggttccccaaacagtgaacacaatttttactattgattctaattaaaacacaattaaatagttaattaattacaaataattataataaatacctacaacaactaataaattataaaatctattttattttatatcatagacagtaaatagtattacaaaaatatattttactgttttagcatcactttaacatattttacataattaatttaaaaaaatggactaaataaattcataaaaaatacagaaatgactccatctagcaagtatttgacgataaaggtcatctatgtagggctcacatctatcatatcaatctcttgcttctccttcttgtatatacttggctcatttagtacctccaccgggatcaagtttagtttattgagatcaaagtgggatgccaatttttctaaggtatctacattacagttttgttctcttaaaatttatcatattttaaaataatcgaacttttacaagttcttctgaacttcctctatatatctggccattctcgtgcctttcgcttggtattctcccagacttgattcatgactagcagcgaatcgctaaaacattagacattcttcacattcaatgtttccgcgatccttagtccacctaataaagattcatattttgcctcgttgtttgaagctttaaattaaaatcttagtgcataatgaaacttgaagttttcgggcgacaccattatcactcttgccccgagccattctcgtttgaggctccatcatcgaacagtttccatatttttatttcatttcgtattctagagtcttctcatgattctatcctttctaacaagttggctaaagcctaatctttgatagaaatcctcgagtggtaagctattctaaattgctctagctcaattaaccatttaatcaatcttcttgatgcatcgagttttgacaacgcttgtcacaaatgctaatccgtgagaaccttaatggggtgtacttgaaagtatggttagagctttctggatgcatgtaccaagcaaaacgtgagtttctcgagcggtgggtatcttgattctgcccacagtaacattttacttacatagtaaatgggttgttcattttttccttcttctcgcactagtgtcgcatgtacatgaaacagccaaataaatgaacaatatttctccaataattggtttggtgtgaactgaaggtatagagagatgtttttttatcttctagaattcctgtttgcactcttcattccacttgaaccttttattgcctcacaagatgttgaaaaaggggagacatttatcagttgacttcgagatgaatttgttgagtaccgccatccttccagtcaaagactgtacctcctttagttttgtttgcgaaggcatctcgagcaatgcttttattttgttggggttagcttcaattcctctcgcattcacaatgaaacctaagaatttctcagaggacacccaaaaggaacacttcttagggtttaacttcacatatattttttcaatatggcgaagcactctgggaggtcctttgtatggttctcacttttaacagacttcaccaacatatcatctacatagaccacttttgtgcaatctggttctcgaacataccattcacgaggcgttggtatgttaccccagtattctttaacccaaatggcatgactttatagcaataaagtctcatatttgtgacgaaacttgtatgttaatttggttataaccagaatatgcatttatgaaagtcattagttcttgtcctgctgtcgcatttaccaattggtcgatccttggtaatagaaagtagtctttagggcatgccttatttaagtcggggaagtctatgtaggttctccacgtcccattttgttttgggacaagaactagattagatatccacaaggggtaaattgcttcccttatgaagttattggtcaacagtttgtcaacctcttcttttaatgtattttgtctctcgagatctaaaggtcgtcatttctgacattttaagggataagctgggtcaatgttgaggtgatggcatatcacattcgggttaagcctgaccatatctaaatggctctaagcgagctgatcttggtttgcctttagaaaagtaattagttgctattttatttctttttccaaacccttcccaatgttgatacacttagtaggattgtttagatctaaattcacctcttctaattcttcgatagccctgagttggttattttcatcatggattctcggatccaaatcttccattcctttctcatttcttctgtcaagattaccatcaattgatgggttgcccttctattcttcaattccacgctatagcattaccgagctaataatcggttgcctttcacagtctctacccctaaatgagtgaagagttttagggataaatgcttgatcgagcttattgcctccattcttgttaatgtttggtgacccatcagaatgttgtaaatagaagggatgtcaacaactagaaattcttgcatctggattgtggataatggtggttctcccatggtgagcgggagttcaattatgcctaaactcgtgacactattgcttgtgaacccgcataggtaaaccatacatggcttaaaccatacttcttctaagcccattttcttaaagttttttttagagaatattgacagaactctcgttatctacaagaaccctcattatcctcgtattagcgagttga

SEQ ID NO: 221427 - DNA, 1639 bp, Cannabis indica
tagtaaggtccttgttcataaaaatagcaatagatggagtgctctgttgtgcatattattatggactgtaatatcttataggaaagtattatgacagaatggagaggttcgttgaaatggttgtattccaaaagaatacatattgtaacccctactggctactgctcgttgcttttattgaagttactgtaagttttttcaaaaaagataaaaaaaaattggttggatgcgagaccaagccctactagaatattccaagactactgaaaccaaaagaggaaattttttatgtatatatttgtagtaattatcattgttattgtgaacaatgtggctctggcacgtcactatcaataataacatattcttaaataatgggatagcttatttatggggagaaaacaataataattcttatatgattatgagtcttaaatagtattaattgggatgcgttgcttgcctttggaatgacaaaaacttaacatgggatgtagaagtttggaaaccgatacatctaggatacagagtaacctagaatttcacacaaataacatctgtctaacattgaaaattgcatctaccaataatatacgtcttcgtatatttgacttaaaaacaaaaatataaaaaaatcgcatctaccataatatacgtacgtattcgtctacttgactcaaaacaaaattattattaatacaattaacgaactaatcttagattgcttaaagaacattttgtgtcaaattagtgatagattgtttttatattttattatttttttaaaaaaattcaacaactttttttaaaccaaaaaacaactacaccattctagggctgcaaagattttttctctccctctccaactgggcatcactagcccatttttgggcttgacttgaggccatggtctgggggtaggttggctttcatcttgagtctgggtacaatggtttctttgtaggttctccttcgtctcggtgttatgtgccaggattcagtttctctttggatggttcgagttgtggtttagaaggtgggtggtcgctgggagccttgtcgggtttctgttagtggtttggtctgctcgttaaggggtttttccatcggtggatgttctcagatctgactttttctcaatggtgcggtgggggcttctccaggtttgacggtggtggtggatcttgggttcgtgtctatggctggaacatttagggccatgggttgctctcaaggttctctcgaactctaactaaagagtgtgttgtcgtgttcggtgagggagtgggcgtggaggaagattctttggtgattaggtccattgcatttcgttctcatgtttgttttgttttacgtttcattgttatttgtttcattttaataacggtgggctttcacccttgtttcatctctagttctttttggatttggttgcacaggttatttcgggatctatctcggtgttgtttgacacctttttttatgattcttcgatgtttaatatcaaaaattttaaacatggtttatcatattcttctcctttattctgttttgaataaatgaggtgtttctacttaatttttattggaagatctttaataattgattgtcattaataaatgcaatttgacacatgttc

SEQ ID NO: 221428 - DNA, 1256 bp, Cannabis indica
aagtaaagcttgttacataaaaactgaaatctaaggaaagacaagggcttagtgaataagtctgcagtttgatcttgagtaggtatgtagcacacttgtagcttgttctgagctatttgatctcggatgtaatggacatcaagttctatgtgttttgttcttgtgtgaaaaataggatttaaggctagagattgagcactttgattgtcacaccatagaactgggggtgtcttctgcagagaaatgccaagctcatttagtaaagagattatccatactaattctgttacagcagaggacaatgctcgatattcagattctgttgaggatcgagctacagctttctattttcgagaactccaattgaccaagttaccacccaagaaaatgcagaaaccacttgttgattttctatcatcaagacttgatgcccaatctgcatcatagtacccttctagattaagaagagtagatggtctgaagtgtaatccgagatgaggagtcccttttatgtatcttagtatctatttacatgcattccattgattttcagtaggagacttgagatattgacttaatttgttgactgaaaaggcaatatcgggtcttgttaaggtgagatattaaagggctcctatggtgcttcgatagatttatggtgtggctagggtgggctgtcatcttgtgatagtttatttgctgagatcattggtgtgttgcattctttggcatcctcaaagtgtgttctgcttagcaaatctgtagcatatttggactgagtgaggtagattcccgaggcatttctgtatgcttcaaagccgaggaagtagcttacagatccaagggattttaaggcaaattttttgtgcagatccgtgatcaatttggagatattatgagaatcaacacctgtaattaagagatcatcaacatagacaaggacaagcaacaatgaaccttgttgatttttgtaaaagagagaagagtctgacacagatggtttaaatccccatgctatcaaggtatctttaatgtgtcaaaccaagtcctggtgcttgtttgagaccatagagggactttgttaattgacatacaaagtcaggtttggtgctatcttcatatccttgtggctaatgcatgtaagctttttctttcaattcgccatttaaaaaagtattattgacatctatttgttggatgtcccaatcgtatgtaacagcaagagagaaaactattcttatagtggatgctttgat

SEQ ID NO: 221429 - DNA, 6262 bp, Cannabis indica
gccttgtttgctgggaaaaaagctcttgtatcataatattagaagaaatgatacgagaaccaagaaaatatcttaagaattcacatccacaggctataatacttttagatatatataacttcatcatgtacaggttggggaaaatgagaagcctcagcaaaagaattcaggcctagaatgataaccataaacaatagttaaacagctccaaggagcagagaaaaaacacatccttaagataatcaattcacccaagtggatcaaaaacacacattccatttccagtacctaattcagggcaaaaattagaatagtcagtggctcataggccctcattaaatcaagatcacataccaacttctattttggttatccaaacacaagaaaaatggtaccaattatgtgtacgaataaaaaaaagtgttcatgatccggaagttgaatagttacagtaacaaaacaaatccagaacccaaatcttgattaaagaatacatgtatgttcatagctttcttgtttgcctcaagttgactacctatataaatcggatgagacagagccaccattaaaaccctaaatcactaaaggaaacagatatatacaataatacaaactctgatgcttcaaaattgacagcaatggaaactgaaaatgaagaaaagaaaatacctttggcagccttctgcttctccaaattcttctcacgggccatcttagccttctgcccattgcctccgcccatgggtgatcgatgggtttaggaagaaaaggagttgtggtttggtgtggtgtggtgtggtgtggtttttgagtgttaaagctatattatcaatggtaacagaaagaaactactagaaggtggcagttgacaaaactaagtaaaaatgaaataaaataaaataaaataaaataaaatttaaaagggtattgtagtgtgtattgtctagtatctctatatgtgattttatgattgactattatatttttttttaaagatgtaatattaaattatgtgtgactcgatactttgttagaacagtagtaatatttacgtataagagtgttaggctttttaatttaaaaaatataaaaaaaaattgaatttttttttcttaatttttaatcttgggagcatgtttattttaatatttttaaaatttatatttattttcctaaaattttaaaactttaaatattatttattttaaaaaataagcagttttttaatttataaaattttaaaaaaaacataaaaaaataaaaactaaaaatataattaaatatacgtataaatgcacgtaataataacctaatatatatagaataattctcaatgggtatatgtatatttataggaattgagattgtgtatgtttggtttgttgcaaatttgtaaaagatgttttaatggaatcaaatcatctattgttttattcttaaacaaaaaaaaaaattatctattgtttgatttgtttataaaagttatctaatgaaattataatgtaataatgattaagtatgtaatttttattacattgaagaaaaagctatgtaatgagaaaaaaaatatatatcacaaagattatgaaatttaagtgaagacaattttgtcttcaaattttcattctagcaacaaactaaagatttaataactttaaacgatcagctaatatagtggctcatacttttgctaaagcctttatattttaccctgattgtcaattcaaattgaagaatgttccttcaaatttactaccttggttggtaactgactgaaactttaatttaataaagctggaattctcattcaaaaaaaaaaaaaatgtaataactttgaaattgaattagtaatttaggtagaacttggaatagaaaatctaaattagacctaatcaatatttgatttaatactattgatattcttgataggaatataataattaatctattagttcgatttattgtgatttgtaaaaaacctagcaattaaaacattaatacgaagatgatgaaacttgttaatgaacatggggagaagttgaagacctcaagattttttccaattcttgatttcatttttcttgtaattttgctttattttattgtgtcttgatttttattgaacttggattgaatgaatattagtgtttagtaataattaacacttgaaatggtaaattagtctatgtgacatttgtctacttgttaggatatgtgctcctgcatgagttataaattccatcagcaacactagattccaccatatatatgaaagaaaacttttggtaactcataaatgatgaaaaatggtaaatgtggaatcaatgggcaatatggattcatcggtgtattatggtaattgttgaaatcaaatcaacaattttctcaaataacccttctttttttttcaccctctactttgttatccacaactatacttgtagttttatctccaacgaactcatgatgtcgagtcaagtatttgttagaatttaggataagataaataaaatttcacctcaaaactaattaacaatgagaaaagtgactcaatcatcttatatataacaatttatttctacacattaataatgtagaattaactctaaaaaaccctcctcacgtttgggcctgaaaagtgtgggtataacgaacgatctttaagagaccataagaccgaacatgacatttgaaagaatctcacaagaccaaatatcgaaaaatttgcaggtgtacattaacaatgtgggactaagtctaatagtatccaacttagcaaactctagctatagatttcttggatagtttctgttgtattgtctaacacattctaacaactcttttatgtaacagattcactcatcaatgagaatcagtagaagagcatttccttcataagcattctcacacagcacaattacaaaacagaactaacatgtaacagtaatagtaaaaattacatcacaaggctccacaatagcacaaaaaacaaatgcacatatatatacataacatacatttactgcagcactaatccgtagaatgctttgcttgtctttcttcttcttcagctttaatccaagctgcctatataaaagtacaaacaatttgtaactataggggggaaaaaacataacaatcaactctatctctaaacaaagaagatggcattttaccttttctcgttcaagttttgacaaatgcggcttcatggagttgcctaaactcaatccttcccatgcttcgtttaacttcttctcccttgcttctctacgagagacaaagcttttaatatggtcttcttctggtttgtgggcagcgttcaacttttccatttccagtcttgatttatgtttaaccattacttggtccaaaccaccagcttctgccatttttggattaacatttgccttgactttcataactttcatggatgcatcttcctctgaaacgagcttcattttctctttctcaagtctggaaacatgctttatcaatactttgtccaagctttcgtactctgggacaatatttcctctatgtttattctgaggtttatcatatctactgttaaccaaggcttgcatcttttccctttcaagcctgtgcactttcttgaccattaccttgtctaaaccatcttcactctctgtagttggagccttcgtattttgatcaacttcattttgctccaagctcacttcagcttccttatttaagtcagcattgtctttctccattagcccttcatcagaatcaggactagaacttctctccaactctactgtgactaaatcagaagaatttaatgttggatttgttgtactacttttttcatgcacgtcattttttcttctgttctttgcttcttggacctctttttccaatctcgatacatgtttcactaagaacttatcaaggctggggagttcggcgatatcttcttttacgcgactaatggctgctttgtttgatgcttctattcttctgctgcaatttctccttgcttcttcaacttccttttcaagtttagaagaacgcttaatcagcatacttcccaggtcttgaatgacttcagatgaagttgtatcatctccacgtgaactcttgtgtcccattttacagtcttctgctgatcttttctcattaacaaatgatgaagtttcactattatttgaatcaactttctcatcagaaggactggcatgctccactgtacctacgttggaagccttttgtctgttattcctggcttcctgaacttctctttcaagcttagtcacgtgcttaactaaaaacttgtctaaactcgggagttcttgttccgcttgctttctttggtattcccgtccttgaaagtttcaagctttccagctccccaagaagagagtcttcgctgcaatcctataccagaattggcagtagagactgagtcgtcctgcttgttgttttgtatttcagttaaggcagcatttaaaccacaagttgcaactatagtggcaagagaagaaagctcgttttcttgcagtctctgaagcctatcaaacatcatgttcacaagctttgtcatgctaagcttttcagacgacagtcttctcttacttttcctctgcctcaactttgaaactggcgtcttgcgatccaagtctggagatataccatcttttctagaagctgtttcaagttttgattcactttttggagaatcagactgttcctcgtcattctcattagtatctgggttctgactgatttttcgaagtagatctttgaattcatctttcttcatagaagggcagttagcaagcttcactaatgcagtttttaccgctgcagctacttcaatatcaacctcaaatgcagtttcaaaagaagctgtaacagcatgagtggttgatccttctctagaagaagaggtttctacatgacaagtcttccgagggcagtttggtatgtcgtacatgattactcctactgctaaggctgtttcaaatgcttcagctgcagacttctcggctttctccaattgtgcttcagcttctttacattggatcctgaataaacgaatgacaatgttaatcttagagcaaactatcaaatatccaatcctgatttctactaaaagctcacctagcagctttgagtattctacaccaagatgcttccactagtgcagcttttcgagcctcgattgccttatttgcagcttctttagcagccattttttctttaagtacccttgagtagtgtggattagaatcacctagagtttcatcgagtgtcaaattcatgccagatacttcctgtcataagtaatttcatcagttttctgtttataaaaaaaatataatgttaggcagaatggagatgcatatttacaaatataacctgcagcattttaatttttctatccaagtaagaatcgggtttcttgcgcgggaaccaattgataggcgaagcttttcggtgccctggcttcttaatttgtgaagtgaatttgctaagagaacccataattgattgactgttctctttgaaatgcttattctgcatttgttgacacaatatcgatgtgaaactaaaccgagatggataaataagactcaattcaaagggaaaaaactaggataacataatttataaaaatctagaactaaatcaagaacactaaatttcacagaaacttaaaaacgaacacaatatgatcaccaaacatataaggcctaaagttccaatgtcatgaatgtttcaaaatgcatcacaaagaatgaatacacaggagtcattcaaggctgaggatctgctactttcttcacttaagctagtggcttcgctatgatgaaattacgtttcacccaacaaaattgaggaattcaaaacttttaactgttgaaaacaaaactaaaactgaagcaatagaataagtacatcgaaaaccaccacataatctacaacgttattcaaatttcaatgttaaacatgctcaaaatcttggcacaaagatccgaatataaaccatatgcctaaagctcagtcattacttgctagggttctactaatggtttctgaattcagctagcctaaattccaaaaattaactcatacaagaactcaaagccacaaaatcggaaatgtaaaattcttaaacacttaacgagaaaaatcccaaaccaattagtttctcttaaaattattcacacatgtgtacatcaaattctaaataatcaaaagaacgaagaaaatcgaaagagaaaaaaaaaat

SEQ ID NO: 221430 - DNA, 3917 bp, Cannabis indica
aaaatgatatttacccttataaatacagtcttgaattttagtgaattatagaaaaaaaaaattaatctctattcaaaaaatagtatttttaaaatcaataaaaaaaaatatttgtatttttaaaagtaaatttttttaaatttgtaagttataaccacagatccaacccacccatacgagccaacttgaatagacactattgtgagatagccaaataattgagaggtaaaaagtaaaaggataatattacacgagttgaaacttcaaatcttatcttgggtaggaatgacaacttatatgatacgaaaaatgacttgaaaatataattaaaaaataataataaaaaaatctaaggaaaataactctttgtgataatgaaaggacaccatgttattgaactacaaaaaaaaaaaaaaaaaaggacaccatgtcattcagatatatttttggaattttttatttttttttgaaattatattttttggaaagttggacccatagtataataatgaatattcaggtgaccactagaattgaagaagatgacgtggcacttagatctggatgtgtttcaatctttattatagtccttggatttttcattattgccaatttgtttgtggtccatcttatctaaatatctaatttaaccccttcttcttacattccaatcaaaacattttcgctacatttttccaaaacccattaccaaattgagaattattgcttgtgtttggttagtggtaatgatataaagacaaatgaaaagaaattaatttagatttcatttattaatttgtttgtattttaggtatgtttacttgtgagattaaaaaagggaaataagaaaggaattcatttgcttgtttatttctctaatttagttaaagaaatatgtgaatctcccactaatttggattaaaaaataagattggtaatcccataagattgatggattgtcactctcattctttttaaaataatgaaatatcatttttctaattactttttcaactaaagaaaataaaaaaaaaatccaaatgaaactttaataaataatatttttgtaacctaaataatatattacgattccaacaatccatcattggaatatgcttattttgattccgattcctgtaattcaagtaaacgacatattataattctgactcatcaatttaattgagagtgaattcgattcttaatcattctgattacatgtaagtaaacgcactaatgcaagatgaaaaaaaaatgattttttttaaaaaaaaatgatttttttttatttaatccttattatagaaagagggagaaagaaaatgaaaggaaaaaaggtagagagaatgaaagttgttgtaatttgtgatttttcttatttcctctttgatttttttattgttagattttttatttattattattatttgaatctttgttggctggaagatgaactcgagaataatttatttttattcataattttctatttaaaatcaaatttgtactcaaggaaatactctttttttagtgtaacgtaatgatattttacaatcatatattagcttgatagcttaaaggtcttgggttcgtctctcttttttcccatccctccctcaccactaagctagccttagtggcttaactcaaggaaattctttggataagccctacatagtttgttaagttctaccaagttttaatttatgataggattttaataatttaataaatgctatgttgagtgtgattatataaaaataaaaagaaaatcaagagttttggtattttttttattagattaaaggctcatttgtcacctttttttatggatgttaataactttggatagaattattatatttagccctaaaggctccttaatatgttactaatttttattataaggaatttattatttttttgatgtacttgttgtgtaactagattagccatgaacgaagctatggatggtcctctgaaagactttgaagataaagaaactagccccatacaaagtgatcactatgagtcatggatgtgtgccctgagggctcgaggccagcgctttgtcaacagtgaaccacctatcatgaatatgagataggtgggaaggattgtggatgttgttaaacgatcccggattagaaggaatattgatgaagacttcgctacgacctccttattagaaggtcgggagaaggatgaggaactatgttaggaaaataacttagctaactcgaaagctaatgtcacaccaacagagttgccttcaatccaaactgccactgtcgatttgtcattgccacgagatatgccccatgatatgttgcggacaccccactactgcaagtaacccgtgcagtggaggtagactcgagtactgccactctcccaattgtggtggaaagtcaatcaaaatctcttgctttggtaactaaatcattggtgcgtgttggaattaaacctattgacaagggaaaggtcattgtacaatctgaactggaagttggtaaactactcaagaagacttttgaacctattgtcaaagcttaacataagaagacttggaagtggcacaaatcaacaccagttatgctgagtactagcagtaaacctcctagtctgtcacatacgactcaattaactaaagattcaactctcggtcgtttatttgccagattgaagcggacacgtgataataatatttgtgtggaggttagaagagtaaaattgaactctggttcgggtgtgtctcctatggtgtttaatgaattgatggcgtagtctgtagtccccatgagtatcctatgttggaatgtttgggttttgggaaactctagtgcattaacggctctgtgagctattgttcgtaagtcttctcccagtttagtctttctgaccaagactaaactgtgtggtgtatgggtagaaggtgttcgatgacaaatacattttaggaatagttttcatgttgattgctctggtagtagtggtgggttattgttaatttggaatgatgattgggatgttgagattaagtcttactcgattggtcgtattgatgctctagtaacgtctctgggtcttccacaatggaggtttttactggcgtttatggtaatttgaaaattcatctttagaaagattcctagcagctcctacaaataattaaggtattttttcaagtttcttagatttgtggggggaatttcaatgaaattttatctcttattgagaagaatgagggagtggatcgtaatattggtgctatgaatgaatttcaaaaagttcttgatcactatggcttcgatgacttgggttatgagtgtcctagttttacatggttgaataaataaaatggcctggctcatgtagaggaaaggttagactagtttgtctgtaaccaagcttggcatgaattattctaaattgttttagttatttatggtgagtttactaattctgatcatcgtcctattagggccagttagataatgtgattgcacgacaagtcggccccaaaaaaaataagttcagatttgaagctcattagctaaaagatgatgagtgtcgtcatattattgctcaaacttggcaacataatagggctgagttggatagtgtgtcaggccttattgataatttgacaagatgtgccacgaatctgacatattggagtaatcaaaaatttgggtctctccatagacaagtcaacaaacccaaaaaagcttaagaagttagtagtgtgtggcttcgactgttgatatggaagaggtgaggcgtgtggagattaagcttgaagaccttatggatcgtagaattatactagaaacaacactcacattctaagtggatgatagctggtgatgggagcactaagtatttccataacaaggcatctgcaagaaagaaaa

SEQ ID NO: 221431 - DNA, 1548 bp, Cannabis indica
cacagtttcaactccttagcagtgccctttagttttatctcaaactgagaggtgcttagcataccctaccaagcctgactcaccacttccccacaatccggtcttgttgtccaaacttccaagaatcgaaacgggtacttgagtttagcatgatctccccaaacattcagaacaatgggagcatggtccgatccaaggatagggaagcttgacacacgggccctcgaaaagtccatacaccaatttgcatctgctatggcacggtccagtctctttcgaactcgattacaagccacacgagagttttgccatgtaaaacaccccccatcacacccgagatccacccctcccgtttcaaacaaaaaattattgagcaattccccttcattcctgttgtatcgcctaccaccagccttctcagaaccattagagataacatttaggtctccgatcacaacccaaggagagtcgcaatctgcgaccttctccattagccattgccaaaaactatttttctgtgcctcatatgggaaccataaacacagaagaagctccgaacgggcagaccatttcccaaattaacttcaattttgaatccatgttcaaaggtttcaataacgtggcattgaatacccaaactccaagcaacacaaaacctcctgcgattcccaaagaaggaatacaacaaacatttgcaaagtccaatcaattactaatctcagtcatcctattcccatccaccttcgtttcagcaaggaagatcaaatccgcattacattgatggatcagaccccgaagagtcctttccgccgagggtctacgaagtccccagcaattccacgagaggcacctcatgaggatggtgggggcatggttgcggctgcctcctcgcctcctccaaaattttgttcgtaggtgattgggatatcaacacaatttgcaaaaatatttgacagattacctggaaattcaagatcatccaaagcaattatcttcttcctaccactgcgagtcttaactcctgagaatttcctgacaacacttttcttctcctttccttttggtttcttgccacgactattaccaattgaaccctcccccttttcagtggagcccatacagaaagcaccaatttcatcttgatcagaacttttctccttcacaggacaatcaggaagctcgaaatgtggtgaggcagggaaaggttgtaaccagcaatgagcttttctttttctattatttcccagtaagtgattaatcatctcggacagatcaagcgagttgcatatgagagattgctgggccttatagagattaaggaaatcaggtccatacaattggaaaaatagcttctaggcttcagagtctttattgggccaacatataggtaaaggctcgggaaaggagtggggcttttgggaaagacaaagccaatcgtgagggacgtcaatacattgggccagagtaggtgtgacagtagtaatcccgtgatccgtaaggggaaacaccgggtaagctgtgcaatcccacaccgcctggggaaggtca

SEQ ID NO: 221432 - DNA, 3610 bp, Cannabis indica
ctacatggagtagggattgcttccaaatctaacactagaggcaaatgttatagcagacaaatgcttttaatacctcaaggatcatgtgctgctacaacatttgcctctagtcttggattttgaagcaatccctactccatgtagtcatcaatgacttgaccaaatataattgtattaccatattctctggtatactcgtgatattattcttcaataacatcgatgtattgagtatctaccaattccaacttccgcagataaaatatcacaaattcggctttactacaaataattaaaacaaaattatattagatatataaataattaatttgaaattaacaattaattattaattaatgtaatatgactttaattaattacgtcatataatctgctcgagtcccgccttctgcaagattcacagtggtcagctgattcttcaaattcttcaaattgtttcgcctttgaaagtaatcatagatcatcgacaggatacttgagaagacaaaacagtttggaataatccatatcgttgcaaagattcgcccttgctgagtgtggaatgagtaatctccgtatcctattgtcattgaggttactaaactagcataaacactatcctggatggaataatactccttgtagaatgctgctattcccaaaatttgtagaaatagcaaagctactaaagtaaaatcgaatgtcttgatacgggtgagaggtgtccaattcgaaccaagaaggttcataaataaacaccttagaaaatgatctagccatattagacaaaatataacgttgaaaatgagaaaataacagaacaatgccactggttttatatctccatatccaactgtcgatacactcaccataatgaggtaggcaaggtctattttgttggttgattctttagctaagcatcattgtacaacgaaaaccacaaatgaaagtacccaataaagttttgttcaatgtgttgatattatttgatgtaggtgctctttttcaatgaaaaggcaagtagaaggcctggagcatgttctatccctaagacaaaaaggactcaatcctttgattcgattcacccaaccctgtagtctgtcaacctagtaatgaaaaaaaaaacaattattaacaaaatatatatttattaataacactgtaaagttacttcaacatgataaagtggagttttttccacatttggctatagtaaatgttgacttaaaaatatagacatagactctaagccacacccactcattagattggtaagaatgagatatatgttaagtataaatagaaagacacaacaatttatagtagttcactacctgtctcgcgacagtaatggagttacgtctactttgagtttttattctcacgagatggattccagaaatacgtctaagtctaaatgctctaatttctagacttatgtctatttttctaaacttttaaaaatgaactagaggagctctccttttataggtgaaggaagtcttattaaatgagaataaaatattccaaaaaatatggaaaaatacatttaggctattttgaccatagatgataatctaacagtaaatattaacttctgaagttgatcgtcaatttttggagttcgagtcgtaacgacgggacctgctttgggtaagttgtagcttaaatttgtaactctcttggggtaaaatttggggtcaatagcttcaaaattatgattaaagtgcgagacaagacttgatagaacattgaaatagatttgacacgctagttgaatcacgccaattgaattaatattgagtgagttatgactattttactgaaggttgttctgggcccaacgcccaacctcaatgctgggtgagtgggataatgcgtcagggatgtattttttgattcctaagtgatattttgacatcacttagtccattttctatgttttggcaaagctagttaccaattctcaaagatgttgtcgttatccaaaatatgagacttaaactacccggtttacgagtaaatcaccttgttaaaaaagtaaaatatgaagttgtgaatttaacttttttgacttcatgactctcatttattgtcaaaaactagacagacgatcgaaacagaatcggataagaagaacccaatgcatcaggccatttgtcaacctaggcgttgggtgcttattttagagctttcgagttacgttttagcacttccaaggttctagaacttgaggacaaggtctcctacaatgtttttaactatttcagagagaattcttggagcaaaattcacattttagtaatcgaaactagcgcaccacgttgattatcaccccagacactgggctcagttttgatacccttgagattgtggttttcttctcgagtttgcttgtatcttcgttatttcttatgacagaaaaaatgcctcagaacacttttttgagaaactgattggaaatggaacaatatgtcaacgtgggtgctgggtctagtgtcaagtgtcaaccttggcactaggtccagtttcaggtcgcttggaagttttgttttgtccccaaaaatagttaaatcttaatccttgctagaaatggagaatatgtctggaagaattctcgaaaaaactccttggtattagcctttgttgacaaaatgtcaacttggcgctagtctcttgtttcggcatccaagatgggctatgtcttcctcgaaagcacttgtttctcatttttgatgaagaagaagaagctgcaaaacttggatttttgatcgatgctaagaagtggcccagattgatagattgtcaacctgggcgttggggtgcccgagcaccgggtgttcgggtggtcaaaaataaatcaaattttattttcgaggtgttgattcgtgtattttcagctttcagagcctggacggtacagaatactaacttaaaattttactttaaatcaaattttagctcctggggcttggattaggttggttcatgttttcatgttatagaatactgaaagagagtgagttggatccaagttattgaagtacgaacttctatctcggagctcccgaggtcaaccaaggcacagggctagggtcccctcctaggtcgactgctatggctcgggtctactcaactctgtgacgtcatcctttttgtcacgtgtcaaacattgatgtccatgtcatcaggaaaaaatttcgggttaacaacaataaattttccatatttaaatatacatatggtataggctaataatacgtgtatatatatactaaacaatcattatcacatctctgtcctagctagctacttatctaattgttactttactttatattctatagtagaatttacataaaatatgggaaaaaatttagagtttacttttttatggcataaatttttaatccatagcttatgggttttttattttctttacaattttatgggctttcttataccatatttttgtaaatatatattgcattttcaaaaattgaagtatttaagaatacaattttcgaaaaaatactttaaaataaaataaaaataaatcctggaaaaattattctaattttatgttggcccaaaattaattaataaaaat

SEQ ID NO: 221433 - DNA, 2735 bp, Cannabis indica
agagagagagagaaagagagcaatagagcttgagagacttagtattcatgtccattttctaagtgcctaacaccttttatatagtttaatgcatacaaaatatcactattaaaataggttaatatccctccaaaataggaaaaaaaaactcttttatcttttattttaaatcataaaaaggaaaattaatatccctaaaaaataggtagataacttgagggagaatctctatctttttgggttgttggagttgtctcgtagttgaaatcaagttgttacccgtccaggaagtttgatgcaaaaatttctaattgtttaggctcttttgtacatgctggctagcctgctctattcttagggcctcggcgacacatagatttcattggctggccatggtatggtccggccagaacctcttggctggccatttccttcaatcttagtcttgcctgattatttggaactcttgttaattgacttgttatgtaaggtgatttttgctcatctattgacagactgtattccacttggcctcagtttttcctatgtggacatgccacatcaagtgggcaaaaattgagtaaatatttggccccccaagtccctatgcagacgtctgtacggatagggactttttaaattcagctttggttgtaaaaaaaagcttagccgagcagtaatggttggccaaatatttgaccttttagatggtccacattatgacaaaaaatgactttattgccaatcattatggagatatatgttttggctgcacattttcccatttacgaactgttagtcttctacatggctattcttgtggagaaataacaacccactaggtttttggggggaaaagaccacaaaacctatataaggttcatcttttcttcattttcattttacttcacttcaacctctctctctctctctccttcgaactctctcagtaagaagaaaaaataactctccattttctcatcacactcgatgccttaagctcttccgttccttgaggttttcaattttttttcaacgatctaaccatcccccgagtatctacagcgaccttcatcagtgggtaattcttaaaatctcactttttcattattttcttgaattcgccattgatgactaaaagcttttccaagcttttttaaatctttaattctcatattgtagtgtagttttttttacattataatccatagctttaggatgcataatgtaagacttcctgatgaaaaagattagactttggctccatttagattcttgaatctttgagtaacgaagaacattgttcgaattcttgaaaaataaaattttttattctcaagagcctctgtctggcacatagggtctgtttgtgaccttggccgactcgtgattctaagttaggactctggccggttcatggctcaagccctagaaccctggtcagttcatgactctgaaccccatacctagtcggttcatggtatgtggttttggcatcattgggttggccaattctagccgatacttaatctttgcaaatactctgatggctttttgagctcatctcacctttatcccgtacttgattcctgtaggaactctgtatggcatatcttaggttgagcctatcttggccaattagcagcctaaactcaatgtctgtttaattttttgcacatggatcttgtactttgatgattaacgacttcgcacattaggtccgactagctaatacccttaggtttagttaaaacgtgcttaagtctttttattttgtctagttgttcacctccctctgccttttttacatagatgaacccgcttgacttttggggaggtgacaaaccaaatcaacgaagacttgctaagtattctctacgaagaccattatccagttcattcaaccaactcttcttccaagggttcttcgagaagctcctccagtgatttcgaggttagcaacgattctccagaacttgaggtccaacatcactgctattcagagcgaataggcagtgagttttacggtcaattcatttggaaactaaactaggggtggaggtagttcctccctagatcatggacttatattgtcggagacggtgtgcctaacacattgcccactggttgggcaactcttttaattggagatttccctacaactgagactgttatcactgtttccaaacactttgagccaaatcctaccatggctaggacaaaacaaatgtgccgtaaggcacttcctcaagaccctcatattgttgagttgatgacaagagggagggtctgtcatgtcgaggaggcagaacagccaagggccaaccaggtaaaggaacatgtggctaagcaacccatggccaaccaaggtgaggagacattgaccggtccaaatagtcaatctgaagctgagtaggctgaatctattgtcgggccaagtactgtcaagaggcagtataagacttgcattgtgatcttaggcaatcccttgggctcttatgatgagattgggcgacctttaaatgtcgtgggtcatccgtcaaaggtcaggattaaccatgtcaaagaagaggcccacgagccatgggtccttgagtatggggataaaaaacgatgggtatgtcctccatcttccctgtcggccaagaaacttgacggaatcaaggaagggggacttgtgggaagagttcgatgtcaggactactagggattagttggtgcattatttgttgtcc

SEQ ID NO: 221434 - DNA, 3169 bp, Cannabis indica
tttgctacagctgtttttcctcaaagcacagcaacaactgttttttcccacagcacagctgtgccaaactggcccttaaaaaagacatcacagaataataatatgatttcacgtagataataatattaaaaaataggtggttccctcaatattgttggccagctcttaaaaagatcgtctttatcttagcttggacccagtggagaaaataacagccaaagacattgatatttgcaaaatctaaacttattttcttttctctttgttaaagaacaaacaaaaattatcattcctaaattccttaagattataagagtagatatcatattttcttatattgtcatttaaacaaatctcaaaacttctaattgtttctctaattcactttcactcaaaaagatcgagagaaagggtgagaaggaattaaaacatcacgtagagcttttggggtgttgtctatggtcctcctcgtccattcaattgtaggaatagcttcgccagagctagcagtgaccgcgagaaatatacaataacagagatgaaaggagaaaataaaaaaaataataaagataaatacaaaaggcaaagactttaaaaaagaaaagaaaaagaaaaacaaactcaccaaaaatttagtccctgcattacaatgagctaacaatcatatgtgaaagttttttaagccaaaatcttcaaagcccaccttccaaaatcaccaaaactggatgaaaaaattacccagataccaaaaagcttgtctttccttctcatgtctaacactcttaactttcttcttctaaaaactgaaactttttggttaacatccaaaaaaagaagtatctttaaatttaaaagttgaaaactttacaaaaagatcaaaacttttgctgaggttaagtgagaagatttcaaaagctgggagagatcaatgcattggtaatgggttcaatttattaacatgcaactccagtgagttcagctctaaaatgggtctgacaaaagttgcagagagagggaagaaagagagagactttgaaaaatgaaaaagtctaaagagaagagtgaaattgaaaattgggaaggggaggggcatgacgctttcaaaagtacttttataaaggtaataaagggtatttgcagtggtcacgttacgatatttaaacgttaaacttagagctcaacgacatcttatgctgatggcaaggaacacataaggagatatagagttagaatcaggagggtccattgagtagccgcgacattgaggttagagcagcctacaacgcctataaaggacagggacgaaaggaaggagctagtgtcggccattagagagagaaagtttagggttgatttgagaagagactgattaatacaaaatatgggatttaaaaaaggagtttacttaaatatggcacattcaaacccatataaaagcccaataataaaagaatgtcataaaaatgatcaaacttagaaatgtcatatttaagtaaaaaaaaagtaaaatcccatatttcatgtaatttttatagagtggggaaaaacatacaagtggtgataaactggacaacttttaagactctcactattagagttagttaatataggtgttaggtgtaaatgtcagttagttaagttagttagtctttcatcctaactaactgagtttctctatgcctatataaactcagctcatgtattccagcagtatatcgagtaataaaacaatattcaattccaattgctctatttttctctcatatgatatcagaagtatctctgcccattgcttccattgccagaccttcaacttgattctaagatggtgctcctccatccacggtcgacccaccagcatctgacatcacgtctgatcctcctgctggtcctaatctaaattcctcagccgttcctcgcagaaatcaaactacaagtcctccatcgcagaacacaagatcaatccaccattgtcgacgatcaccacagcacaactcctcatgccaatcgccctgtcaatgatggtcattctagtcctttctttcttagcactggtgatcatcctggacttgtgcttatgtccaccgtcctcaatgacagcaactatcaatcttggaaaaaaggaatcaccacggctctcgttgccaagaacgagattacattcatcgatggttctctcccaaatccaaaaattggtaatctctatctcaattcttggcttagatgcaacaatacggttatgtaatggttagtcaattctgtttctcaagaaatcgctcaaagcattatgtattttgatttggccattgacgtgtcaaacgatcttgatgagatattcaatgacggcaatggccctcgaattttcaaattacaaacccaactcacccgtttacaacaaggtgaccaatctgtttcatcatacttcactaaaatgaattcccttatagatgagttgaaggaatttcaaccaatcaccacctccacttgtggtgttatgaaaatctttttagattactataaccaaaatcaagtacttcaattcttgattggtctcagtgaatctttagcatcggttcgagcccaaatcttgctcaatgaaccagttcccaacctatctcgtgtgtttgccatgatcattcaagaaaagcgtcaactgtctcttggctctgctgaaacagttccagtggcatctgctacaagctccatgactaccaatcctacaagagccaagaaacctcgtccctcttgttccaattgtggaaaagcaggtcacacggttgacaagtcttacttcttacacggtttccctcttggttatggagataaaaggcgacaagaaaaagggaaagctaaaaccaatcttgccagcagttccaagagtgatgcagatggtcaatccatttcctctgatctttcaacccagtgtcagtacttgatttctctcctcatctagtagcccagcaacaatacacctcatgttgatcttgctgccatggcacctgctgcttccaatcttgcaggtacaaatcaattctcctctccattcacatagattttggatagtggtgctacccaccacatatgtgctaacataacatgtttcacttccttttccaatcatcattttcctaagcatgtaattcttcctactggccataaaattttggtt

SEQ ID NO: 221435 - DNA, 2203 bp, Cannabis indica
tttaatcacaacactataaattaaataaaaatatatatttcttttattatttttatatacaaatataaataatacatatatatattaaaaaatttaattatttaattatttaaaaaatgaaaaaaaaaaaaaaaaaagcaaattcaatgttgtctatagtttatcactaagaaacaacattaaatttaagtttttagtgtctcattgaagatggcgttagaataatatatttgtttaccggtttgaggtattacgtatattttaacatatttttaatcctagcttttgttgttgtagattcatcatctcgagatcaaaattcgagtacacgaattctgaaaaagtccttctaatgacatatttattattaaacaacgagaagcaatggtaaatgagtcatttccttacatttattattattattattattattattatttgaatagaatgaatttcttattaaaaggcacaaagccaaagtaagttgcaaagactcaaagaacattcgataaatccggccaccacacttttatcatatccaaggataaggtaaatttagcaagattgtgatctaaacagttcgcataacgattacaaaagagaaacttagaaacattgacatgattacaaatatcataaatgtttttaaaaactaggccaaactcagccaaaacaaagtccttctgcaaaatatggataacacattgacaatccgattcagcctccacattgttgaaaacaacaaatagagaagtaggccatggaggacttccatagcttctgccactggcggggaaagggatcccaaagctataacaattgcagaagccaaacaattactccactgatcttgcaccacagccccatactgtcgatcaacacattaaactcccgcatcagcattctgtttcagctgactactatcaagtggcacccatggaggaacaatcgagcacggaataggtagaacgagacacgcaacagatcgagacttcttcgcattagctacctgaaaattctttgtgtactcggaagcccatcccaaaactccttcagtgtcgagcaatctcttattatgaactcattgatttctatgaaaccaatttctctaaagtaggactaataaaaattccatctcaactctagttgaaatcacctcaagttcacagagataagcataaagattgatggagggtaaagaggagggataagtcacaaaatgaactctattagtaatatcatggagacccgagtagtcccaaaaggcgtggaatgaagactcctcctcatgacaccataaattagtaggaaccttatgtgtagccagattacattttgtagggaaccaatcaaaacaagccttctatataaacactttaattttcgtagggatagtgagactccaaatgtaattccactaagaacaaggctctgaagaacagtcaaaatgaccccttctcagaagcctaatagaattccagtagccacttttcacagtatactagttatagtgccaaatgagataatcttgagaattgtgactttgaggaatagataaaatctgcctagcttcatcatcagagaacaagtcatcaatcaactaacccttccactccccattctcatgaatgaaatcactaaccatggttatcacatgatggccaccaaaagaataagtaagagcatcagaccttttaggaatccatacgtgagattttatgttaacatttctaccatcacctatgagccaatgagttccatcctcttaaagttcatgaccccaaatgatacttttctaaatgtacgaagcctttgaagtttcagctgcattgagaaaatcacaattaggaaaataaatccctttcatgactcttactgccaaggaacttagaacagaataaagcctctatgcctacttatccaaaagagctttattaaacacaaataaatcgcagaatcccattccactattagacttgtgccaacataatctctcacaagtacatcaatgcatcttctggttatcatcatccccaccccaccaaaagcgagcacaaagtcggtgaagttcctaaaccaattttacaggaagatgaaaaagattcatggaataagtgggggatggtttggatgacagcttgaggagcacttttcttccactagcaaataaatacttagtgtaacaccctaactaccttaggcg

SEQ ID NO: 221436 - DNA, 2517 bp, Cannabis indica
gatcctggtaaaataatttccattatctactagatctttccatgaatcgattgatctaggggagagcttaaggtaccatcgttcagctaggactgtcagcgtagcatggaagattctacacctaacgtaatctctcacaccttgcagatcggtctgtacttcaaagtagtggatgtgagtcagtggatcttctttcccggtgtattgatgccaagaaagattcttgaacttcagaagaatgggaagagctttgattcgtttggagagtggtgagcgccattctctgtcgagctcgaattcagtcagcttaagtgtgatgatccccttcactaaagcagctaggttgttaaattctgcctgattgatcctgtgagtgggggttcgcgtcccagatagagcttcttttacttagacagggtcttctaaaaaagttcccacatccatcattctcttcttggttaagaggtcatgcatgtctcttggtcttccaagtcgttcttgtactcaagttgacctgtgtcttttagttgtctcttgaccatggggtcgtgaaggaaactctagtgaagcctccagattgactctagattttctcaggacaacccgctgtgagagtgttcattcagagcgttgtaatggctacttccctgaaagtagtcttcagtaggatcacaagtgtgaagagaattgaattggttgcttaagtttaatttttcttcatgtactcgagggaagtactcgtactattggccatcgaggccatgggaaaagtaacggcacaattcatcccttcatctcgaaagtacttccgagtatgaagtggttcattagtctttacccgtcggatctcatagcctccggtctcaaagtagcgtctcctactacttccttcagcttgagtggtaaatccatttccccttgtagggtctcaaggcatggtctcctaagaatgatgagaaggacttggtggaggagtcttgttggctctctcattgttgcgaggttgttcaacatcaaatggagtcccttggcgccctcgagcttgagtcctctcatgctcttgctcaaaggtaccttccttccaggaggtcgtcacgtctggtgtttgcctagtcactgcttaattatcaggtgtagtagaggtgtttcgagcattaagggtgttgccttcaacactagttcccacgtgactagttggttgacagggagtctctctcatcaactcagaaatacctctacgagaagtagttccacgattatagcaataagcctctataatccactgagacatgttagctctctattattcctgctcaatgcattggctttcaatgttcttccgattttccatgaaccaatgttgaaaccgtttatgttgcttatcgagagagtctcgtaattgttgttgcaagtcagccacaatttggctaagctgagcgacttgaggattggcctcctcaaggttgtctatctccatgtcaggctccccatgtgggaactagtcgttggtggtgcccttggagggggagttgaggagccgagctgaggcctgctactggcgcttagggcgcagaagtagtcatgttccaactccatcaactggcatgcccccagttgcttggctagttgtcaaagtctatctaacaacacttgtagaacgcgttgcaaccatcttgcttagtaactttcttgagctatggctctcaatgaaagcaccaaattattaattcagaaatttggactagacttctaagccacacccgctcgtagattcacgagaatgaataaacagttaagtaattataagagagacatagcaaatttatagtagttcactccctatatcgtgatagtaatggatctacatctacttcaagtttttatttctcacgagatggtgattacaacaataggcttagtgtcagaatctcgaaattctagagagagaagctctgaccttgtggatagctttctaaatgtaaaaaatgagctaaggaagctgtccttctaggtgccacaaaaataggagaaaatacaaataagatatttttgatcattgatgatgatctaacgataaaaactagctcatggtggtgatggctatttttcagagcccgacgagtcccgatgcgggtaactcggagcttatttttataactcccttgggggtgaattttgacgatgaaaacttcaaaattaagtctatagtgtgagacttgacttgagatcttgaattagcttcgaaactcgagttcaatcgtgttaatttgatcaaaattgagtgagttatgactgttttattgaaggcagttcatgttgggttttgtgccctaaataaaacccctttcaatataatcagatttactaattaataaagatcagaaatcacattttatgttgcatggttcacatgatttatttcatgattatatttaatgtagaaattctattaggtccagaggatatgtatttgtacatgattatagtgttgtcagcacagtggaatataatcatgat

SEQ ID NO: 221437 - DNA, 1661 bp, Cannabis indica
gttggattcaagttattgaaatccgaacttccatcccagagttcccaaagtcaacatgggcgcagggtcatggtcccctcccaagtcgactgctatgattcgagtctactcaactccatgacatcatccttctagccacacatatgaaacattaatgtccacatcatcaattttttctttttttttttttcaaattaacagtgtgaatagttcaaaaaccataattcataattcaagacaaaaacccttaatattataaagtgattaatatttgaactagtagcaaagactaatttctgtccataaatacttgatataaaagtaattttaaaataatttacaagtttcttgatttcaagagaagaaaatgtataataactaaatatagctgctatgttggtttcttttcctcaattaaaatttcccaccatctcaatcaatgaaaacattagtagctattacaaaaatgtacacaaaacacacatttgaattttcaaattttcttccttttaatttatttaaactttaaataactattgtgaccagcttaaatttaaatttacttactaacgacgtttctccaagaaaaccttacaggttacataagactttagagaggggagccgctattgtcaaaggcacacgatcaaaagctttccaatagaattttaaagtaagattcttgcagttaagaactttaatgattttactagtaatccatgcatggacattgtccattttcaagatgatgatagcagtcacaaacaactatttttcttttgaaaacctttgagacaagcttaattgtagaatgacaatcattgcatatcctaatattctttacaatccgtattaatgatccaggctctgtgcacattaagccaaaagcaagggcttcaatgtggaaaacaaccccttttgtcttggcaatgtagctaaattttcttaacaattgcatcccgttgatgtaccctgctgttgtgaattagtaaccaattgcagaaacaatgaaaagatgaagagagaaaattacttcagtgagtgttattcaatctcagaaaagggattacaattaagagtccaataggaccccctcctgtaaagagaaagtctcaatacatgcataaaccccataaacctcccaaacaagcatataaccaactacagctcacccaacaattacaataatactctcataaagtaaaagaccacactacccttgagaagtaacattcttacctctcctagcataggtaaagcgcaccttagtcctaacattaccccccgatatcatgaaccttgtcctcaaggttaaaagtaggaaactggtgacggatggtctcgaacttctcccatgatgcttccaacaagggcagatttttccagcgaatcaaaacttcaacttcatcaccaggcccgtttggtccatggcgcacatttagcacttcctcgggttccacttgcaactccaactccggagtgagttgggaaggaaaagtggaagatgaggaagccgccccaatgacagcttggagttgggaaacataaaagacgaggtgtaccgctaggggtgttcgcagtgcgggtggtgcggtttttcaaatttcccaaaccgcacctgcaccgcgaattaaaaacctgcaaaaaccgcaccgcaaaaa

SEQ ID NO: 221438 - DNA, 1481 bp, Cannabis indica
aaaaaaaaaaccttaaaattaaaagaaccaattgaagtagtagaaaatcattattacaacagaggtaactttagtaaataaagaacaagacatatatatacataacaacagttacaacacacatattaatgaataatttcatataataaaatattacttttaattttgacaagtatgtgtactaaaattaatataagagacatttttaattatttctcttacattttcaccatatataaatacagtccaaagaatcagttttttgacagtttcagtttggaaaaactcatgcatgattaggtttcagaattatttctctgtcaggatagtgaaaacacaaaattcagtaatggaaattaatgaggattctcaaaaattgctgacattatagtctgtctatatacacatatatatatggtccaaaataataattgtgaccaggtaattgaggtgtagtatttcattggaacaagcatcttcatctcattgagtagtaaattcataaataataataataataataatatatagggaattgaatgtgaaacagactagtcataaacttaaagaaaatatttcaatatatagagagttggtcagatcaaaattcagtgctcttatttattcaactcagtttccatagtaaaaaaaaaaagtaacatacacaaaaacagtataagaaataaaaaagtgacattattgtatttttcagaagtacccataattcaaattttttttttatttaattgtgtaatattatatgacattaaagaagatggacaaaaataggttagaatgatcaattatgaatgattttatcctggctgtttaagggtcctacacacagtactactactgctataaatgaatgaatgtgacatttatttattttttattttattatatgatcataattaattatttatataaaatgaaaacggtcaaatttgatttgttggagtaggatcagatatgtataaaggtaacatcttttgaagtaataaaaacagagcccaagtaaggtatgtttccaatacaagaaataatgataacacagaacagagatgaccccatcagtaggaaacatcacccacttaattgtcacacatttatatattataataataataataatatttgcatttgcagttaggaaagccaaaaaggaaactgttctcttcatatcttttttgctctattatatatatatatatattatatatatatgctttgctttgctgtaagaatctcattcattgtcttgtaattttctttctctccttccttattgtatatatacatgtatatgtatcatcataactcataagcatctatctcttttctctctgtccttttatttggtatatatataatatatgtatatgtattacttttgacagagactgatgaagtgaagagggacatgcatgatgtgttcattcatttcaaagtttggttttatatacttggtggtggtggtg

SEQ ID NO: 221439 - DNA, 2195 bp, Cannabis indica
cgcctaagatagttagggtgttacacgattgatggtgtggggggatctaaatgttattcttaatgctgaggaaaagagaggtggccaagagttccacaatcgtgaaggggctcatctacagaatttcttgttggaaaccggaggcgttgatctgggttttagttgcccaaagtttacctgggtgaagtcaaggggctctcataactccgtgaggaaatggctcgatagagcagtggcctttgcgaattggtgtctaagtttccctaaggcttccgtggtgcaccaccctattatggcctccgatcatgccccctggttctggatactcaaccaatgactaaaaaactcaactatccgtttcagtttttcgatgtgtggacggcggaccctggttgtgaagcagtggtcaagaatgcgtggaaaaactctttctttggtcaggctagctgtcaggtttgcaggagactcacggaaacgaaagtagctctcaaaaagtggaatagcaatgtgtttgggttttgtgacacacaacttaaaaggctgtatgataagttgagtgtgcttcaacagcaacatgatgaggccgctagtgatgaggaggtggaagtgcaattggaaattcttgagttggaaagcagaatggaaagaatatggaagcaaaagtcaagagaactttgggtgttgcttggggactataattcgaaattttttcatgtgtctaccatgattagacggaggagaaactcgatttgcgccattaacgatgttgggaacggctggttgtttgacagagagggaataggggcttattttaacaagcagttccaaatgcttaatgaaagccagcaaccggtcttggatagcgattttgattcgctcttccagcccctggttactgatctcgacaatgcggagctgtgtcgatgtccttcgtttgaagaaatcaggaaggtggtgtggaaggttaatccgttgaaggcgcctggcccggacgaattttcgggagttttttatagaaaatattgggatacggtgggtcctgaggtttgcctaatggtgcaggattttttcatcactggaaagtttgtggagaaatttaatcatacgttcctgtgccttatcccaaagagtgataacccgacttcatttgatcagttttgcccgattagcctctgtaattttgggtataagatcattgcgagattgctcacagacagattgaagcctgtgcttgacaagctggtgagcccgttcgagtcagcctttctaccagggagatggattgcagagtgttctgttctcgcttctgaggcattacattctttgaaaaaaatcagaggcaagcggggattcgtggcagttaaaacagatatgcacaaggcgtatgatcccatcgaatggagttttcttcagcgagtgcttagagctaatggttttaatgaccttttttgccgtatgatccttcaatgtgtgtcttctgtgtcttactcggttcttttgaatggggcgccgctgaaaccttttactcctaaaagaggtgtgcgccagggcgaccctctttcgccttacctgtttatcctctgcagggaggtgttatcaaagctgattgtcaaagcggaaaatagaaaacaaatctcggctattaaagtgggtaaggcagctcagcctatttctcatttattttacgctggtgatgccattttcttttgtaaggctaccgcggctgaagctaggattctcgaccaatgtttagaaacatatgaagaatggttgggacaaaaagtgagtagaaggaaaactgggctggtgttttccccgaaagtgctgggcggggataaatcaagcattcaggagattcttgatttgcatttacttgacaagaaggaaaggtatttgggaaatccctttttctactcggctaggagaagagatgacttgaaatacattaaggagaagctcctgaaccgtttggaggggtggaaagcgaaacagttatcgtttgcgggaagacaaaccttgatcagtgcggtgctcagtagtattccttgttatgctatgtcaactatgaaaatccctgtggctatatgttctgagatggacagccttgtgtctcggttctggtggacgggatcatcaaataatgggaagcggtatctagctttgaagagttgaggagattgttgccaacccaagcg

SEQ ID NO: 221440 - DNA, 2551 bp, Cannabis indica
gcaaaactgtcaagcaagaataaacaaaaaagagttaagcaggccatcaagaccttggccaaccctgttttgctggccaagggaagctggtacgccagccaagggaagcttgtagggccggccagatcttgagaacaagctggccgaccaagaacggttgtcaaaccaaagaggtctgttcaaccaaggaggcctagcctttgcaaaggaaagctgactggccaagctgaacaatgaagctgtgtggaaaaaggatggctggaccatacctggttgacccatggtaggacacatgccaaccaagccctaaaaataagactggctggccaacttgtgcaaacaactctgaagaggctgaatgaattgcgagacaggtccaacaacccacgaagaaagagatattccctcaagatgttagtcttatattctagggattgaactataatttttgtaatttaaataatagataaaaagatgttaatgtccctattttaaaggaatatttttacctattttaatgaggatctctagtaagccctacactatagaaagggcattagatcactctattgggggtaaagtcattctacatgcactagaggggctccattaagcttctcacacgcccaaagcctccctctctctcaattttcacattccatcaatgcctaagtcaagtctcttcataagttcttcacaagatctcaccaattctttatctgtaacacttattctcacaattgtaatactgaagagagccatagctagaaattataaggtctaggcctataatctgcatggtattatctcaagagtcaatataacaaaaaagggaggtccttactcgtttatcaagatgaccgaacctctataaattcgtgtgttatttttactattcattattgttatttacacgtggtgataatcagcaactaataaggctctgcaattagctgaccaaattttgagtcaacaagtatcaaggagatggacggagtatccactttgtatttattgagataggagttatgaccttagcgactgaaaaaaaaaaaaaaaaaaaaaaaaaaaaaaagaaaatttagatgaccttttaggtgtggtattcaactagaattagttgggtaataaagtttctattggaatggaaataagactgataagcttaccgaaatgtttgaaaataaaaagatgctttcctagatgagaagagtgagtttaaatttatttcatgtaggatattagaccatgtgatgtgttgttaagagaatgaggtacgttgttacattttaaagaattaattatcttgtgtcagtgaggttaatctctctagtgagtatagagagtagagagtaaacatatatgggttgttttattggatgaccgaaagtattgggttactttattaagtaacagtgaaagtgataaagttaatactctataaacccgttgtagggttaatatggttatcttattaaaaaaatagaaaataattagttactaaattaagtaacaatgattattggttatcttattaggtaacagagtaggtagttttattaattaacgaactatataattggatgtgtttactgagattttcgaaaactaaatatttgagaactaaagaaataattaaatacagaaactaacttgatgaagatttttacgtggtttaggtgttaattaaacttagtccacgagtcagtctattagtctcttaagggcgtgtttgatgtgtttataatatttttgcaggaaaccctaactgggtgttcttagtttctcttaaagaagacgaagacttaaaacaatattggtagagcttcggttattttggttttgatctccctttcatatagaaatagaaaagtatttataggctaaggccgggtatggacatgcccatgaccccgtagggtttctactaaaagccttgcaactggacaattgggggccattgtacgttgtggacacgtgttgcccaaaggtttaacctttaaaagtagagggcacgtgtcaccaaaaggtttcacctttaaaagtagaggtctgatataatcgtttggcaaaaaggtgcatgaggtgtgcacactattatgcctggacacagaggaaaagatctgattctgtgtcaaaaaaagcataactatcactgggcgatctagattacaccagaggtacatgtctgcgacactcttgggcggtcagtctccgcgataggcccttcgagtacccattcgggtattagttgagtaggcttctgcatttagactatcccaggtctttgagaggcaatatgtcttctgtatctgggaaactgagataaggtaaggtggacttctgcttatctgttagtcttgacttcttcccgattccatgaggctttttcatgatagaagtgtagtgggggattttaattagcaagattatgaggttaatatcttcctttatatgccacatgtcactgttggaaattattttaccaagatcttagatctactcacaagtatgttgattaacaccctaaatatgaacttctaaaacgatt

SEQ ID NO: 221441 - DNA, 1421 bp, Cannabis indica
gtaaaataattcccaacatgaagaatcataacatgggctttgggaataagatagaaaaaagaagaataatggggatgaagaaaaaattgcagtaaacggtgggtttgacgattatattaaacttactaatttttggaaatggtggaatctcttgaaatcgttgattagggttaatctttagagggatcattgactcttgtttttcaccagcattccctcctttgcagctatcggtagggttagaagaggatgactaaattttttttgcaatattggtttgaaagagagaaaaaagtggcaatgacaatatgggttctagaaaaaaaatggttttgatttttagattgagggagaaaaaagaagaattcactttgcattttgaagtgaatggcaatagttaacggacgggttagctttcgttaaaattatcagaatgagaataacaaaatgttaaaccaagaattactgttaaatagtcacttttaatatataaaaatatatatagaaaagatataggaggcggtgacatgacactataaatctttccaaaactattttatatacaacaaatatgacaataacaccacccttgaatgtaatgttgataagttttttttttattaaatttatcaattcttataacaattcgagaggtcaagcctaacatcatattatacaagtcgtgtttgacttccattataataacgcaatttggtaaatattacactacctaattttttatataaaattatataaaatatttaattaaaatttgatataattttattacttagttgtcattaaattttatatatttattactttgttgtcattaaaaatttgatacaatttattacttagttatcattaaataaaagttataatttattttatatatatataactaggtaacgaaccgcgctttgcgtggtctttagacctatatatatgtaaatatgatactttatattcaaatttttgttagtaaaattagatgaaaattttaaatctaacaatttcaatagttcagaaaaaatttcaacgacttaaaaagttaaagaacataatttaatacacgttaaaattcgagaaaaaaaattattgtttagctttataattttgtaacataatcttaatgataaatttatctaacttgcgattagtatagatacaaatgaactataactataaccttgaagagatagtaggtccaaaatttataggtagtaagtaccctttgttactattatttagaatttttgaaaatagacataatctatactataaatataatatataataagaatggtattattaatttgtggaccattaactataattaattaaagtaaaatatcaatagaagggtataatttagactaagtaaatggttccataaaattgattgtactattatttct

SEQ ID NO: 221442 - DNA, 1136 bp, Cannabis indica
tcctcttcttaaccaatctcaaccgttggaccgttggatcctcacaagtgaaaaaagaagtaatctcaaccgttggattccccgcctatgtagttacatttccaaacttgtctttttttttttttagttgtagcataatgatttttacaatcatatattatcttaatagtttaaagatcctgggttcgaactcatgacctctccctttttctcatcccctcatcactaagctagccttagtggcttaaacttgtcttttctttacatttatgtaataataattgcgtaattactacgataggtattacaaggtatatttaaatgtgaatttttataatcatatttagcaagacaattggtaattacatattgtctaatatttaatattgttgactatttttttagtcaacagcaattaaatgacaatgaaagtttttgataattaataacaaaaaaaggataaaccacacaaagtatttatagatgttcgaccctaactttaataataacctactcccattacttgatatttcttgtagatatatcaagatcgcaagaactcgatcaagtaagtttcttgatattctttttgaaagaattatagtagtagttttgtagcgtaatagttctttgtaaagttaagaattcgatccccaaaacagtgaatatgatccactatttatagggtgtaaataaataatattaattacaagatattcaataactgctatttattccctcaatatcttaattgtagggaaccattatgacatattcttcatgtatctagagattgattttgtggattttgaatacactcgatcaagcctaactgatcggtaggccgactagggtattgccctgtgaatacttagcaacagattcttgtcgaatcatgccagttagaagccactggttagataaaatgataagtcgagcaacatgatcacatgatatggttgagaactgggattagggtcattaccctaaagtgagcagttatatggcctaaggttattactctagtgattaaatgattttgaatatcatgccatgctatatatattgacataaagaattatgtgttcaaggtataattaagttagacttggtaaattagtaccctaagtttagta

SEQ ID NO: 221443 - DNA, 2306 bp, Cannabis indica
tgtaaaaagagaatccaagtgatacatgggaaggttgaagaagaacatttagaagctcaaagtgaaagaaaaagctgaaataattcccaaattaccaaagaacagagtgttgtagcatcctaagaattatttgttgacatggcaagtaaaataaagttggggttttctcattcaattagtgcctaggtggcatgggactttaagtgataccagctggatgttttgggcagaaaggtggtccattttagtggaccaaagtggaggaaaatagatgtggactttctaactttggaaagaacccttttcctataccctagttggcatattgaagaaagtactagccaccattaccaaaagaaagcttccattgttaaaaaaaagttgttgaaattaccaaagtaagatgaagaagatgaagaaaaagaagtgaaaaaggaaaagaagaaaacacgaggaattgaaagaggaagataaggacaaaaggattatacctacaacatcatcaagctaggatttttttctcattcctttctttcttctctattttatattttcttattttgcatggctattctagtactcattgatattttttctctattttggatacttgttattaagctagttataagcaaatctctttgagacttgaatgactaataaccctatgttttgctgtgttaacttttattgcatcattttagtgaaaattaccattgttcattctagtgagttttatgattattaattgttattgtttggccaacaatggcaattatttgagccaaatctggttttagaaggattagatctagtagtttgtacttgaatgatggaagagaatacccatttctaagttgttcttagtgagtagaatatgaatatttactaccttgcataacttggaatttatgcttggattgtgttcttagacttattttaacataggaatatgctaaattagatgatagaacttatttcatgagtttaggaaaaatctcatgagcttgtaagtaattctcgttaactttgtgtactttgctgaattgaatgttacaacatcctgggcagttttagacataggagaatttagctatccaagtttgtttttccattgataatttttcttgtgattaattttccagtgtttgtggcaatattttagtcctacttccatttctatcattttattttagtttcattactcagtcaaattacttttctttaaacttcaagttgttaaatagttggttttgcaataaattttacttacaatccttgtggagacaatcttacttttcattatattacttgtgtgactgtgtatacttccgtatatcaattttcacaataagtttttagtaccgttgccaagggttgagataaaagttgtttattatcaactatttcacaattttttctgttttgagattctaaacttgtttgtttgggttgtgtttttttaggattactctgcatgaacgagaaagaagaccttgaacttgctcatattgatcccaaaattgaacatatttttagacaaaggagaaagaaataaagggctaaaaaacactgtaatatggtcgatgagcttggacaggttgggggtgcccataatattgctaatcccattactttgggacatgatagaacaagagcaatatgtgagtatgttgcccctatgttcaacgggctcaatccaggtactattagactcaaaattccagcacttaaatttgagcttaagcccgtcatattccaaatgctccaagccgttggttaatttagtgccaatagaagattctcatctccatatttgctcatatttagaggtgatcgactctttcaagctgaaaggaatgagtgaagaagctctaaggctgaagttattcccattctctttaaaggatcggagtagagcttggctcaatacccttcctcccgacttggtgacaacttggaatgacttgactgaaaaatttatgagaaagtatttcccccattagaaatgcaagattttgttgtgagagcatgtcctttcagcagttggaagatgaatctacttgtgaagcttgggaacgattcaaggaactattgagaaagtgtccacatcatggtattccacattgaatacaaatagagacattctataatgggctcaattctgccactcgtatggtgctggacacttcagctaatggggccattctttttaagtccttcaatgaagcctttgagatttttgaaaggatttctagtaacaactaccaatgtccactactagagcccctacaagtaaaaaggta

SEQ ID NO: 221444 - DNA, 1475 bp, Cannabis indica
aaatatttgtttatcatcaaaataagtgagtgattgacttttggtcaacaaaggctagattaatagtcaaaggattcacacaagtagagggagttgattactcagagatcttttcacctattgtgaagatgaaaactataagaatgatgcttgcacttactctacagaatgattgtgaaatataacaaatggatgtcaagacaacattcttggcttgtggaggacatgtcttaggaattattaaattaaaatatagttgacttgataattaatgggacaagttatatatatatacatactaggcttgtggaggacgtgccccatgcaggtaatccctatcaaaatttatcggtaataatcatatgtcttactttaattaattatatttaaacaattgttgaaaaaaaaattatatttatatgaggacatagtgtggtataggttcacttattgacagtcattcataacaaaaacaagacaaaagaaaaaaaaaattacatcaaattttgtaattacacattggagcataatgctaaacattgatccaaatatatcacaagtcatttttttttttttgtcaagtatagtacaatttttacatatctcattaaaaatactcttgcaaacttatatataataataaaattaaaattataatcaaagttaataaatatatgtacatattaataacgaaaatattaagaaacacattaagatgcaaagcaccacaaaaggtaacatattgttattgatgcatttaaatatcagttcccacaatataaatacgatttaaaaaaaattaactaattattgtatatgtgaatcaatatggtattgagcaccacataataataatagtacgaaaatcatttataaaaaagtaatacaaagatcattcataaaaaataaaaatcaatcaatatatatatataaaggaaggtttcaacaaatgtgaggtggcatcacatagattttttattgtattttatctttttccttattttttacttttttaatttatttttatacttttagtagtgtgagatttcttttgaaaaaaagtctcacatggtttagaaactattgtgggtgttatgtttctaagttatatatagacaattgaactttcacttggattgtgtaaaaattaatattgttaatttttatatgggtgattaataaatttaatcttacccaattagctgtaatttttgtttttatacttttagtagtgtgagattttttttttgaaaaaagtctcacatggtttaaaaactattgcgggtgttatttttctaagttatacatagatgatggaactttcacttggattgtgcaaaaattaatattattaatttttatatgggtgattaataaatttaattttgcccaattagttgtaatttttgtaaatgataaatttaattttgagtattttttaaataaatacaatacatatttttttacacatatac

SEQ ID NO: 221445 - DNA, 1280 bp, Cannabis indica
cattccaatagaatgctctttccgccattagtggaatgactattctattttaaaaaggaatgaaagactattccaatagaacatgataaaaaaataatttatttttttatgcattttaaattttattttgttacattcttatttctattcttatatttttattcctccacatcttagtaaatttatgtgagtttatataattactctttagtagtattgtatgaatgtactttataattagattcttttttatttcttcttttgatcatttgttttttaatgggagaactaaattaaattataatatctttaatctagatgctaagagacttttaataaatgctctaaatttaggctacccttttttcaaataaataagagaagacataaattgatcaaaaatatgacatacaacatacaacgttctattttacataaattgatcttacaacaacgaatattgttgctcatcataggggctctaaatttattttataatttttttatgtgtgggtttgtatataaatagtaatcttatatatatatacattttaaatgaaaaaattatattaaaatatagagtacagagaaagaaatataaaagttgatttgaaaatatcaatacaaaaaattgttatatttagcaaaaaaaaaatttagttacaatataatgtttttttgattaaatataacttttagtcacaaaaaatattacttgtaactaaaatatagtatttagatacaaattgtcactaatttagttttagtttcaattagtcacaacaaattataatttttgtgactattaactttagcaacatactttttagtcacaatatgtagaaatgatgaattataattagtcacaatttttttacttttagtcataaattttgttgtgagtaaaagtaagattttttgtagtatataaaagttagagaaataataaaagataccagtagtacttagcaccctcctacgtgttaatatcgctagtggtccaactaaatatcgatatagtcaatattcaaataccactggtgcctaatagcaatgctcataaagttaacttgttgtaaattaaatagataaaataaaattttaaaagaaaaacggttgagagtgatttattgtggacattgtcccacatgctcatatataagaacatgagctactccactcattgccaattggttttgaaatggaaccacatgattctcaacacatctaatgatataataatataaacaaataatgacgtaatgcatgacaacataaat

SEQ ID NO: 221446 - DNA, 2842 bp, Cannabis indica
gaaagaccacaacgaaactcagtggtagaaaggaaacaccaacacatattaaacatagcttgacctccatgttttcaatccaatctacccctagtttattggtcctatatcatttaaactgcaacctatttactcaataggacatcatcagctttattcaaagaacttacatcctatgaaattctacacaataaaccccctcaatatgatcatttgaggacatttggttgcttggcctatggatccacacttgtctccaagcgatacaaattcacccctcgcagccgtgcctccattttcattggctatccatatggtatgaaagcctatactttattagacatagaaaccaatattatttaccactctagggatgttactatccatgaaaatatatttccttttttctctcacaaacccaacactgatgttgaactttgtttccctcatactgtgataccctcccatcacaccatacaacctactgctcatacagagcaaataccaaagacagtttcccctgtcaataaaccaactgctcttcctgagacaaaatcaacaaataccttccacgatcacaacaaaactcagcagagttgataaatcaactgatcctgcagcagaattcctacagatacaaaggcacctacgatcatttcacctgcttctactgtgcctataacagaccaacatggcacgaaaaaaaaaaaaaaaaaacatctcatctagatgcctatgtttgtcacacagcctccactgcacatcccattgaacattttttttcctatataaaacttaatcctgaatttcgtgctgctgtattagcagcctattctgaaattgaacctcaaaactatgtcgaggcatctcaattcattcattggctcaaggccatggacatcgagactgaagccctagaaagaaataaaacttggataataaccaagttaccactaggacaaaaagctatcggatgcaaatgggtatacaaagttaaatataccaaagaaggagctgttgatagattcaaagcaaggctagtagccaaaggctacaaccaaagacaaggaattgactattcccaaacctttgcacccgcagcaaagttcaacactttaaaaatcctactagctcttgctgctatgaataattggaacattcaccaattagacatcaacaacgctttccttcatggcgatcttcatgaagaagtttacttgaaactaccaccggggtacaaagctcccccaaactctgtttgcctcttaaaaaagagcatctatggcttgaaacaagccttttgataatggtattctaagcttagtaccatacttctcgaagatggcttccaccaatcctcatctgactctcttttcattaagagaaccaacactatgcttcttattgtcctcatctatgtcgatgacatcattgtggctagtaacaatgacaatgccatagcccatttcaaaatattttggacaacaaatttaaacttaaagacataggctccctttaatttttccttggactcgaagtcgctcggacaaaacaaggcatatcagtttctcaacgtcctttcacccttcagcttttgaaggatacagggtacttaggagctaaaccagcttcctctccaatgccaatggagtataaatctcaaaactcagcaaagataaaaggggccctcttacctgaccccactacatatcgcaaccttattggtaaattaatttaccttacaattactaggccggttattacatatgcagtaaaccaccttagccaatttcttcaacaaccacgagttccccaccttcatgccactaataggattttacaatacctcaagagcactcctggacaaggacttttcttccctgcaaacacttccccaaccatctcagcatacgctgagacaagtttatcagcgtccaacgttcaaatttcattctttgctgatgctgattggggcaactgccaagacaccaggcgctccatttcagggtattgtgtattccttggccaatctcttatctcgtggaaataaaaaaaaacagcaagttgtctctcggtcatctactgaagccgagtaccgtgtaatggcaaatgccacttctgaagtaacatggatcctttcccttctcaaagacattggcatctctccaaaaattccagcaactttatactgtgacaacactgctgcaatgcacatcagtgagaatcccttctaccatgaacgcacaaaacatgtggagatcgactgccacttcattcgcgaaaaagttcagcaaggatccctcaagcttctttatgtctcttctcaacagaacctcgcagacatattcaccaaagcattgctaccttcctccttctccaacattgtctccaagttgggtgtcatcaatatttacactccaacttgaggggggctattaaaatgtgattagttaggttagttatatgttttgtattagtctgacaattctattaaacaagttggtactctgttattaactaactaattggttagttaattttgatcaacttgattcttgtaaaccggtgctataaaagcactttactctgtactatttgattatcaatctgagaaataaaatcaatctttttctctttctctctcagtttctctcattattcaatgaatcaaaattcacaacctacgaaattgccatgctcacaagcatgacctaaataaagaaaattcattttctatattttctcccaattatcaaataattcaaaaagttaaggtggcgtttgataacacttttgctttttaattttaaaaacagaaaaataaaagtagattttttgtttt

SEQ ID NO: 221447 - DNA, 4816 bp, Cannabis indica
tgcatatttttttaaatttcccaataaaaaattcttataatttatggaatgtgaataaaaatttccttaaaaaaatttagttgagagactttttatttttaccattttacacaatttatagagggtcctttatttaatataagaaagcttggagtcttttattgtcttaagataaaactcagggactttataaatcattaatccttattatttttggaaggtaaatgataagttattctttattattaacatgattttgtgcattaaaaaaacgtgtcctaaaaagatgcaaactttctctgtttgttgaggaaaattgtgcattttttgttagatcaaggagtgtggagatgtcatagatcggggttaatagaccttggcttccaaggccttgtgttcacttgggcaaaggggggtggctgttccaatgggatacaaaagatgaagagggcgaggctagatcgaggtcttgcctccactgactggagaatccttttccccaatgcagttgtcaatcacctatcggccttagaatcggatcatagaccgttgctccttgacactatgtgaggtgtaaattgcaagtgacgtcagttcaagtatgaaaacatgtgggctcgggatccccaatcgttctgggttgttaaagaagcctggaaggaaagacgacgtcctaatccaatgatcaacttccaccgcaaagtcaaagtaacttgtaaaaagcttcaactgtggaacaaaacgaaattccttcatttatcccagcaagttcaacaagcaaggaaccaagttcaggaggcggaaaagaaaaacaaggacaactttaacgaagtcgatcaagccaaactcaagctttcagaggccctcttgtgggaggagatacattggaaacaaaagtcctgagtacagtggcttcaagaaggggataagtgttccaagttcttcatggcctccaccatcatccgtagacaaaggaactatatccaatgcattaaagacactccgggaagtgattggatcatggatcggaatttaattgctcaatgtttcctccgcaagtttcaggaaatcttcaagaagaacaacactaccctcattcctctaaaggagggtactatgcagaaactaatatcgaattatgacaatgctaatttgaatgctatcccatcagccgaggaagtaaagatggccatctgggacatggggagggacaaagctccaggtccggacggactcccaccaagcttctacattcaccactggggaacggttcgtgaggatcttattgacatggtcactcacttcttcacgcgattggagttgccaaaatatataaacgataccttaattgtattgatcccgaagaaggactccccatcattagtgactgactaccgccctattgcgctttgcaatgtaacatacaaggtaatttcgaagatcattgctccaagactcctgcccttgctacacaatataatatccccaaaccaagcagcattcatcaaaggcagacacatagccgaaaacacaatgattgctagggagattgtccactccatgagtaatagaagaggcaagcggggagtcatgataatcaagttggatctcgaaaaagcatacgataaacttgattgggattttgtcaagacggttctcctttaatgtgggttcaccagcttgttaacggagtggaccaatgcttgtatcaaggtagaagaaattaaactgctgatcaatggctcaatagttgggaagttcattccggaacggggattgaggcaaggagacccgctgtcccctaccctctacataatagctgccaaagttctgtcgcgtcttcttattgaaagagagaatcagggatgtataaaaggtttcaagcttacttgaagtgggaccccgataacgcacccaatgtttgcggacgatgtcatcctttttggtcaagccacagttagagagacaaggggggttcatggattgccttaattattattgcaactgctcggggcaatccatctatctccaaaaatcgacggtattcttctctagaggagtttctagtaggaaggcccaatcaattgcagacatactcgggatgcagagaatgaataggaaggtaacttacttgggtctaccattgtttagatctgttaaaagaacagaagatactcaatatctagtggaacgagttctaaagtggattcaagggtggaaaatgaaactgctctctagtgcgggaaagacatgcttgatcaaggctgtgggttcgagtctatctaactatgttgcctcttcggatgtaatcccaatagcaacagccaacaagattgataaactacttcgagatttctggtggggtgacactgaagataaaaataaaatgcacacaattgcatgggagcggctttgcagaccgaaattagggggaggccttggctttcgggcaacggaaaccatgaacaaggcattcctcatgaagtgggcttggaaagtaatgactgaggaaagtgggctatggtgccaacttatgaaggaaaaatacataaagaatcaaaacttccttgacatggagcccaaaccatctgacacaatcctttggaaggcaattctccgtgcccgtgaggagctccaaaaaggcctttgccgaaaaattgggaatggacagtccacatccatttggtttgatatgtgggtgccagggaacaacagacaaccaacgcctcgggtaactattgcagaaggagtaagcttggtaagtaattttattcacaataatcaatggaactccgatatgatcaagagatggtgccagcaggaggatgcaaggaaaatccttaatatttccctccctaatagtccaacaagtgattcatggctttggctacctgagccaaatggaaaattcactgtcaaatcggcctacagggtgctcagaactatgatgctaactcagaaacggagaggaaatggagaatgatttgggggagcaatattcgttctaggctcaagatgatgtggtggaaaattctttccaactttcttcccatcaaagagaagctcaatccctttattgctttgtccgataccaagtgccccctatgtaatgttgaaaatgagaatagtcttcatctgttttgggaatgcaactttgcaaggactctttggttcggaagcagctggggggttcaaatagatgctactcatatccttagctgggatgactagctactctggttctcaaaggaggaaaacaggccatcagtgatcaactataatcagctcttagaaggggcgacgttaatctttgaacatatatggagggagagaaacagagtagtgcatgaggggcgatctactccagtcaaaatattagtcagaatgatcaacaacaggttaattgagatggattccatacgcaacacggcagaaggtaagcaaactgagtggcagcccccccccccccaccgggctggatttcctacaatacggatgtctctattgggcgcatacaatcagcaggagctgctattctcagagatcacactggaaatatactaaagatcctcacatttcagacaaactacagtgacccgcatcctagtgaaacctttgcagtgtgcaaaggagccgaggcagtggcgcaattgggatacaaaaacgtcattttccaatgcgactccaacaatattgttgcggctctgaattcaaaaccaatatatatatacataacctgcacttcaacatacaggacttggccagaaacttctccactttggctggtaatctcaacctctgggagatccaatgggttcctagaggctgcaatggtgtagcccatgcagtggctcagtgggcaaattcgaacaacaacttcggtcttctcgatttgcccaattttgacgatttcctccagcaagttgatgcagatggtcgtgcggatttaactaattagttttggttgtattgtttttttcctgctttgttttttctgttttgttcgttgggcgttttgcctttgtcactcttagttctttgccagtttggcttttgttttgccagtttggctgtttgctttgccttttggaaaaggctgtttgttttgtttgctgtggttcctggaaccattaataaaaaaaaaggagtgtggagatgtgttcactcaaaaaaaaaaagagtggaaacgatttttttttctattcaattatatgcattaaaaaagtctccactttgctatataaacccaaaatagtaaactatagtatggtagcaaaaaaaaaaaaaacaagataataagttacaataaaatcccatagaaaaatgaatgtaaaacttggttttaaattttatgagaaaatgtctcaattttcagaaattgagaaaaacacccgcagataaataaaatggcaacatgcaaccattttaattatttaatttataataaaataatgtgtggcataaattcttaagtctaattatcagttgtaaataaatattttagtttaatttttggcggtaataatacttaagtttaagtgtgtttcgggggctcttaatgattggaatgatatggttttcaagaggacacgcgaggctatccgcaagaagaagaaggagcttagaggtgctcgactctaacttaaatgatagcaattagttgtcttataagaaactagaaaacgagcttgatgtcctgctttctaaagacgagaagtattggttctctcgtgctaagaactcttggttgaaattgggtgacaaaaactcagctttctttcatcaaagtgctactcatcgtaaaaaagaaaatgct

SEQ ID NO: 221448 - DNA, 5035 bp, Cannabis indica
ccttaaaagtcatcacctaggaatttttcaaatttttcaaaaagcaaagaatttctgaaagcagtcatgtttcttatattcaaattcaaaaaataccatatttcgaactacaagtggcttgatccttcacaaagaaggtatgtaggcagctcagttagccaaaattaatgttctaaatgtgaaattttcgcttaacagagagtatacaagaatatcatcgataagcactataacacatttatcaaggaaatccttaaacaccctattcatgagatccatgaaagttgcaagatcattggctagcctaaaaaacaaaaccaagaattcataatggttgaaaagcagtcttcggaatgtcttcctccctgatcctcaatcgatgataacccgagcgaaggtcaatcttggagaaaactgccttccccaaaagcttgtcaaaaagatcgttgattctaggcagaggatacttattcttgatcgtcaacttattcagttcttgataatcagtacacaaacgaagcgatccatcaatcttttacacaaacagccctggagttccccatggagacacactgggtggggtaaacccaagataagacatcccatgaagttgtagcttcagtttcttaagttcaactggatccattctatagagtgccttagaaaccgcttctagtgctaaatcaataacaaagtctattttgcgttgtggtggcccaactatccaagtctgctaatgtatatcataactgctacaaatcttatgcatatatcttgtaataggcctctagctttcaataatgaaataattaggatttgggaaccctgaactgatcccacaaagatatatgattcctcaccctcgggctgaaaggttaccattttccttttacaattaatactagccgcatacttagacaggaaatccatctcgagaataatgtcaaaatccactatggctagctcaactaggtcagtactaaactcttgaccatccactctaacgagcatacacctgatctaccttttggagataactaattatccattaggcagtaaggttccaaaccctaattcataactgtcacaaggtctatccaatttatcgattactcttgcagcaacataagaataagtagctccaaaagaaaatgatacaaaataataagagatgttaacaaggattcgacatgtcaccactgacgggctagccttagcatcggcatttgcaatggaaaatacccgagttggagtgggttttgcttccttcttaggctcttctttctttaattggggacagaccctcttatatcccatcaaaccacactgaaaacatgtcttgcctttcaattcccccagaggatgtttcttacaaactgaacattccgaattagtgtaactgtctttagggccaccttgacgaccaccctgatactggttccctcaaaacctcttattctggctcaagccactactagattccactggagcctttattttatgttcaaaaaaggaatcaccactacccctaccaaaattggaagtaggggattagtaactccactaacaccttgagtcactctcaggtcatgtaggaatttcattgcacccttggctcagagagccttttccaacatatggtggtgtcatcagttgtaataagtaggtcatgtctgatattggcaaagagtcctgccaagtatttctctttcttattaaaatcatttgatatgatcctagaggccaacatgacaagcttatcaaacttagtggtgtactcagttactgacatggattactcttgaacaaactgagtaaactctgatctcttggtagttggtactacgtaccacctcattataataattggtgttaattagtcttgaaactcatcctaagatattgtcgctatgtcacgagtgagagataccatctcccaccatactaggacatcctcctggaactggaatgtcgcacaagtcacccagtcattactggtgactccgataaaatttaggattctattcatggtagtcagccactacatagccttcatcacatttgggtctcccagaaaaattggaggtccctgcctccgaaacctttcatacaacgatttcattcagttaccagctgcaggttgctcaactggcaacactggaacaagagctaatggtgcatgaggaggaagtgcaagaggaggaccttgttgactaagtctttgtatcttctcaccttgtctctatagactggcttgcatttccaaacccatgctcccaatctggcaagcctatggcaaatttgcattactgtcgccacgaccttgccaacaacttttacctcaaccacgagcatgaccacctctaacctctaccatatcagcctaacttctattattttgttgagtgtccatcctataagacgagcatgcgaattcataagttagattggtcaagcaatgatcataattgtgtactaattaccgcatgtaaactcaaacataacacttatgcatctattgtactactaatatgcttcctatcatatttttttttaatcatgtttatttgatttgaactactaaagcacataaaaacttactgaacagcgagtcaagcttgtctctggtgatgattatacattactagcaagtcttcaaataacaacctgacaactctgataccaaattgtaacgccctgctaacttgggcacactgcagtgttttcttaattactctgctaacctttgctaatgaaagaatttttaaaataaaaaatgtatttaataaaaatttcacaattattaaaactttactcaacttatatcacaattacaaaatatttacaaatataggatcctgaaatctaattttcaaacatttacaaaatacatagtatcaaaagtgtcacctagcgataacaaaattaagcttgtgttatcccaaagatcaaaaccctccatgtttaatcgtctggatatgtacaattcattaagcctgcccctcactgtttctcagcttttgctttgtctttacctgcacatgaaatataattgtgagccaataaactcagtaataaaagtataaaacatacagcatatgtctaacatgtaattaggcgctcatacacctaattatcattaatctattacccacgttcaacgcgtataactgagtctctaacgttcttaactatagtacgattgactatattaccaacctttactcaacactctggtcgtcaatccataccataagtataataaaccataataccaaactgcaattagtattttattcgtactactgttggtagtgttaatatatgttattctatatttcttaatatatatattgtcaatatccaagtgcaactctttatacaccaataccacacaataccgcttttcatgatatattatctaatttgcaaaacataatacatgcatactaaacatgtacatcttgacattaatcttacctcaattccgtaatcaggtgtgttaatcaacctgagtgaaataattgctcgacgatctgaggccttaagtcacattaatgtaaatctggtaagtgtctcgttaaaacacttttggagacttaattcataatttaaaatttcattatcgataaatagggtgacaataccttaaatatcgagaaaataaaaaaaaatttgaggttcctgaaaatcaccctaaatgggcgaccgaatcaccaaacgagtgctcagaattttgggcactcgaagaatacacagttgtcggtttctaccaaacgggaacttgttttgcactcacacttaaatcctacccccaaacttgcacaaaacctaccaaattatccaaaaaatacaatatagggtattttaaacataatccacaactcaaaagcatcaaaaacatcaagaatcaaaatctaccattagagaccaaactttgagttttgaaagctcaaacttggctataataactacgaaaactaaataactagcatcaatacaaactatttctaaccataaaagcatgaagaaaaatagttctaagctcaaacataaaccacagaaactaaaacctacatttcacataaaaatcatgcttaacatccaaaatttgacggaaagaaaaaggctagcgactttaccttaatcttggttccaaatccccttaaaacctagttgaattcttgttgaaaattaattgaaattgttgatgctaaaaagtggtcaacactagctcgctagattggcaagatgaataataaatgtaagtttataatttagagagacatacaaaatttatagtagttcactcccatgtcgcgatagtaatgaagttacgtcaacttcaattttttatttctcacgagatggtattacaaaaaaaaaactaaatgtttaaacactggtttctagaaagaaactacagagagattctttgaccttgtgggtaattgtttgaatgtgaaaaatgagctaagggagcgttctttttgtaggtgaaggaggcctacaaaaataaggaaaaaatacagaaaagatatttttgaccattgatgatgtaacggtaaaaattagctcttagtggcgatggtcatttttcaaaacccaacaggtcccgctatgggtaacccatagcttattttttgtaactccattggggtgaaatttgaggtcgatagcttcagatatgcaattaaagtgtgagacatgacttgatagagaattgaaatagcttcgaaatgcaaattgaattgcgtcaatcaaatcaatattgagtgagttatgactgttttagtgaaggcagttcataacccaacgcccaagttgacatccagcgcccaagttgacatccagcgcctgagttgacatatgaagtcaacctggttattgggtaagtataaaacatccaagggatgtactttaagatgcctaagtgatattttgacatcacttaatttttttctatgttttagcgaagttggtcaccagttcccggagatgttagtgttgcggaaataaaacactcgaaattctt

SEQ ID NO: 221449 - DNA, 1169 bp, Cannabis indica
aaaaaaaaaatctatatattttagatatttgaaactacatctctgaaacattgcttagatattttagtttctatatataaatctagattttgaacctaataaaatgaagccatgttcgatgctcctgactgaactaatgaaaacaagacattttgttagtgaacgtgctattcatctctaatccatttgtcgtactaaagccatgacaaattttacatttgtcgtacatacccctaccaaataaataatggtctcatatgtggcacctaaattagaggttgttggcctttcttttcaaagcccctcttcctctccaaaccgcaaaaaacaaaaataattcacttaatcttatttatcaaatcaattctacacagttcttttcagggaattaataccttatctttgaatgtttttcttctttattcattgttaaaaatgttaaaccaatacaactttagtaattgttttttttttttcaaaaaaaaggtcgaaaaaagcaatttagttgtatgtaactgtaaattaaaataatgtttcatagcaaagaaattgtacttaatcattaaacgcctgttttggtggaccttatataaaatatacgagttggtagacatgcctttgtgtgtttcccattcttatatcattttttttttctttttttttttaacagtcttatatcattttattaggaacaagaaaactgaagaaaatataaatactttaaaattgaagcttttaaagcgcaataaaatttattctaaaacttgcaaaatgatgtgaattcctaattgatgataaaaagcctttggtttgtaaaaattaatacctttacttcatagtttcttcttttccaaatctatatatatttcttttttatcaatatatgctatttatgctaattgctagtactaaaagctacaagcttaaatcatccacctgaatggaatatatatagttaattattacatatatctaaaaaagataggatataaccaatctttcagagacatgcgcatgtaaccatgataacaaaatctcagcatgggtgatgggtgggacgagaattcgaattttttttttttttgttttgtttttgttgttttttctttcatatttatttataaataataaataacaaacatacacagttgtgtatgatcagatctcct

SEQ ID NO: 221450 - DNA, 1332 bp, Cannabis indica
tttagctgattgtaccttttttttaatttctttgatcttttagtgtaaattaaaaaaaaaggtacaatcaacaatacataacatatcatatatgtcatttgttgttaaatctttgtatgtactcttcacccatcaaaaaatctaattgtgtaattttgcttcgtgaccaagtaaatatacacaagacatagattcataatttcgtataagtaattagatataccatagtttatatatggatttttaaataatatcttttcttgatttatatatataaatgaaccacaaaatatggtcaagttttctcttatttggcgtgaaatctttgccatgtgtatatacacatatataaaccatgcacatataaagctttgagacgtttttgatcggtatgctttccattcaacttttgaacctcaccaaaattattttattgtgttacaataattaatttctgacttagcccaactatagtattggcttagtcaatttcttttttgattaattgcagtttttacaccattcgttcggtgcaaatataaatataccaactgtttctcaattaagattttgacagcatggtatctttctttattttatatttttattttcttctttgattatgcatcccatattgatttactttttgatgtctctagaatcaaagagaaatataaaaatcatcaataagaaatttaacagcacaataattctgtttgtgtaatatttttattttcgtctttgattatgcacctccacattgacttattttctgaagtccagggaatcaaagagaagcataaaaatcaccaataagaaatttgacagcataacagcatggagaaattaaattctcttactttacctttggctatatttcacttttgaagatcttttgtggcttagagcctagatcaaagtgaaccaaaaacaaaataagaaaatttatcgggggaagaaacgatgtttaaattgatgaaaagagaatagtgataaccttaatacttaccctgtagaaatttcttcaagatgaagatacgtagtagtacttctctataaatttttgcagaattttcttgtaatgatcgcattttaaaatatggattagtaaaggcaattagcactaattattgatttttttttataattatttgtggatttatttaattgtgggtctcattattaaaagtgggcattagagttataatttctcaattgtggaaattttatcaaactctaggtgtattatttgagttatatttgaattatgttatttttgttaatttttgctcggcaacaacgaaaaatttgatggatgactattttaatcac

SEQ ID NO: 221451 - DNA, 2196 bp, Cannabis indica
aattattgaattaaaatttcggctaatatgttgctattgtgtgttattttagtcaaacttaacactttgttaaaagcaaaaagtgtgttacaataaaccttgagatacgtcattaaataatattgaaaaattttcttatctgtttcgatatcttaaaaaatatttagtcaaaattttcttatggttgtataagttgtagttatttaagaaatttggcaatatttatcacgtcgaaaataaagtctaaagagtctattgcacatttttctacgattattagtttggtgttcaaataattgatttgaaaaaaaaaatgcgtaatatacaatttaaagattaaaatgattttagtttaaattaaccttaaaaacttcaacatacacaaatataagttaaataaacattaaattattaaataatatttttaaaaaataaaaaaaatatatattaatgtgtaaattttaaatttcaattgatttctaacgtattagctgtcacttctagaattgaaggggcatataatcaattaagagaaagttgagggacccttgtttgtcacaatgcaattaatcttcaacactgtttcaatgtcaatacttcaatgtttttaaattttatatatcaaaagataattaagtaggcttcatacttacatatgtgtgcatcaacattaatttggttttctgtacaaatgtgatgtaaacattattattaataatttatttttcagaaatttagtggcatgcgtaataattaattattaagaaataataactttgtggggtgtgatgcttctctccatttgcttcaaaataaaacttatcaccaatttattgaacttaatttagcaaagcagatgaaatgaaaagtgcaaaaatatttttataaattatatggcatatatagttaaaaagaattatattattttatataactctttggtttaatttccataataatattgtgaagacatatcttaagagtgagaatacataatagagcaaagtgaaagagagaagagagaaagaatgagcttaatttatattgaatctggaattgtgtagttacaaaatatagagccaaacaagctactgaaagtaataacagcttataataaggcaaacaccaaactaaggttttcactctaatgattctatagctaacaggtaccactttcttattggccaaatcatcattttttctttttaattattatagttactaatttcattcatcgattttataattattttgtttgtttttaccgtaagagctaaaaagtactattagcggtgtttagtattttcttacgtgttaatattattattattagtctaactaagtatcaggtagttcatgtaatttaatgtaataatttttaaaaaacattactagtcaatcataaggcaatacgtttagaaaatactaagaagaagacaatcaatctatataaatatatatactatacaaatatatatctatattttaattgagtttcttgatgattcatctgttaatgccacctcacatgaaaaacataattgttttattattgcaagaatcacttccagaacactttgaaacactctgtttacactggattctttctttggacatatatactgataatttgatacaccttgagagaccatggtccctatttatactactcaaagttgatttacaaccaactagtatcctaaaaaatctataaaacatttttgaagcttagataaacttttattaaaactaatgctagccatatacacaaccaatcagctttattgaaaatggatctcatttattaaaaattttatgttacataaatatttgatattattactcttttttttaattattaatactgcaattagcttggcccaaaatactagattatcatcatcaaatatcatattagaattaattttgttaatgtggtatattatattactatcattgatagatgatgaggttgcttccatcgcagaatgaaacgagtctagatacactaattaataaggagattccccaaaaaacttaaaagaatgtttgacttcataacttaaaaactgttttcagttttaaaaaatagaaaataaattttaaaaactagtaagagtcgtttggtcaaaattattaaaaattgaattttaaaaaactagaaaacagaaaatatcaaaatgtgttttcaatttt

SEQ ID NO: 221452 - DNA, 4483 bp, Cannabis indica
aacactcaagaatatacaatcaatacacaaaaacaaattaaggtaagcaatttaagtcatgcgtccacaacaaaaatgacaaaaataaaaacaagaagagtccaaatagacccagttcggcccaaaaggcaaagaaacaaaaccctaaagtctgagttaacacttcagacttctcgagatacaatctcgaaccttctttgtcttctcttgaagaaaaccctagggtttcaagcacaagaccacacacagatcgtacacactcacgatccaaaaatcaaatcacacacaaactcaagaacatcatcatgcacaaacaccaatacaaaaaagtgagagttagggttagaaaaacaaatagaaagtagaatcaaacacagagattttgatcttagagtccaccccaaaatatgggcaaactacaagtataacaagtttgatttcaagattttaaccacagaactttcgttgatattctttaaagattttatctatgttttttttcttctctctctctctctctctctctaactctctctctctttcttcctttagtatgtgaaaacagctgagctctaaagagcttctctctctactctctcactctaattcagctcgcaaaagaataagaatggctttaggtagctctcttccctcatatctgtttattatagactatagaagtagttgtggcagttagggagttaattgatgtgctgtattttcttcttcttttgtaatctatttcttgttggtttattgtaactgaaatagtttaagagtcttgtgtttgagagtctatactggactttggccttcaggcacacttgtaatataaacaattgtaattgaaaccatagcttataaggggatttacaaaacaaattccactttaatccccttatgagggatgatggttttaaggtattctgaaggtcttaacttgataaccactagtgtcagttacctttgtaaatctctagcaagttcatacaatgcttgaacttagctagggtgaccactttagtttctatatttgcagagttatgtttaatgggaatcttttccactgtgacctctccctgagtcactttgtctctgatgaagcgttgaatagattataggaacactcttgagtagattcgattcctttaggacacccttaatccatacaacttatttgatggcttctgtagtagaaatatattctgcttctatagttgataaggcaaccactagttgcaactaaactctccaacttatacaattttccccaattatgaaataataggcagaagtgggacttcttgtgtccctatcaccagcataatcgtagtcataaaattcttctgtcaaagtttggttttgtgactgtttgaaaaccaaaccaaaatatgtagttcctattaggtacttggatatccatttcatagcaagatagtgtaattttccagggttaaccatatacttgagcacacttatagcataagaaatcttaggtctagtatttaccatttaagtgcattatggacccaaaaacattaaaatacagtaccttactcatctcttctatttctttctctgtcttagtgcattcttttttagaaatattgtactgacttgtgataggctgatttatcattttggcacttgtcatttgaaacttctctacgatcttttgtatgtagtcttcctggagcaactttaatgttccttttcttttgtctcacacacaatagtaatccatgggatgttagtagcagtgcccaaatctttcattttaaactaagacttaagcatttcttgaccatgttaaccttagatctatctttcctaattatcagtatgtcatctacatataacagtaagtagatgacatccttgatgtcacttctacgaaagtatatataagtgtcatagtagctcttagcaaaaccttgcttagtcataaaagcgttaaatctcttattccattgtttaagagattgtttaagtccatacatggacttaactagcttggataccacattcctttcccattttccacataatccttaggttgttccatgtagatgtcttcatctagtttaccatgcagaaaagctttagtcacatccatctgatcaatttctatattaaattgatttgctaaaacaagcattagtcttatggtcttatacttgactacatgagagaaaatctcattgtagtcaactcattccttttgtgttgttttcgcgttcattttgttttaaaaaaccaacttacattgtgctatactcttcccttcaggtctagaaacatatatccatgtcttatacttctttaggaaatgcatctcttcatcaatagctttattctatttcttagcatccttccatttaatagcttcctcataggtttatagctctatcttctgtccctctaggatactcagaagtacataggctgtgtcctcattaggggtgttcattaaaccacctacaccgcacaaatcgctcgcaccacaccacaccacacaaaaaatatagtttgaaattcattacggtgctgttgcggtttgtacttttgccaattggcgcagtgcggtttcaaatttaataattgcggttcaaatcacaccgcattatatattacaaaaatattaatttttacactatgaattcccttttttatatataaacaactcatatgcttacgaaattcaagccatacaattaaatttaaggaacaatcatataaattattctcatttttattttttgtgaacatgttattattaacatattattattgatatataatatacatatatatgtatattatgtaatttcttagagacaattctatacaataatatatatgttatgacgttaaaagtttgataagatacttttttttttttaattgttgaatctttattagaccaatcttttattttttattttaatgtttgatagcgataatattttaaactgcttacaccgcatcgtatttttgcggtgtggttttcacagttttagcagttttaaggtcttcaagtgcgattgcagtttgagaaattgcaaaaactacatatgcagtttggtttttaaaaaaataagcctgaacccgcaccacccacactgcaaatacccctagtcctcattccagatattaaaaatgtacttgggattaggtacatgaactcttcttactctgtctatggctaactgataatctacaaggttcttagtttgtgccacttctgtgttttcctgatgttctacctgaacaatatcatttccttattccacctgacctgtgtcctggcctggttcatcttgttcagcattttttggattttgagtagttcctagaatgacaagtcttaggtcaaagctaaaaatgtttcctacggggtaagtactagtgttatttcctgagacactaaggttagtacaaacacatggaaagataatttcattaaaatcacatatctattatttatagtctttaaacatggattctctcttacccatatcttgtagctcttagttccttcaggataacccaagaaaacacattttaaagctcaacttaccaatactttgatgtgcataagcaacacatccaaagactttcagatgtgacaagtctggtgttttaccagactacctctcttctagagttttgaactccataacacttgatggaaatctgttgatcaattaagctgctgtaagcgcaacctttctcgaaaatctagtagctagtccagattgaaacaacatgcatcttgctttgtttaggataattcagttcattatttttgccacaccattctattgtggagttagtctgactattctgtgtctttgaatacattcccttctgtaacacgtgtcaaacatatcattgaaaaactctaggccattaccagtccttagagtcttgacctttttattagttaggttttccaaccctaaaacttagaaaatgcatcattttttatgttttaaaagaaccaaaccttcctagagtaatcatcaactatagagtaaaatataactacaaccccatgtgtagtaaccttttctggaccccacaaatcataatgcttaccaaaatacaatctaataaacctttagatttatgtgtctcaactttaaatttaagtctatgatgcttaccaaactattatctcacaaaaatcaactttacttactttatcttcacacaatagattatgctcactcattagttgcaaacctctttcacttatgtgtcctagccttctgtgccatagagtaactttagaatcctcaagtgattttgttgttgtgttatggcaactagaaactggttctccttttaggtattatagacctccttctttgtagcctctcattatggtcatagaatccttatttagtttcattgtacctatttcaatcttactcacaacaccaatgtcatctaaaacactcatagaaattagatttct

SEQ ID NO: 221453 - DNA, 2773 bp, Cannabis indica
taatcattaacagaagaagtaaccagcaattaaaataaagtgcatttaaaaaaaacacttgaacccatacatccagtgtgaaactagttatgacattcttaccatgtgactcccatttagcgcacttcacaagccaaaggtctgagccaatttgtgctgaggacactcgatctacccatacctgaaactgccttccctgccagtctccatgcaacttttccatttcatccacacactggtaaatatgctgctcagttcccgagggatggaccagagtacaataggagtgctgaaaagattgaaataccaagaggaattataccttactgtagtagagttactagagttatcattaacatgtgaatgatcactatcaatttttagataaagtaaaaatatctgttaagttgaagtcataagactagaatttaaaatctcatgaaatctttcatgttctatagcaaaataataaggttttcaacttattcatcgattctccttagcttcatatctttcatttctgctttctatattcctttgtgatcatcacctaacaaaactttatagcaattattgtgttcaacatatttatctcaaatgattgaaacatcatgaaagactataggctagaaatttgtgacctatactaaatggcagatcaaagagattcaaaaagtaaaagaaaaaaagttctttgttcttttgataagaataaaaaagataaagagttacaacttacaaaaactgattttagattctgcatatgatgtgtagatttcggaatatctgcacaccgccatctctcgtagaataaataaaattttacgacttcataaccagggttgatgatatccactttgcacttttgaaagtcaccgatatctctaggagagacatttggacccagacagaaactaccaattccctgtataatccctgctgcgcatctctcggtagcatggattatattagagttatttctcatattttccgaataccactccaacagttcttcttgtgcattactgacctacatgcccaagaaataagtaagctttgaatcgtagtaattcaatttagaactgtgacaaaaataaggattgaactcgggaaacacgaggttgtatgtttacagaccattactccatagacttgaggaatgctcaacagttcagcatcattgccagaatcaccacaaacaagcgtattggcaggaagtgttccatcaaatgcaaatttctttagtagatatgcaagggcctgtcctttgccagcacctcttggtaaaacgtccaaagctatcccactactatagattatctttacatctaactaagccaaaaattgatcaaaaacagtagaaaaaaacactgaatcgaaacaaatagaatagataaatagaattacagcataccaattgccaggaccaagtttccaaagtaaattactatagagtaataagttatagaaacaaaatgaatctcttagcttacccctcgtttctccaaacgctctgatagaacatcaattatcttgagcgctttaaccttctctacataaaagctaaccttatgaggtctttgatcaatctctgactgcaaaagttccacatataagtagaaaatattgctgaaattcaaacaagtatttttatgttgcaacgatacaatgggtaatcaatgaaatagtggtcacgaatctttgacatgtttaatcaaacgaagaaacttacctgaggaagaagatcaggaaacttggaggtttcctccacaacaacacctctgtcccacctctgattcagcaactgctcccagccaacatcgggcaccatagattcgccataggcaatctcagttcccacagacataacagtgatatcaggggttaacaagggtttctcggcccttaaaagttggtaagaatcgggagatcttccagttgaaaaaaccagaagagagtcagggcggtaatatgcttcccatagagcgttgaagcggagaagagagagatttcgagggtcgtcgtggtcgacctgtgcaaatggcagaccgacgaaattgagtaacaaagaagaagaagaagaagaagaaagggaagttgaaatgtaccatggtagaatcaagatcagagactatcataagacgcggagtaccattgagacgatccatagaaaagctatggcgatgggtatcgctgacctctgatttcgagaaaaaaggctatttcatgttgctagaaaaagacacgtgtacacttttacggtactaccagtgtagtgtacctttctcaaatttcaatcagagtcgtccatgtcgttgtcaaagcataattgcaacagttttttttaataagttttaataaagtaatatattgttttaattattaggactaaaatttttaatacttttattatttaatacataataaattgtacttattggcaagcttgtattataatatttacaaaggattcggggttaataccaatctccaattcggagctgggacccaaacccggactccggccccgaccctagaccaagacccggacccgggagccaaaccccaaacccgaaccccgaaccccgatcccgaccctaacccgaacccaaacccaaatctggacccggacttggacccgatctaggaccaagacccggactcgagaccaggactcggactcggattatataatactaatacaatacaataccatatattaatacaagtcaataccaaacatagtattatattaaataatacaaatacaata

SEQ ID NO: 221454 - DNA, 2274 bp, Cannabis indica
tacatacccctgagttggtaatccattgtccatttacccaatccaagtgaaatctcagttgagagtgattaaatacaatctcatttctattcttataggtaccaaattaacagcatacttctttgtaacagaattgaagtgattgttccaaccaaccaataactagattcacagaaagcatcgaccttttccatcaacttaaaatctttatcattgctcaattgaggaggctgaggcctaatcatgtctagatgtacagtaattttcacagctttattattcttatcatatctcactacaacagaatctgtacccttttcaccaataatagtagctgggatccatgcatgtgcaaccatattatgtctcagttctactgatgttcctggtttgaattttgagtatagtatttcctgcaaacaaatactcatatcaaaatgacattttaccttaataatcacataaagcaacaatatttattctataatatgcatgttttactaagtagaagtaataagggtgctacctttacatgcatataaactttttttttttacttaaaagttaggatctttaaactactatatatgcatgcatgtataagtaataataacactaaaaaatgcaaaacccattaatattaataaggatataaagctagcttcttttaaacaaaatgacattatattattggaaaaaatttatagtacaccgtctaacctatctgttctagaatccaaagagtacattttagcttaaagagggtgtacttagaactctcctatattatttacccaaatgctaagaacaagctgaaccaaataaagacactaccttcatacacacaaactttattatttatttatttttgcttaaagttaggatctttacaatatgcatgtatgtagtaataacagaaaaaataatgcaaaacccatttttgatcaataaaaaacaaaacccattaatactaataaagatataaagctagcaagcatctttaaaacaaaatgacattatcttattatattaaaaaaaaaaattagtacactccaaaactgttgttttggtacaagaaaacaaataaaggcacaacctttacatgcatataaacttattttcactatgatctttatataagaaatgcaaaaccaaaaatgtgtgtttgagcttttcagttcaatttttttaatagaatcacctaatatcatttacccaaaagccaaaaacaagtagaaacaaataaaggcactacaaactatttatttacatattgtctcttgcttaaagttaggatctttaaactacaaaatgcatgtatgcattagtaacaccactaaaaaaatgcaagacccatttttaattgatcaagaaaaaaaacccaaaagatccaaactttgtgtttgggtacctgttttggagaaataacccattgttgttcaacccaatcccaatgaggtctgagcttagaaaggtgaaaatccttaacatcaggagtttccttaaagaaaacagagcaattgtcattgtgaagagagagcacaacaccagtacaccacacaccatcgtcgtttaagacatcaacgacgtcgtttggctcaaatggcttatcaagctgaggctcagtatgagaaggtggcaaaggtcttatcaaagacctgtcgaccctttccacttggcgttttttctttttggttttggccactgataaagatgttggtgtgatattcaacgacaactgttgaagagttgtctttgttttgttgttcttcttctttgtttttgttacattttctcttctttaatgggttggtacgaggagtaatgattgtggctggataccatgcgtttgtgaagcctgtttcttcatgggtttttcgaacttcgactctgtaatctttgtttctatcttaccatttttgtttttattttttgaagcttgaaagtgtgtttttttttcttgagattaataacttgtggaagaagaagaagtgaagtggagaagatgaaagtagtttttttttttttttttttttgtctatttattgattatttgagtgtgaaaggaggagttattggactcaattggaatattaatttattattaatagtttttattttaagaaaatggtaaattaaaggaaattacaatatattaggggtgtgttaggattagacaagacgactcaaaattggcacgagttaacatgtttggatttgctttaaaatttaaatggatttgagatttgagtatgtttagcttgactcttctaa

SEQ ID NO: 221455 - DNA, 1849 bp, Cannabis indica
aatgaaaaattaaataaaagaaaagctaataaaatatccaatttttttacaaaccagaaagatttcttatttgtttccatcatgacttgcttacagtggttatgaggttctgttatgctgagtattgttatctgtaggtagctgttttgcagcctcagacaatgctatggcagctgcaggggtcattgactgatattgagaaggcaatggggaacgtgctgcggctgactgagccgggtgttgtgcataaaaaacctgttcatttgcagggccaagagcagcagaattggcatattcacaagtgtaattcccagtacctgaagggacggaaatggatggagaatggtgatgatgcacttgagaatattccacatatgcctgctgatgatactggtttggagggatttgaaccataggaggatttgatgccacatcagtcttgtacatgcttgtagctgcagccggatcaaccaaaccaggtgaagcagccttagcagggtaaaccgggggaactccttcctgcttgtaagttgggccagggagaggaaccatattagggcttggagatgatattagtcgagttgaggccaccccagatgttgtcgtatcagccatgttggattggaatgacatgttgtaagactgagtttgaggaggaaccgacattaaatagactggatattgctgatccatttggtgatgatactgttggtgttggggtgtttgagaatagacttggtagtaaggcgacattggcactggactagctgaaggacggtgaatgtattgcgtgaactgttgatgttgttgtggatgatattgatgttgatcaagttgctgaggggtgaggtagcaagaatccttgttttgttgggtcccaggaccgggatcagagttatcattgttcccagtgtttgggctaggaggacctctagtttctctatggggaacatagtgttgatcttgatagtgcataggtttcgaaaaagagctagcagatgtgatgctacttgtatcgctgtcaaagcgggtacaatatagaattgtatattttcatcaaaacaaaaaaaaaaaaagaaattattgtttatacatttcagaccttaaacggatactcttttgaaaacttgagtacatagaaggaagaggaaatgtaattggtgggaccattagattctacaataagggaatgtaatttatgatcatggcatgccccctattatccatgttttaacataatacgtaattttttttttaacacaaacataatacgtaattaaataatctatattttcaccaatcatgaatcatccactataaatattcaagaaattttagtggtttcttatttcttaatggtaggtaccaacacaatcacatataatagctcacgtttaaaagaaataactttgactaagaccggacattgctaagttgaaaatataattaaaagaaccttcaagcaagaggttacatgcaatttgagagaatacctcgcaaccgaatccggagaaggcaaactatgtccaccagtggcagccatctttggttgcacaggatgcagtggcaaaggtggtttcctaaacccaacaggatcgccgtgatccgatatttcgtcttccgacaataccttattcatattttccccagaaataaacgtaggattaacctgatgaccaccggagatgataccatgggctgtcggagcgaaacgtggaggagctcctgcaaagcttatcttggaaaattgttcttccattccaactctttggttctgacctctggcaccattttcttcgacccgtacccgaatagggggcaaattcgacatggaaggcgaagaagaagg

SEQ ID NO: 221456 - DNA, 2836 bp, Cannabis indica
aagaaataaaatctaacagaaggagcatgactatgtaattgttatattttaggggaaatttttagcaagtcgtatagtttagagagcataattagatagtgtcaaaagttcagggagcaaaaatactaattattcttttcaaaatattacatttaaaaattttaccactatatatataaaatatatatataaaaatggttcaattagattatttggcccaagacccctaatttgattaagacgggcttgtataagtgtgtattgctaaatgaagtttgatccaaataaaatgattattttagtaattgtgagttatagattatttcatgagataactatgtaaataccttaaatgatatttttaatttattgagggattaaattagaaatacttagaattaataatctagttatgaggttatatattgaaagtagcctccaagaaacaagaacgattgtattcttatcttccctattaagagaaaaaattagaaaaccttaagtcttgttttcttggaagatcattacccaaaattaccaaaaagatatctctatcaatagattaagatacgcttccgctatttgagttcttctctttcaatcaacaaatgtagtattgtttatgtattttcttggaatatattttacgagtgatataaagaattctgacaagtgttatcagagccacatttgattaattttttgaggattcaaaatttatttttaagaaatttaggaaattttattttacatatgaaaaaaaagtctcaattttggtcatctatatatgattttgggttgtcattccttaataattaattttaaatatgtatctcatcaaagattattttttgattatttgataaattaaggttaggtgacctcttcgaacatctataagcacaccaccaatttctaaaaagggtgcccaaggaccaatgacatatcattgtcttcttctatgtctagtacgacaaaatttactgaaaatactaacttacccactttaattaatacatcttctattattctccttacataagtgaatgatcgatctgccaattgtaacaaaaattttgtgggctttacttcaccattatccaactttttgaatatcgaaagttgcatcattaataccagtcccaacaacgcataaaaatttctcaaattttaaaccaccaatctcataaggaaaagcgacctggatctttaaacttttgaggtaacttttttgaattatggcattacatttctcagttaagcccacaattttatattccccaaatttctttttctttgtcaatgcctccttcacaaacttaacataattggacatatattctaatgcatcaataaaagggatgttgatgttgatttttctaaaaatctctaagaacttagcaaagtcctcatcaaattacttctgcactaatctttgaggataaggaattggtgatttatacactagaagatcttctttcttcatagacttcttagcaggcttcttttcaggaatatcttctttggcttctactgggccttcaacctcaagaccggttgacttatgttctacatccccatcaagtactttaccactcctcggtgaaatggaattacattattcttttggattgacaactatatcattaaagaaattactatttttctgcatcactcacaatattggccaattgtcccacttgtacctctatgttcttcatggaagtagtaatattagactattgagtctccatgttatccaaccttatttcattcttgttaaatcccttgttggtctctatcatgaaagtacctagaatgtcttctaaggacttcttcttttcttgtggttgtgcattaaactcaggaggcggttgcaagacatttttagtgttaccataagaaaaattctcatggtttctcaacctagattggtagtagttaggcactagagcatcccaatagttgttattataaggtctattggctatatagtgtgcttgttctatactcatctcaggctcttgtgatgtagatgcaacaacaacattctctgcaattgatgtatccttttgagcagccacttgatttaaaacaaaaatttagggttgctatgtttgtcataggatcaatttcacgtaaacaagccacatttcttggagtatttctttcattaggccaataatagttattagtgaccatctcttccagtagattaatggcttcaattacaagtttagacaataacgctcctccaccatcatcatcaataatagtcctagttggaccattcaactcattgtagaaaattgaaacttgcatccattttttataatcatgttgtgggcaacgacataataagtctttgaatcgctccatgcgtcataaagttgtttagaatcaaactgtctaaatttcttaatctcacttctcaattgtgcaaactattttaccatgaactttttagccatgtcatcctatgaagtaatagatcctggctgcaaagattgcaaccagcttcttgctttatcctttaaagagaaaggaaagagacgtagtcttatgacgtcatcagtaacaccattaatcttcacattagcacatacctctaaaaatttagctagatgaatattggaatctttaatagccaactcaccaaattgattttgctgcaccatattgattaaagcatgatatggtttaaaattattagtagcaatgattggattagaaataccagtcagattttcattcaccacaagtaagcaatagtcacgaatagcccgtggttgtgcatcggctacagtaggtgttggttgtgttggaaattatttta

SEQ ID NO: 221457 - DNA, 4063 bp, Cannabis indica
taaaataataataaaaaaaagtgataatatggtatagattttaaactttaacttcaatatcgaaatacactaaaacttattaactacaaaatctaagttttaagttaaaaattaaaatgtacaaactttaaatacaaaatagtttaactaataaatgtaatttatataatataagatatacacttatatataaatcggtttaattcagtttattcgggttaattgggcggtttagaataatttgtaaaccacctaatatattcattgggcagtttggatttttattgtattatttcaggttgtattttttgtcggtttattcggtttgatttgaacggtttatttgggttaggcggtttgtaaattttattgaacacccctagtcgaaactaaagctaaatgtctaaaaatattgaagttaaagggccattttataatagtgatataagcagatttaatttaagaatataacataattaattatcaataatcattaataataaaataggagctttgatattaattaagattatatgcacaatctattcactgtcttgttcgacaggacaatctgaatctacaagattgctaattgtagttgacacaaaatggattgtataggacttgagacataatgaaagattaaaacttctaataatctctgctgaaatatagaagttcatcattcatcatacgatgattgtttgagacttgatcttaatcttgaagtgagcaatggactcctatttataatcttgtaacttttaacttattgagtaaattttatgaaagataacatagaccaaattcttgatatcttggagttttgagattattcacgcggattagagaaaagaaaaacatcatttattaaagaatgaaaaaaaaatgaatgataggtacagagtacaaccagctttatataggtagtgacaaaagacccttaaaccgctttaactaactaattagcaataactaatcagttaaataacagaaaggacagaaaaacaataaaagggtgacaacaacctgacataatatacaaaacagagggattagccaaagataaactaatgactaaatcttaatagccccccctcaaggtggactgtatagatcatatacagacatcttgacaatatgagaggaaagggttgttgaaggcaatggcttggtgaaagtatctgcgagctgaaggttgctgggaacagggattagccgaattgtggagttgtttattttgtcacggatgaagtggcaatcaagctcaatatgtttggtgtgttcatgaaaagtggggttatttgcgatatgaatggcggattgattgtcacaataaatgaaagctggtgtaggttggggtatatggaggtctttgaataggtattgaatccatgtgatctcgctggtagtggcagcgagggccctgtattcggcttcagccgaactcttggaaatggtaggttatttcttggttttccaggaaataagacaattcccaataaagatgcagaaaccggttgttgaacgccgagtgacagggcatgatgcccaatctgaatctgaaaagcctctgaggtgtagagaggaagtgggagagtataagagaccttgccccagattgcctttaaggtaacgtagcaggtgattgagagcctgtaagtgaggacttcgggggtttgacatgaactggctgagacaattgacggcaaaagtgatgtcgggtctggatagtgtcaaatagagaagcttgtcaatgatttgtcgataggcagatggattggtcaaaagatctccttgctgatcatcaagtttggtgcgagggtccataggagttttggcgggtttgcagccggcataacccgtatcttcaagtagttgaatggtgtactttcgttgtgagagaaagagtccatctttacttctagcaatttcaaaacccagaagtatcgaagagggccaagggttttgagtttgaacttctggtatagagaagattgaacttggtgtagaacatcaagatttggtccagtgagcacaatgtcgtcgacatagacaagaagtgcaatgagttggtcttccgagcctcgtgtgaacagcgtataatcagcttgagattgatgaaaaccttcttgaagtaaggcgtctgaaatctttttgtaccattgacgagaagattgccgtaggccataaatagatttatgtagcttgcacacggggttggaatctgcagaaatagaaggaggtaaagttagtccaggtggtaatttcatcctcttttggatggtgtcctggataatgaaatgattatcaaaaaatttaacaaaaaaagagttttcattagtgagacaatgaacagatataatattatacttaaaagttgggacatataagacatctgttagagtcaaagtagaagaaatggcaacataccctcctttattcactaatattctgtcattgtttggtaataataaattggtagtgtgaatattgcaaataaactgaaagagtttaggatttgagcaaatgtgtctcgttgccccagaatctaaaatccaagattcattgacagggaaagaagacacatttgaaaggattatacctgtgtttcctgtagaagtactaggttctgatgaggctataccggtttgttgtgcagcaagaagatttaaaagttgctgatattgtgtcgaggtgagttgtggcagtagagtttgactatcaccaatagctccagcattttcgttgttagtttgaacttgattcgcagcagcttcttttcctttgttcttgttgtaaccaggagggtacccgtgtatcttataacatttttcaatcgtatgcccaagaatgttgcaattagtgcaaaaaggcctatttctcttctgtggaaatgatttgtttccacttgaatcaggcttgttcattttgcttttgtctccttgaaaagaaaaagtcatgttttggttttgctcaccaccagaagtggaactctctcgttgattttcctcctgtgtaactaagtgaaaaacacgatttatttctggtagagggtccataagcagtatactactccttacttgagaataagagtcagaaagccccatcaagaatgacattatatgctccatgtggtagtgttcttgaagtcttttgacaccaccacaattacagccattacaaacacaattaggacgatattgagatagttgttcccagatcgttttcaacttagtgaaatacatactgattccttgattatcttgtctcagattcattaagcccttcctcaaattgtaaatatgtggtccattcttttgataaaagcaaattttaagatcattccatatagcagctgcagattcatcatacaaaatactagaggaaatttctttagagactgaatttaggatccaagaaataacaatgttattgtttctagtccaggcattatacaaaacagattcagataaagaaggtttagggatagaaccgtccaagaatccgagcttgttcttgactgagatggccaattgcatagccctgctccatgacatgtagttgtcctgcccagtcagaagttgagaaacgagtatatttcctgggttatcagcatggtgaagataatatgggtctgctggatcttcaagagggtttctctgctgcatcatttgctggatttgtcctctttgcacagcaggattcgctggtggtccattatcttctcccatgatagtagaaccagagttatcgtcattagacattttagtagcaagaaaggcttattcgagaaagaactgatagaagaggaatgcgcagaattggttggaacaccaattctggtattggaaaaacaaggaacagaggaagagaaagaaacgcgacgaaggagtcggagaacacgacggagaagtcggagaaagatcaagatctggggaaagctttctttccccgctctgataccataatgcagattagagaaaagaaaaacatcatttattaaagaatgaaaaaaaaaatgaatgataggtacagagtacaaccagctttatataggtag

SEQ ID NO: 221458 - DNA, 2694 bp, Cannabis indica
ttgtttcttatggcactgattgcgcgtaagtaacaaaatcttgaatgtctatctatattgtctgatactttcaaattaaaagaaccataaatacacccatactcttatcatatcattagtgatttttcattttttgaaaaaataattaatataattattaattaatagtaaaaagataagcatatccaaaattttaagcttaagattaaatggttcttttattagattggatcttgttttagatagtatctttatttgttttgtttttttttactaaaattacttttaattttttaaagtaaaatatttttttatataagctttatttttaaatgtagttggaaaataaaatgggatattttatgatatttgatgccccatattaaatatgctttgcgcgatatcctaatattggaaaattttataatgcatctcctttaaatgcatatgtgttttaacatccgaaataatttttaatcaaatattttcatatattgctgcccaactaataaaacattttacaaagctataatattaaatagataaaataaatatacttgcctatcataaatagatttcttttattaaataaattatttacaccatataaattaactttttgcaagaatactacaatcttgatgaaactaccatgtacaaattatccataaaaaaatagacaacctaattatatgcggacccagtaaattggaaaatgcaaaatacaaacattatactattatctctgtcgaaaatggtcttgcgatgggtctagtctctcagtagacttggtgtttattgatagttttttagagtggtttttgctcttcgtggtagctttttgctcaggttctcggttttatgagtgtgtgatttccttagtctctcagtctttcgtttatttggtcttatctgtttcttgacatggcgatagtggaggagtgtgctgaagttacagtgggggtggattcaatagatgcgggagccgcaaaattactggaaagggacagtgatcatgagatagagatgatggagctttttgaagatctatccctggaagatatagtgattaataaggcgtgcgtgggtaaagtgatggggtgtaaaacaatgccagcctcagtcgtgagaaagatcctcttgggtgtttggaacttggaaaagaactggaagatgaagaagttcgaagaaggggtgttgggttttttctttgattcggaggaggactgctctaaagtcatgaaccgccgcccttggttagttaacggcgtcttactcaacctgaggccgtttccattggaaggggaggtgcgtacatcggagttcgaagtagctcggttttgggtggggttccatggattacccacgaggtgtctctcggataataacatccccattctagcaaaaaaaagttggtcaattggtgaagacggatggaaagagcagggaagaggtggttagacgaggttttctcaggtgctggatcgatgtttggatcagccatccatttccagcgggtttttttctgaaggcggatgctaccccggattcctgggttcaatacaaatacgaaaagttgtcgtatttgtgtttcaactgtggtcatctcgctcactcgagcagagactgcttataccctacggcttgagtaacaccaactataggactggcggtgaagatgtatggtccctggctcaaggttgaaggagcagctgggaattattttacggcggcgtcctttcgtcgagaaattactctaaactcggagggagttaacttgaagggtgggaactggaggcacaaagggcagtggcgccgtttctcggatgaccatcgcaaaaaggaagctaatccaccgccggtgaaaggcacaggggtggtacaggtggcagattcgaatggtgaaggaggtgcacgtcccagcacgatgcatggcgcggacaccaccatgcagaggagtatgcatggtagtgggagtacgaatgtcagaggtggggccacagtaggtgaggtggtcatcaacaatatttccccatgtgctcctgaaattttgaatattcctgcacgtgatgttttaaccgaaagaccgttacctgattttgcccagcccattggtcctaatgaggctgaagtggatctcatcccagatattggaccttctctaattcaaagtcttgagacaccccacatttggacttgcaaatcccaaactccccatcattttcctgagcctataaacttcaaatggcccacaaacaaccctgatcttcaaaagctttattgtgaacttattgggccggactacaccaacctatataaagcccagccctcacttatatctaacccacctgatctatctcaaatgatcattcatttgttgggcacaaaaaagagaaaagcccatacttggtataacccaatacctgaagtatacaaggattcattatttgataacaatgatggggcaagttcaaccaaccaaatttcgccttcaaaggtttcatctacacgcgaattggggagtgcaactttcaaactgggcagtaatggggatactgaagacaaggccaagaataagagaaaagcaaggattactagatctcggcaagggcttcggaggaattctggagtcaagactaggaggagtaaaaaactattgcaagatggagacggacagttacaaggtgatatcaa

SEQ ID NO: 221459 - DNA, 1541 bp, Cannabis indica
aattttaattaattaaatgtaaaatataatcatatttaatttaaaaggaatatctaatttttattttttaataaaacaataaacttcaatcaaaaaaaaaatatattactaacaaaaaaaatcaaaataatatattaaaagattaaacttaaactttacaaataaatcccaaatacaaatattaatagcccaaatcagatcaatgattcaataacaacaatacaaaatattaaacaggatattaaatctgagtttgagcataaattttaataaaaaaaaaattacacaaacaatactagattataaacaaaacataagaaaaaaaaaactaaaaaatattcattcactccgtcaatcacgaattacaaactgtaaattatcaataatgtcgaacctgtcaaatatataattgaactgagtttacacatttttacactaattttccaccattatttgaactcttaattgatcaaagttgcaatttatttgaatcttcaattatttcgtccagttttcattgcctttgtcaatatcacctgaatatttataacaccggttttcaatgattatttttctcactttttcattcttactcaagaaaataaataaacaacaaatgtcaaatttcagagtaccagtgatgttgagagatgaattataagaagtagtggttctttaaactttttaagtgaggaaaaataagaaaaagtggtcacactggcacaatgataattctcttgtcttttacgtttccactaagattttattattaattttataatacattgcatgattgaaacatatatatataaagaaataataaatagtaaatttattgaggaaatgagatgaaggcaagaaaaacctttgtctcttactcctaatacgacaagttgtagccatagatgatgaagaaaatatttttcttaaacgagatttatacaaacactagtattaccatgctcattatttttagagctaagaataagaaccagctccaaacaccgtcgacatattaccttggctttcttgggatcttcggtcctcgacgagaaatgaggagatgacgagcgagagagatgaccgattattaagatccctgcactggagagaagaggcggagacgatgactgtccgactggtttgggagatggaaagctcaaattagtggagccatggatgctaatcgctggagtagacctgctctggaggacgccattagttggaggagtcgaagatgccattagcaggaggagtcaaagacgccatttgtcttgtaatacatgtgtaaaccctaattaatatccaccttttatttttaattttttatttataaagtatataattttacagctgtttacctttccaaaacaaaaatttacaactgttttttttcttaaaaaattatgattatgatatagtgacacgctaagtgtgccggcatatacttatccaatcacatttggcgcgtcactatatgtcaatatttttcaaataaataaaatttgaaacttgttgagttttaatctttagtgacactc

SEQ ID NO: 221460 - DNA, 2565 bp, Cannabis indica
atgccaataagcaataaaatttctcctttctctatatgttctgcttgttttcttggaaagattcacaagtttccttttcctaaggcatcctctactgtcatttctgaacctctagagcttgttgtgtctgatttatgaggtccttctcatgtaaactcatttaatggctataaatactacattcactttgtggatgtctactctcggtttacatggatttacctcttaaaacagaaatcagatgctttcaaaacctttcttcatttcaaatctgaagctgaacttcagcttggtaggtctctcaaagtcctacagacaaattggggaggggaatttaggtcattcactacctacctaactgaaaatggtattcatcatagacatccttgtcctacaacacatcaacaaaatggcttagctgagagaaagcataggcatattgtgggaaatggcctaactctcttagctcaagcctctcttcctctcaaatttcgggatgaggcctttaggactgctgtgtacatacacaacagacttcctactccattactgaaaaaatagatctcccttggaagttttatttaacaccaaacccgactacacaacattcaaaacctttggttgtaaatgcttccctaatgtcagaccttataacaagcataagcttgaatttagatctgcaccttgtacttttctaggctacagtctaaatcacaagggttataagtgtcttgatactaatgggagactctatatctctagggatgtgatatttgattaattctcttttccctatgagcacaagactgatctgaatcccaccttaacttctcagcctcctattccattggtttcaactgttattcccacttgtcctcattctaaacctgtttacacttcagttgaccttctcagatctgtttcaacctctgtcaccactattccaacacctcatgtcgaccaacatgctttatcagatactcattcacctgatcatagtcaacatgctatttctgttgctaacaggcttcccagccagccatctgattttgttgcaggtccttcctcacatgatgtagcagcttctgttcctgatgtttctactgctcagttgccccaactgcaggaaacaccagtaccagttgcagctccttctgagccacaagtccccactgaacctgctgcccatagtcctcagtcaagttcatctgctcctcctagagttaatgcagacactgtcatcagctatcctgctattgtttcttccccagctgctcttcctctcattgctagttgttctcatgctcttgggaagaacaacttacacagaatgcatactcggtctcgatcaggtatatacaaacccaaaaccttccttgttactaaagaacctgccactttacaagaggctcttgctcaacaacattggaataatgctatgagtgatgaaatattggctcttgccagaaataaaacatggattcttgttaagcttcctcctggaagacaagtcattggttgtaagtgggtttacaaggttaaagagaacatggatggttcactcaacaagtttaaggctcggttagttgctaaagggtttcatcaacaagctgggtttgatttcactgaaacctttagcccagttgtcaaacatgttactatacgagtggttcttactttagccttagctcatggttgggaaataaggcagttggatgtgaataatgcatttctcgatggagatttgcaagaggaggtatatatgacccaaccacctggttttgaagtgcctggtcaagaacacttagtgtgcaaactcaacaaagctctctatggcctcaaacaagctccaagggcctggtttgacaagttgaggcatagtttgctatctcttggttttgtctactccaaatccgatcactctctcttcatcaatcacactcccaacttaacaacacttgtcttagtgtatgtagatgatatactgattactgggagtgatcccaaagctgttacaactcttattgctgctctacacaatcagttctctttaaaggaccttggccccttcaaatatttcctgggaattgaagtaagatacacttcagatggtattcacctctgccaagccaaatatgccaaggatttacttcttagagctaaaatgttaggtgccaagcctttccccacacctatgactagtggccttcgattatctgctcatgaggggcaccctatgccagatgttcagctgtatagatcaactgttggggctctacagtatcttaccataactagacccgagttatcttttagtgtcaacaaggtctgtcagttcatgcaaagacccttgttgacacattggcaagctgttaaaaggatacttagatacattgggggtactacagactttggccttcatctcactaagcctcgatcttttgaattaacagcctactgtgatgccgattgggcatcagatcccgatgataggaaatcaacctcttgttttgctatcttccttgggtcaaatttagttgcttggaagagcaagaagcagcagac

SEQ ID NO: 221461 - DNA, 2057 bp, Cannabis indica
gtaatataccgtggtgtaggaaatccttcttggccgcatgttggcttgtcacatatgattttttcatcgcgattgtataaatctatttttttatgacatgcgtcacatgacatgtaataaaaattctagagagtatcagttatttttattgccgcctcaatccaaaaatattttttctacatccaaatcaaatggtgttaataatagtaagatattgttattcttctggttgggcctgctctcatcaatgtcactccaccatcaaacgtcgatttgaggtttgatatcgatcaaaaggcagagaaggcgaagtgggcagtgcaaattttgatggtataagcgaatatttaatatcagttcaaatattaataggatttgttttattattattttattatatataaataatattttattattttattaaataaaaataaaaagtcacccatgaatttctcataaaccaagaatttcagttatataggcacactttatatagaatagatattgattaatactatatttaattttttttaaaaaaaattactctatatactaattgttattttttttaaaatttacagtttgaagtattttttaacatctttaattggtaaatttcactaaatttatgtgttattttacaaatttaagtttttagcagttaaactctcttaattattatttcgtacttaactctctaaatttaaatttcgacaataaaactttctaaactattgaattattagtaaattgtcatcataaattgcttgtgtacactcttgtacacgagtcatgtttatattggtaaatttaatattattatttcaaaatttattttaatatgaaataaaattataaaaataaaatatttaaaaaataaaaaagattataaattttaaaataatttttaaacaataatattaagtatacgaatataaacttgacatgtaaagaatatacacatacaccgtccataaatttgctaacagtttaaagaattttactaccaaaatttaagcttttttttttttgagaaagattcactattattataaattaataatcatttacaacagtagtgaaaataggatagggaatttcccctagccaacaaatgtcttgatccaacgctaaagcatgtttagctaaaccatgtgcagcatgattagcatttctcttagtgtgagagatatgtgcttcagggaaaaaggataaaagacaacgaacatctaagattaaatctgaaaaactagataaatctgtcgatgtggagtttagagcttggtaaactcttagagcatcagtctcaatattggtgatattaaactgatattgcagcacccaattcaagctatggaaaagggctttagcttccatttcgtctgaccgaaagcagccttgcactggtttagaaagagcagcaaccacttgcccactgctatcccgaacaatggctcctatgcccaattttttctctgcattattaacagcagcatcaatatttattttgagtcccaaaccagttggtggcagccaacgaatcccagtagcactggtattgttgcaggaagtagaagcagttggcacaaccggttgtccagcagcagttgtttgctttttactggtatgatttctgcatttggccaaatagtcagaggcaaaagtagcagtgcgttgtccatcctcacgtggactaccatgtaaggtcctgttccgacttgaccataaagcccacattgtacagataataagctctaaatcagattgggaatgcaaggtcgaaaggtggaaaagataatctccattggacatttgttgtgcctgtcgaaaatcaaacgagaacccagttgctttccaaactgatctggcatgtttacaagagaaaagtgcatgcccaatagattcccaagcattggtacacattgaacaagctgctgagtcgattactttccttttatataatgcagctgctgtagggagtgcattgttcataaccttccatgcaaatattttaatctttgacggaagagtcaaattccaaaaagttttccacc

SEQ ID NO: 221462 - DNA, 2417 bp, Cannabis indica
tgtatatatttttttaagatgtaattattattatagagatatatttcattaatacggaactaaaaaatatataactaattataatatagaagttatttttatttataattggcctaaattggaaattcattttttttataataaattaaaggttattcttgaatagagtattcttaaaatctactgtatataaggttattcacatcctaaaattggacacatccaccccttaaattcttaataattattggatgtaatattaagtgtacacataatttagtggggtgttgcacacagaatataattctttttctcacacacattccactcctctattctataaaaaaaaaaacaaaaaacaaaattatctcccttaaccaccaaatctctattttttcattacctaacccactttcttctcctacatattctatttcactttctcactgcataagcttgatttcaaggctcattttttaaactgatcggttaccctgggcaaaactattattgagttttgcatcaacaaattatcttcgattaggtgaatcccaatcttcttaattaattgtttaagtagttttgtttttcagtattgtttcgcagtacaatattgattaaaactttcctctttttaatggatattgatcacagttatttttggtggagtaccattaagcgttgctgataaatattatctctcaaaagtttaataaatttgggatatttattgtgtcaggttagaatttcaccttcttgaatttaaagcttcattataatttataagaccatcacctatagtaaaagttgaactatgtcatcctctgtattctgaaaaaaaaaaaaaaaaaaaaaacttcaaacttctttacaagctcatcgtatataccttcttgaaggtcacaaacttctccctgaaaaacataaaagatagaataattaaaaatgttatagcaaaagtaaggatgtaagtaaagcactataaatgtagtacacgttaaataaaattccataagtgcaagctcagaagccatatctatatcagcatcatcaaaaacaatgaaagctgagttgccttctaattttagtgatacttgtttcaaatttcaagtcctatatttctccagacctagtaaaacttacctgattataataatagtatatcagcctagttactattaattatattaaaaacattcaatatacaaattaacataataataatacatctcttacctacatatatataaatgcctatatcaccttttcaaaaaatactgaaaccaacaagatattgtttattgtgtttgtattgttttttgccaagaaatttctgggttcggtgccgtgaggagcaggtgggccaaactatagtgctagagagattcaaagtaaaatacagacagtttattactataatgtagtgtggggaatatggtaaggtgtgtgtatctattccttagatgctgggaataatcatatatttcatattgtgagaaagagagagagagaggttaagcatgtgtatgctctgcataagtaggatcaaattgtgtcacagctttaatttaaccatatgttatacagacacacaccattcattttaattagtgttttatatgtacacataccattaaaaatatcacaacccatatacctaaatttcccattaatttcaaatttgatatatataatatgagatcatgagataaaataagattaatatgtatatatatatatatacacatcaattgaagaatagagctgctcatcgaaccaaaaaaataacccaaaaatgaagaacccaaaatctaaataatgaccacacctagtctgtttcatgaagactacaagcaaaccaaattaaacatatctaaatcataggaaacaagcaaagacaaagtttttatagaaaaaaataaaaactttggagattggagatgacttacagtgaggtgtcgttggttggtaaagaataaagatggagttaagcttggtgttgtcgctgcctgccttccaagtatggctggccgggactttagggccgtttatttgggatttttggctgaagtcggacctcagccgctggttcactggtaggttcgaaaatcaagaaagtgaggataaagtttgggttgtctggttattatgttattgggctgttcccttgcaaaaaaaaaaaatatataacaattgggctgtccactgccgttcacttcccagaaattgctgctcgtggcacataatctaaaaagagagatatatctataggaaaacttacaaaaaatactggaatttgggttaacttttacaaaaatactgtcacacggaaagtttttcaaaaatactgtgtttttataaaacaccagtaaaacacaaagcagtataactcaaaacaacagtagaacactagtaaa

SEQ ID NO: 221463 - DNA, 1952 bp, Cannabis indica
tctctcaaatgtttgtttttccttataaacaacataaccaccacggcttttggattaagcacttaataataataattaatctaacaacgacaacaccaaaacaaaaataattagaaatagaaagaaaaaaagaataatttgtcttaaaggtgattataataaataataaataacttctattaaaccccatctaattaaaattccaaaaataaaaattccacatatggctactcccttcctttaccagccacctcctcctcctcctcctcccacgcccaccaaatcgaatttacccatgttatactacggcctaatcgtcatcggaaccgccgcaatcgttctagctctttacaacatcgtagtcatcagactctgctccgatagccggcggagccagctgtcagtaccgaggccgaactcctcgtcggtaattgaggtcagtacgaggtcgtccggggcagggtttgagagcagtcagttaccgtctagcttcaagtacaaaaaggcggcggcggcggcggcggaagccgaagccgatcattcggaatgtccagtttgtttatcgggttttgaagagggagaagagattcggaaactgccgagatgcaaacactctttccacgcgccttgtattgacatgtggttacactctcactcagactgtccgctgtgtcggacgccggtgactgtaacaggcaacgaaaggtgttatcgaattctgataagtccaaccgacgagatttctagacaatagttttgcccaattctgcaaatatctgttttgagttactattgttattattatttttgcaagtgggttgggtgttagactgttaggaatgagaaagaatgggtgtagtaaaagtccaatgattttgataggtttaaagtggggacaacgaagacgatgatgagttgactaagaaatgtaaaatgaggaaagcaagtcttggagtggatgaacagtctgaacaaactaagcaaattagtataacgcttcgtttttattatacacatttagtttctggtagataagatttcattttaatagtgatgcataggtttttttttcctttatatgtaatcgttactgtgtggatggttgtgataattggaacttcatttgtatatttatttttttttttttttttttttgtaaagagtcatgtgttacaacacacctacaaggaaggtagagaaccattccaaactaactcattatctaatccaacacccctaccaaacaccccatgagctaaaagattaaaatccctaccaacatgagatatggataggtccggactgaacgataacaagttcttaatgctacaaactacatcatcaaaaacactattattccagttacaagcagcaagtttatcaactatggatttacaatctgtcatcagaatatccactggaaaccgaagcaattgggcccattgaacagcttgataaaccgccttggcttcggcaacagcaggtgggacaaatccaggaaaaggagtagaaaaacctgctcgaactcggttacaaccatccaaaagaaccacaccaatgctatgtcttttcctatgaagatccgtggctgcatctgtaaaaagtttaaaaccattggaacaagatggttgaatccctgcatggactgagctccactctgaacctgatctctgcacctgctttaactgtgcatctaagtgctggcagaaatatgtaagactccaatcaaaaatatctttaggagaaatagaaaattgcttatgtaagacattatttctctgattccaaagtgcccacaaaaaacaatacagaataccaagagaatctttatcaagatcaaacgccaaacccataaagaaatcatttagactcatatgcttattactgtcataataagagacaaacctggaagatctccatgcctttctggatctggagcaatctagcatagc

SEQ ID NO: 221464 - DNA, 1722 bp, Cannabis indica
ttgccactgattatatgtatgatgtcatattgtcataggtagagaagggttccacgttagttttctaagttcaccatctaatttgcactacccacatccacatgcttcttttaaactatgagcttcactctcaaagactctctctctcgtattgatgtagtgtcacatgcggtgtcaatcgagtcaaatcccaatggggtattggaggggtgtggtggagccctcatcatgaccaaatagaaggccccctaattcctcactcaaatacccaaatcatttaactcaatgctacagtctctcctcattctcccacattagttgccactttctctttatcatgtatgggcacggttgtggtactacacttttaagtgtactacttgctacacatttataattttacctaatcaataacaacaatattgaaaatactttctttgaaaaaataagaattcatattcatatgtatgagatgaattatcaatcttgataatagaaaataaaaataaaaatagacatgcatataaacaaaaattatttactcaaaatgaaatagagatgataatgaatgaaaactcaatggattaagatcaataacaacagatatgagaagattaaacataataaaagtaagtaaagcaaagattattgttagaataaaatccctcaaatgtttaggaccaaagagcttgcacaatcaagagaaaaccaaaagataacgaaaacaatacctaaacaacacgaaaatggtgacaactaaccaaacaaatgactgaaacaactgcatatgagaaccacccagaaaggataaaaaatgacatgagggggcactgcccttttctgaagctcgtgtccactactcaccaattacaacctgcacagaatgcccaaggttggaaacactagcatcaaccacatgacatgccactatctagggtttaaggagatatgaacccctattgtgcaatcactaccattgtagccaccaagaacgaacaagctaaagccaccaacaccccactcaaggaaagaggacacatatcctaaaaggccaccccaaaccctttagaagcagcaaaggacatccacgatctccctcgaaagggaaaagagaacaatccactagaacaatcgcctaccagccaccaaggagactgaccttggaaaagcgatcctttcgaatatggtgttgcacccacgatgcagacacgcagtcatctgtgaaggaatatagaaccaaataacagagaagatgaagcaccccaagttagtcgctactcttgacccaccatgtatatcctctcagctagggcatcagagaaccacacaggtagagcttgtagagggtctagttgagagaaacaaaaaatgattaaaatcatagcaaaagagaaatagagaagggagagagaaagttattattagtttgtgacactcgatattaaattacaaaaataataatataacacatttactttagtgatattacaccagtaagtatttctattttaagaagtaattaaactaacataattatgaaactaatataataatttcttatttctcatttttgaaaagggagacaaacaaacatgataattaataatttaaatatatataactcgataatattttaaaaaatatatgcaattattttttaataaaaaacatcttcattaaattagagctaatttttttaaaaatagcataaaatttagaagg

SEQ ID NO: 221465 - DNA, 1660 bp, Cannabis indica
aaccgacaccaataatttactttttgtcactgtagtataggtgtcggttttatgaaccgacactaaaagtattagtctcagtttaaaactgacaccaaaagtgtgttttgtagtagtgttatttgaaaaagataataataataaaaataaataacgcttgagtttatcctaatcctcctccaaacaagcaatttacactcaacaaacacgcataccagccaagcctctgtataggtaccaaactttttataaagccaaaataattctatccttttggtttaactttctttcatttacaagacataatctaacattaagattctctttcactatttcatctatacaatgagaacctaaacatttcttttcaaaaatatataaatttcgattgatccaaaaatgccatatacaactcctgcaagaactgcataaaatatatccattatcaaccgattaggtctcttggtattcaaccaatgggataaatcctcaaattgatctgaccaaagatggaaaccaagccacttactgattttgagcaataccctctacgagaaagggcaactaaatgttcatgacttttaagtttcacctcactattgagcaattagcaacatcaacatacacatgcttcttatctaaattatctcgagtaggaagatttgcatgaattacctaccacgaaataaatctatgacttggagctgataaagaacagcatacaaccttcttaaacgccacccgagcatcatctttaatcaaatagtcataagctttactcacttgaaacttccctttactacccgctttctcaatgttacttcttgagaacatatgccaatatccacttgaaagtagggtcatctgtatttgaacaaatggatgtacattcacgggtggatatgagttatcgttaaattcttacgacgattactttagatatttaccttatggaaagaaatttaaaatatttgagaaatttcatgaatttctagctgttatacccaaaattcggctggcagacacgtgtcaagataaagagaatgcgaatcggtgtcgtatctttttatggaataactcattaattgagtaagtactagagtatatttgtaacccgttgcctgtaaagacttatgcgaggaatcaatgtacgaactagtacttagagtattaacgagaaaccatatgtggccgaaaaagaatagcgaggcaccagagaagaataacacatacctcggctcacaaataagcagactaactataaaagtcaaaccacctcggagtaccataatacgagacgaccatctcgctaggagaaaacttcctatagttacatccaactaacggaagtgagactcacaaccctagcaagtcagcagatttccttatatccccgatcaccgtttattgtcaatctcgaatagaataatggttccagctcgccattgggatcactataatcaagtttctgtcgaaacacattcagaatcaacaattaaagacgtgtttaatacacaatatttctgacctagtaaaaccggaaaatcacagctgtatgactttcaaaatcattaaccgcgtttacattttgtaatatgtaatcaaatcccatgatttaaggcataatgactgtaaaaacattttggtcagctttgtaatt

SEQ ID NO: 221466 - DNA, 4023 bp, Cannabis indica
cacctacactgtgtccaggcacagtgtaggtgaccctaatgtagggtgtccccactcgatcttttaggttattaatcaactaattaatttcaaaagtagttgagtttcgacatcaccgttctaaggattcaacatactaaaagactcgaggataccttgacaggtttcgagaggtaaataatctttcaatgttttttactttcagatttaatatatatacatatggtgatcttggacatatgatacgacgataatcaataataattattccaatacgtacctgatttattaccataaaaccaaaccccagccttggacccggcctcggaccctgaatgtcagactcgacccagactttgaacccaaacctgcacccgaccccagacccggaacccaggacttggacgggggtgagagttggagtcaagtttatagtaaagataatataattttatacaaacaattaacacaagttaataccaaacatagcattgtattaaataatattaatacaatacaatacaatctaaaatattactatacaacacaacacaatagaatacaatttaatacaatatggtgtaccaaacgagccttaaaatagattttaattacactcacgtctaatttattacgtaccctcaaaattacactgcttagtaattagacagttattccaaatacactatcaacgaccacaagagagaacggaatcaacaacagacagttgaaaagtacaacttccactgctttggaaactttcacaatattgtagaaacgtcagcccattggcagataaccgaaattgtgatatgtgaggcaacgacaactgatgaagcttttccaagtgctccatcacactcctcatactcggccgagccagaggctctgaaagagagcaccaaagccccaatttcaacaccacttccacttcatcggctactatatgatcacactccagcttttggttcttggcctcaagaatgttgcctctatcccagcaagagaacactctgtccaccaaaatggcatcctcttgtggctctcgtcgatcgataggtcgtcttccgcaggccacttcgagcaaaaaagccccgaaagcaaacacatcagagtaggttgtggctttcccgattcttgtaagctctggcgctatgtatcccatggtcccggcgatgtgagtggttttatggtcagttccatggtcataaaatctggctaacccaaaatctccaagccttccattaagctcactatcgagcagtacgttactagctttgatgtctcgatggacaacaacttgttcccattcttcatgcaggtatagcagccctgaagccacaccttttatgactcgaaatctttggttccaattcaatgtctttttgggatggtcgaataggtacttatctaggcttccgttgggcatgtaatcgtagaccaataagagctctcctttgtgttggcaatagcccaggagtggaactaagtttctatgacgaagcctactcatacttgatatttctgaagcaaattccttcatcccttgtcttgatttatttgaaacttttttcacagcaatttcagtactagtgttaggcaacatgcctttatagacactcccaaacccacctttccccaacaattctttgtctatgaacccttttgttgctatgcacagatctttgtatttaacgctatgaggtctaaactcaacctcatcccaattttctattacttctacaaaccttttacttcttcttaccacataaaccatgactactgaaataaccattgccataaccaacactattggcaacacaactatcaaaataggcttattagatccctttttgtttttattgggttctaaatactccattgttttattactaggatctacatatgcaggaagcttaggaagttgttttaagtcaagctcttttgcttggccattaatcttaaaactccaacccaaaacatagtgattacttccaacagagccagttgaggaagtaaaaccaacaaacatggtgtctttcaaaatcggtgaaagatctttggtcaatgacaaaaggggcttctggggttttctaacaacaatagcaggagctaaagtaacgttaatttgcttcacaacggcgtcgtattcaacccaaactttcataggcttgccacttacaagactcaagttcttaaactcataaccattattattatctccgacaaaatatgctgcagaagcagaagccaccgattccaagccgttaatgtcgatgccaacgtggttgtcgtcgatgtctctgaacgaagagctttccttggtgtccagctcgatcgcgaggatgtggttggtggaatcaccattgttggactcgttgaaaaggccaagaaaacgtttggaactagcttcggggagacctaaagtgggagaaatgacgagagccatgccgtggccattagtgggagattcagattgtcctggtttgatagcaaagatgaaagtggttgaaaaagagaaacatttagaattagcagtagtagaagaaaaagtattttgaaagtacttgaaagtgagtggtttggggtagaaggcagagccaatttgaaatttaacactagtattggtgagtctcaacaaaccaatatcgttaatttcagcttctccactcaacatgatatttgatgagttgaatccggtgaaggttataccgctggtgagatctttatcaacagctaatactaattgggttactaccaaaatatttattacaagcttccaatacatggctatatatattataaccatatatatatttatatatattttcaggccaaaatgaaactgagaggattctaaggccacaagtggtacttagaattgtttagcttttttataaggacttctaaacgatcatagaccaatggggatcaaatgggaaaagaaagaaaaaggggaaagaaaataatacatttgtgggacatgttacgtagaaatagaaatagaagactaagaccatggaaatgacaaaaaaagtgtatatttgacaaatatatatatatatatatatttgtatcaatttttaataattctgttttaataaataaattataaaatttgatgtaaaatttaatattattagttaatatttttataaaaatataaaataataataataactttctcatttattttaagattttttttttcttcatttttatattaaaattaaccctaaaattaaatatcttatctatactatgagatgaaaaaagtaaatatttatactatactacttttatttatttatttattttagaatactgcaaaattcgcaagtggggaaatacccttagacaaagctgagttaaaccgtacacgcgggtcaatgggtaatgttacaaacctgaaatgtattttataaacgggatctattaatttttatttccgcaaatactatcaaaaaaaaaaagattgatattataatggttttcttttataagataatattactttaaataaatatttatattatttattaattttaaatatattattttagaaagtttattatttacaaaaatactgttaaaaaatttctctagatgtacaagaagaagtaaaacacacatgtgactatctaggcgagtgagagagtgagagacaaagccttcaaagttgtttgacgctcacaaactgtagcgttagaacgcagcagtggttatcacgtgacaaattcggacaaagtgggtttcaactgcataaactccactatgaataataataaataaacaacttattataatatgtaaattaaataggcataaaaataactccacaaattgcatcaaataaaaaaaaatacacaaataatctataaaacaaatttaaaaataactacataatacgtatataccaactcaaaaaaataaatatctacacactaaataagtaaatatatactcatttttttattagttaaacagccgaatagcaacaaataaacaacacgataataattt

SEQ ID NO: 221467 - DNA, 3626 bp, Cannabis indica
gtagaatttttaactttagatatctctataaatatcattttttataatacatcttcagagatatttctgttaaatcgatattgtcttttgatgttgttcatatatttttttagaaaatattaaaagctatatctctctcctgtaccaggaaaaaaaataattgtctaacaatgactgatacaactgttatcgggccgggccagatcgggtcaatgatccgaataaagtccaattgtcacgggccaaagactcggcccgcgaaaatagcccaaattgccattcctatatatatacttgtcacaacaattaattgcaaaattaatttgttaataattttttcaaaaatcaataatttaaacaacaataaaacctctttaacataatagtatatcttaagaatgttagttaaaatcactcaaacaacaaatattgattaaaattttaaattccaaaagtttgcatattatctagtttataatccaaactatggcatattattatattgccaaaagtttcatccaaaagatgatattaaccagccaaaagttcatccaaaagatgatattaaccagccaaaagtttttctaaaagtaaaacacttacattttataaagtcatctcaatagtatttttcgaaattccatcaactattaaatctcacctcacttaaacaaaccaagaacgaatgccaacttgtattcattatccaaagtgaacaacagatccgtgtaagcttgattacaagaagttttcagcttcaattcgttgttcaaatgacaatccatcgatttttttcagttcattgaacattttcaatcttctacttgcaccttctgtctcgaactggaaacaatcagtaattcttctaatactatcaccagcagcaacttgtatttcaccaaatttgttcactgtgttagtcaatacatcaactaatgaatcttcattcctagacctctttctacttcttttcttgattgtgctgaagttgttcccgtacttgtgtgactatcagttgcattactaacaagatcatccattggggcaaatggatcgaactcagattgttgatcattttctgcttctctatcaatctcatccactgtttcagaaaatcccataccaccttgaccatttgcacgatccttctcaaatatagtatcaaagtcatcataatgaaaatatagtaacaaagtcatcataatgagaaaatgctttattccttaagcttcttgcatttagatgactttgcaatgaataaaaaacatataaaaagaattaagatatgatcaaattgtaaattaaattgaacaaagtaacttttacccaatcatgaaagacactcttttcagcaaccacacactttagaccctcattccaaccgaaatcatttgcttgtctcaacatgtttgaaattgcattgaattgtttctttagtatcttgatacaagactcaatgtggggttgtcctttcaatccgcaatgagatactttttcattcatctatctttccaattgttgtagatagccaggtttgaaagtcccattgtctgctttccatcttccacaatttaccaactctaacaaacacccaaccagttttgaatcctcaattgaagtccattggtgttttttttcctggaatcgatgtgttaggccttgggattagtatggtgggctagcatatattaaataaaagggtaattgagtctttgtattgagggtagtgttttggagggaatacaatggtatatatagaatattaaggggaattgaggggtatgcaatgtttgagtaaatctctatttgcaccaaaggggcctaagggctcctatcttttgtaattgggtttctcatacatctaatatacttttcttattgttttgctactgtttcactcttacttttgctactgttctattgaattcttgagttggagttctcgggtcttatcaattggtatcagagcggaagttcttggtgagtgctggtgactatcacaatggaatcaagagtggttggatcagattcaacattatctaagctgaagtcggtggaggcggcactagacagattggaaactgctagaaacagaatcagggatgctgcggagcatcgatctgagtttcaagcctcgaaaattgaattgtcgctgttcgacgcaggagatgaccccgaggaatgggcttacagggctgaattgcactttagcttacaacatttgacaccagcggaaaaattagacactgcaattcattgtctcgaaggatcaactctgagatggttctgttgggaaaatcggaggtatccttttcaaacgtggaatgaactgaaatccctactgattcgcagattccgttcccaatccacgcacaaaggttcagagtatcatcgaaggtttaaggttgaagatgacacagatcttgtgaaatcagatctcccaaaggatattgaggccaagattaatgaagagaaggatgttagaaacgatgaagaaatggacagggcaataagagaacacaaactagcgttcgctagactcgatagtttcagggaaactatcactgcggcaccaccatctcctgaagagacggagaaaaaccagcagttgaagtcgtcgccggagacgaagaagagggagacggggctgctggtggagtcttatgagcagaaggatttgttgggaacggcaccagatcgggaagttgttccatggagttcgctcgcacatcggcaacgaacgacatcagagaagatggtggttggtcgaaggagatagcgtccctggtgccatcgccggagaagaaggctgtgtgggaggtggtgccggacgaggaagagaaaacgaagacgctgttagcgatagcgtcggaggaggaagtcccgctggtggtgtcgttggggtgggtttcatcgccagtgccgaggtcgattccattgcaggcggtgactgaagccgaaccaatagcggaggtcgtcgccggagacgaagaagggggagacgtggctgttggtggagtcttcggggcagctggaggtgacgccggagagagtgttgtcgccgacgcaggagcaaatcgtcgtgaaggaaaaattaccaccatcatccatcaattcagtcgcgtatggggttcactcagtaaagtcgctgaactgggaaaaggaaaagggaattgttggttggtgttcttctcttcaggtactcaaaccctaccaaatatggcccaagcccaattccttaagccttgtttcagctttggcccacaagagtaaacttaacccaatgggtcactttgaattaattaaattggaacccacccactttattcctatgtctagtttagtaagtgaaggtcattttgggaaccaaactcctttctttactccatcttgggattccaaaggttatattgctttgaccaagttgtggtcatggcccaactaaataaagaaatgagccattttatttttaaaggggtgcaactatggatgtcctacccaaaatgttacatttacaatcatgagacaagagatgggaaagaacacttgaaagtgactcttttgcttataaatggtgaaggttgtcattttaatggaggcaataataaaatacctttggtggatga

SEQ ID NO: 221468 - DNA, 3918 bp, Cannabis indica
gggcattttacaattttgtatatattatcactctatgtgtcatgtttatttttagtaattttaagtattgatttatatttatatacattagtatttataattttgatattgtattttattaaaaaaaaattattaaattataataattcatactaaaataaataataaacatttattatttaataaaaaaaatatttaatttatttatttttataaaactgtttaaattgtttattttgagttttaataaacatattttattatttaataattaaaatatatggttttatgtaataagttatcagaatgtataagtttttaaaataattttttttacacattttttgtaattattttatttttgttgtacatttatgaaaaaagccctaaaatatattttatattgaaaaaaatcaatggaatttgagttataatatagatttatgaaacgagtgaaataatttctattgaattggatgaacactctgtttttagttttaaatttatcaaagatcataatatccaaccaaaacaatggagacgcttagaataaaaatcaaaaaaaaaaatttggtcgtttattattcaatcgctcatcaaccctcatgatctacattggttcgtaatcacccatctggacttggccaaccacagccaccacaccaccaccatggtattctaaaatcataacaccaaatgggttttgggagaattcaacaaactatcccacaaatccaacatataaccaagatagaaacaaatatgtacatacatacattattactgaaaaagaaaatgaaagcccaaaatcccaaagcagcattaaatcaaactccaacagacttgagagtctcagcacgtggagtgtgagcataagcatctcccctagtaccatctttaatggagtaattcgcttgggggtcttgaacatgcgccactctcctaaaaaacgacttgtgcaagaacctgtcagcgcactccatcacgtactctggctccgccacctctggcaaactctctcgacgcttctttttcacgaacacgttcggactatgcatcagttgttgcttggccgtgtgtagcccgatcatcaaggccaccccaatcatccccaccgccacgtaaaccggcacaaagtccccttttggccctgctggtacaggcttcgatgcttgcttgtagtcaccactgagctcggctgggttggcataagccttcatctttggtggggttgaggtagctagtcctctcagtcccttagccatggatttccaatgaccctgcacattttgagtaaactttatagtcaaaaacacacataacacacataaacataaacatagtcaacaacacaaatgcgtaccattgctctaagcgccatgatctaacaataaagtaaacaaaaagagagtacaagtgtcacaatctttccttctttctttgtgttcagattttttcaagtgggcatacacttgtacttataccaatttaaggttatatggggttgaaagagagcaacgacttgtctgtaactgttaagaatcaaagcaaagcaatggaaagaggaagagggttctggagccacgtagtccaatatagaagaaacgggacacgtgtcacatcacaaaggtgtacagcgtcacattggaagtctcaagaagcagcacgtcgcatcttgtaactattttcttccttatccacttcactcagtttcattttttttttagtactttcttacaagaaaaagtagaagattgaaataaccttgaagtctctcatgaattagctgaatgtaagaacggaggattttttttttcttggttaaacaaattagtaaaagcatttttctcattttcattatttttcccattacctttaataaagaaagaattgtaagaaaattaatcatgagagtctataaatatattttgtgctcaataaattatataatatgcatattttgatagaggtagaaataaaaatgtatagaaaagatacctatatattatgaaaaatactatcatctactttttcatttttctatataaacttttgagattcgttattcgctacttaaaagctggaacaagttgaagattgttgaattgggagaccaagttcttatcaaccgtaaagtgagacattctttgcttctaatgtcttaaattatgttatcatcctcgtctctttcatacaagaacaaaacctctatggctcgatctatcaagttgtacgtggttgaggtcaacaaaacgtataaaacaaaaagagttatacacatatttaggtagaatgtctgaaattggtatctttacatgcaacattcaaaattgaatatatctcatcagtttggggatgcaatgtatccccagcaacaaactcatgagtcactccttccaatcgaatcaaactacaaccagcattcttcttcactttcttggactccctccacctcctcaccttcaccacatcctcccactgctcagcattcgcatacacactcgccatgatcgaatacacaccgccatcgtccggtttcagcttcatcacacgctctgctgctttcatagcaaccccaacattcccatgaagcctacagcctgataacagcccaccccacacgaacacatcaccccccattggcatcttcctaatcatctccattgcttcttctatcaaaccagccctcccaagcaaatcagccatgcatccatagtgtttatcctctctacaaacattgtacgtacattccatgtcattgaagagctttctggcttcatctaccagaccagcatggctgcaacccaccaacactcccagaaagctaaccccatctggtttaactcccgcttcaatcattctagtgaaatagtttagtgattgctggccaagaccgtgcattgaaaacccaactagcatggcattccatgtacataaatttttgtctaaactcgagtcaaatatctcttttgcaagctcaatacaaccacacttggcgtacaaatcgaccaatcctgtagttaagaaggaatctagacgaatcccatttgtagtaatgtaatcgtgcatagtgcagcctcgttctaaatcacccaactgggcacaagcagagagaaccgaaaccaaggcaacgttatccggacgaatatccaattcaagcatttgataaaagagacgaattgtctcttcacactgattactctgtgcataaccagctaagatggtaccccaagaaacagagtctctcaggtgcatttcgtcgaacactttacgggcacccgaaatttcacctgctttaacaaacgcatcgattattgtgttgtaagagacaatatccctgagttgaggatcctcatcgaatacccggcacgcgtcagagaggcatctgcagacggagtagacacggatgagagcgttggaaacaaaagaatccgccttgaagccaaacttgagggactgggagtgaagagctcgggctatgaaaatggcgccggtattctcggtgcccaactgagagcaggccttgaggacaaaggggaaggtgtgaaaatcaggagaaagggagagtcgacgcaagcgggagaagaggatgagagcttggagcggtgaggagaagagagaatggagtctgatgatgttgttgaatgaaaaggtagatgggttttgaatgaggtcaaagatagagagtgcgtagctcaatccagtcacttcgccattactattattatcattattgttgttgttgttatgaaaagtgaagttgcagaaagaggaaagtggtgagcaataaatgggtatgagaagaagagaggaagccggtgacgatggagtgagcgtgaagttggtagaagttgtttagagtagtattacagtgattcagtatcactctactgacattgctgttattattattgttca

SEQ ID NO: 221469 - DNA, 3611 bp, Cannabis indica
taaataaaataaaaaataaaaacggctagtgccactgcaaagctctgaaaaagcttatatttctttttttttctttcttaatttcacacggatggagtttatattcccaagagaaaataataataataatttttctttaattgatgggtctcaatctaattaatcttcatagtatgaatttgatgccatagaatggaaactttgggggttttgtaaaattcatgagtgaagaataagaagaaaaaaagatgagaccttttgaagaaaggaaaatttagatataaagtgagatagtgatatattatatgtttcttcaaatttctcttttcatcttaagaaaatgactttacttatgtgaaaagaaaaaaaaaatcataattggagttgaatatatcataattaccttatatataaggtaatcataaggtaggtaaagaataagcacctcttaaaaattaacatatagaagtaatttttactaaaaatacagctacttttagtgaattttttagtcacaatataaattttttgtgattaaatatgacttttagtcacaaaaaaatatatttataactaaaagtataatatttaaatataagttatcactaatttaattttataaatattgtaattaaaagaacatttagtcacaataaactgactaatatctttagtcacaaattttttaatcacaacataaaatgataatttataattagttacaattttatttttactttaattataaattttagcgtgactaaagtaaatttttttataacatttggatgccaaaaattagttcatataattttcaatttttaagtttggcaataaagttaataattatacataaatagtaattaataataatattttgtgtaattataccaattctcatgaaattatcataattgatgagtgtatatctcaattacatcaaattagtgtgacattacttaattaaaaattaaacacacataccaaatctcattattactctaaatcatacttaattctaattacattttacatataggcctacctaaaaaggaatactcttgaaaagtcttgtcgtatgacatgttttgaaagtttttttctcaacgttctaagtcaattctagttgttgttttcgtttctatggcatcaagtagtcaaccggcccttgatctgaatgagcaatacgcccagatcagtttggaggatgaggaagaaggaattctgattggaggagaggaggaaggagaggagttagcttttgatgatcggtggtgtttggtggggaagtttatcacgggtaggacattggattttgatgccatgaggcacatgatggcgtcgctgtggcaaccgggaaagggtgtgtatatcagggaactggatactaatagatatctttttcaattctatcatgaattggatatccaatcggttgtggatgggagtccctggacgtttaacaaatgtcctctgttttccatcgtttaaggaagggagaggatccgaaggtagtacagctacatagaatggaattttgggttcagcttcatgatctaaagtctggttttatgatggagaaagtggttaagagtgctggtgattatgtgggtggatatgtcaagtctgacccgaaaaactttaatggattatggagagattatctccgggtgagagcaaccattgatgttaataaacctttgaaacgaagaatgaagatttgcaaggaaaatggtgaatggatttgggccaatttcaaatacgaacatctccctacttttgtttgtgtgtgggatcataggccattagaacgtttttgtccaaaacgctttgatcaacctatagatcaattgtcgaagccatatgggattggtatgaaggcgcagatgaggaaaaagaattacttgattggagcacaatggttacggacggggaatgaagctaacggagctgtcgggggaggcggtggtgcacgagtttctggtgccggaggagcagcggctgtgtcgcctaaaattatggaagttgatcgtcaagatgatgatgatcatcacgatcccatgattgtaggaaggaatcacgtagatctcgtacaagatggaggagtggatcatggacagcatattggggagggtcaaagccaaatcaaaggaggtaatgtagctgatttaaatgaggaagatttgcttcttattatagacaataaaagaagacgaatggggaaagaaaaggtggcagttagtggggataagactcattcaaaggtggacaatgaggtggattgctatgatgatactgttggatcaaaaaacggattaaaggtgggccatggttctcaggcccacccatcattatgagcatcttatcttggaattgccatgggcttgggaacccatgggctcagcaattcattaaggaccttgtggttcaaaagaggcccagttacttgtttttatgtgagactttagctaaaaaagaggttattgaaaggttgagagtggctattggttttgatggtgcgcttgctgtggattctgttggtaagagtgggggagtggctcttttatggaaagttgaagaagaagttaaggttctagaatatggggtttcttacattgatgttgtgattagcggtagcgatcaaggacattggcggttgacaggactttatggggaaccgaatagaaacttgaggaaaagaacttgggatcttctttgtgagctgaaatccaagtcaagcttgccttggtgtataattggggatcttaataatgttacttctcatgatgacaagaggggtggcaatccttatccgagatggttacttgacgggttcaatgatactttggctatgtgtggacttcatgaccttgagctgtttgggtacccttacacttgggagcggtgccgaggtactgtggattgggtggaagttcggattgatagagccttggtgactcaatcttggttagacttttttccctcagctaagctttttaacttggaaacttctacatctgaccacactcctttactgttaaatactgtcaatcaagttgtggtggcaaaaaatagttttttccgttttgaaaattcatggcttaaagaaccattgttttttgaaattgttaaaagctgttggcagccagggaattcggtgggagttattgacaaagtaaaacaatgtggagaagtgttattgagttggggaaaggattattctggaaatttttcaaaaagaatcaaagattgtaaggaagaaatgaggaagtggaagagaggccaagatgatatctccatacaaaattatcaatcggccagtgctaaattgaatgatatttttctgcaaaaagaaatttattggaagcaaagaagcaagcaactttggttgcaagagggagatagcaactctaaatatttccatgctacagccacggcaagaagaagaagaaattcgatccaaaagcttaaggattctgctgggaattgggtggactggcaggggggactatcatcggttgtggaagaatatttttctcaactgttttcatcatcttcatcagcaggaaacaatgatctcttccagtatttttcagcctcagtcacggctg

SEQ ID NO: 221470 - DNA, 3709 bp, Cannabis indica
gtgatttgaaagaccctatctttatagcttgatggacccgaggaaagtcatagacaaataaatgcttccatcccttccaactccccaaccgttggatctaatgagagatctagaccgttgattttgaaaaaggcaattttcttcttaaattataaattgacatcgacagctctctcttcactttttccacacttctactagacttcgagtattcccctgtaaatttttctctctcactgttccttcgccattgcatgaaagaagtgtgatagtttaattcaataattgctcaatgtttgcatgaggcttttttcagacattgatcctcttcaaatcgagcaacttgaccccttgccaaatgaagtgttcgatttggaggtcagttgcgaccgccttatctactgggtttgaagacttcagataagattctatgatagcaacccatctcctttccacttaacacataagtacaataactcttggttaaaattttattatttcatatctaggatataaatttcttgttcaagctaggactaggactatttagatgttgaatagcgaagtaggctatgtgaaagaaatttcacacttttaggataaatctgtctgaaaatcaaattgtcgtgaaaagcggatagtgctgtctggaggttttcttttttattttagctagttgcttcaaaaagcttggttttatcgattagggtacaagtctggaggttttctttttattttagctagtcgcttcaaaaagcttggtttctctttattttctgctagtagtaatgaacctaaactaggattttcaattgggcactgtgggagccactaaaggtgcgcctattgttcttgccagggaagcacttggagaaggaacccaggctatggttgttgtttaagtgccccaacaagggatgattttggaaattataccaaaggatgaacctatcatagaggaaggactatccgcgaaagccaaaggaaaaaggagggcaaagacccctcaactacacatcttggagatggatcagaatgccaggtgtttctgctcctatggaatgttgacggcctatgccgatggtggtgggcttcgcaacattccaagattgatgtggcaaaaattgtgtaccacaagagaattagtgtccacttgtatagaggcattcagtgcttatagttgatcccacattttaatggagtacatgtccccttaaggacctattttatgaatttgatgtccaagattgggatagctcttttctagctaatcccctcattgtataggcttctgacttggtggtatgtcttctgcaagatgaacaagttggaagtaccttccttgaaggatatttttttttacttttacagtctaaaggctaaccccttgagggcaaacaagaagaagttaggtttctttaagttggaaaagtgttcgggctcttactgcctagttagccacactggccatactcatgattttcgagagtactggttcttttcctccgggttccttgtaaaaatggtgctttctcttcaactgaacttccaattgccatgtattgttgacacttagcgttgacttttcttttcttagattttctttgttttgattgatttactgatgtctttcttgtaaatctttaactttctccaggacttccttcctaaacgttaaaactgccaaaatagccaagaaagaggctcaatacagagcctttactgaggaacagttaaaggttgaggatttggtttcaaaacattaatcctgttaacctctggggacaatgctaggctcttatagaggtgaaaaaatccactgcaacagatctagttgcgttatcattgaggcgaccaaagaggacaaacgcctaaagtctgattggctgatccaccatccaaattccctatctgaggaggaggaaatctctgagagatttgctgttgcatatctagacgtagggaatccgggagctagcactttgataaatactttcttagtttagaccaccatagatatcccatgaaagattatatagatagagtagacagaattcttaggagccctagtaatctgagagcgtcctcaaacagtgttagggtggatcctttcacgatcatgtcattgcctaatttcaaggaatatgatagcttccttgatcaaggagatataaatccttttgctcgtggggaaccttatagcagctcactgaatggttgtactcatgcacgagtatttttagtggatttttctattttatgattgtgcttttatttgctttgacttggcttttattttatagttgcttatattgcagttatgtgtgcagatactccagaatctaggatgttgaagtcgttgagtaacaagattgccgccaccttggccaaagccagagacactcaagagaaggggaagggtaagatcatgtcccaggcctctaagaaccatacacaacgtcctcccttaacttctcgtcgttaaatgttcggaagatcactcctcccactaaggcgagctctgcagctccaagttcctcggcctctttcgtggagaaaactcccaccactatcaggaagacgtccgaggtaccagttgctctaggggagaaagtcttaggggaaactccctaggcagagggagtgatttttggccttctggcaggcacaggtggttcagacgacagtatgggtagggttgtcattcctaggaaggatgcccacgtggagcttaagcgcaaagggtcaaccgctttcccaagccaaggtgcaagaaagaaaaatttgtaaactttgactccaattccttcctatccatcatttgcaaaaccatcaccattgtagcaataacaaaaaaaaaaaacaatagcaattataataacaacaacaacaacaacaacaaactctaacacaataacaacagcaacaaactccaccataacaattgtagcaaatagttccataccagcttactctacttcaaacacaaccgttactctatccaaatccaataggacaacaacctctcaagcccacatccgccagccaacctcatagaccaagcacgactctgggcaagattccgccattggaattttccttgcccatgagaccaaccgtcattagccacgaatttcttaataagatagacaaattttctctcaccctaaagagactaggaatgtcaatggggcgggtcagatctgactcgactctgatccgacctgatccagatcatgtacggatctgccccgtcctgcctgactggatcaaatactcggatcggatctaatctgacccgccttatagggatcgaatttgatccgacccaatttttttttttaaaaaattattttatgtctaaatttataatttttttccaaaatttatttgtttaagaactaataatgcatcattttttttcttatatatttttattttatttgtcaaaatcaataaaaaaaatatatcaaattcttatcacataaaaatgtaattaatatttcaaagcaatgtcatctgcaattaataagaactcgatgaataataaacaaaattctaattagccaataaaaatatctcaaaattaaacaaatttttggaaaaaaaacactaattatatacatttttccaaatagaactaattaaaataattcataattaatgtgatgaattaccttaaagaaagaataaaaaaaaaactgaacct

SEQ ID NO: 221471 - DNA, 2400 bp, Cannabis indica
ctctctctctctcacacacacagttttatgttcaagacgaacagaacactatcagccttcacccttttgactaccccatcctcagttccttttaaaaattaaatgaaaaataatttaaaatctaataaaataattaaaatgtgtattcatattagttatgttgacacgtgttattcacgtattcggtaatagacgtgtggattccaaaacagtatccaaagtccaacagtgggcccaaagaagataacttgggccaatcctaagtctagcaagaccttccaggaaggtatcttccctcctcgttcaggtgagctcccgctaaggaccgggtgtacccggaagttttctcagtattgcgcttttagaaggctagaaagcgtgttcctggaagccaagcatagtttccctttttatcaaatcgcacaaaacaaggaatttttcttaaatctcagccaaaagatcatatcaagttaaaagggaaaactactcaaaatgaagatcaagtaattaattcacaattaattacccacaattataggacacgataataacaacttgatcgtgttcaatctgcctagtcagcacacctatcatctcatgggatgggcctcatgaataaagacctaactcatgtattcttcatgtaaactccccattaaagggaaagatagaaactaagtataattcctataaacacaataaaatacctaacaaatccttcgaattaggggttgaattctcttgtaatttttgctcagacaaagacaaagacaaagaacatatactcattgtattcccaaaggcttttctagctaaaatacataataatatcgactcgtggactaaggctctttaacaccacaaccacgtaaaaaactctaagtgttgttctgtttctctctttgaaatatttatttcttcagttttaatttcttatcattggttttctaaaaatctcgctaaatattttgatgcttttattgagagttgaaggaagcagtggtactatctgaagattacattcagtaataatggtcctcacctgaaataaatttggtcttcattatactgatcctaatgctaaggtaagggatacaaaagatttgaatgaggtgaccagtcgccacaaggaccaacgtggtaaagaccagaatcttgacgatcctataattgaagatgaggaatcaagggagaatagttctgatgatcttgaagatgatcatcaggatatctgaaagatgatcaccatgacatgcctactgatagtggtgctaaaaagaaggacaatccagacgagtcagaccctctggtcattatggccaagaagttagaattaactgaaagcaaattaacttggcaagaagaattctctttgttatttcttgaaaaagtatcaagaatggaggttgcattgataacactaacttcttgaaacagggccaaacaaacaattccaaagaataataccaccgaaaaagttgatcttaaaaatcttagaacctatgatccatatgaggataaagggaaagggaaagtgggtgaaacctcgaagaagccttctcaggctgaacaacataagaaatctaaatctgccagccaacttcaatagaaaaagaaaggaaaccatgcttcagggcagggtgaccaaactaattctagaggcagagctgcatagaaagataagtctgatgccggagttaagaagcctactactgggaaggataagaatctctataatgattctagtagtcaaagtgataatgtcgatgaggtgcatctagtttcagacaacaacagtggaagtctctccacaaatgatctttaaagaaggttaattgaaaagaaagaaaatgctaaaatagaaaaaagccagacctcatgggaatgatttgatgaatcatatcaatgatcgagtctgtagaagggaatcttcaaatgataaaactcattgcttagaatgtaaagttgcggagttaacgacgctcatagagaagatctcccaaaagcagaatggaattgtgtccgattcagaagaagaagatacaaaaccatgtgtgcagagaattatagatgcaccgctgccatgagcgcttcagaatacctcaaatggaattgtatgaaggaacgacagaccctagggaccacttatccaaatacaatcgtgtgatgaaagttgctaaggctagtgatgatgcaaagtgtctttgcttttcattaactctgacaaaattcgtgaaagactggtggaagaggttatccccaggttcaatccacaattggaaggacctacaagtagtgttaaaaaagtaatcgtagcagcaactagggctgatcatgggttgggttggcccgggttgagagtattttagtgggccaacccaatcacatcggcctaaaaaa

SEQ ID NO: 221472 - DNA, 2875 bp, Cannabis indica
ataatacttagagatgttaaatatacattaatattaaattctatatattatttttttaattaaaaatcatatattttaattaaataattattataaaattggtatgattgaattttaaaaataagatattataaaaaatgactaatatgcatcgagtagaatcaaatactagtagtaattaaaattaaaatgtgaaagatataaataaatgtagagaaacctcagccagtattcatcatccacttgtagccatacgagggtccaccacataaaaccagcttgtgaataatcattcacgagatgatatcctaatcctatcaacaaactcacatgtgattgaatgagccactctcctttttaaatgcggggccaaaggaccacttaatccgaaatttaaacaaagaaaaagaaatagataaccaagtgaaaactactaatcataaaaagatgaaataataatagagcagttgggttagatgatggcaaatattactttaatatttttataaacaaagcttagcttgcttcttcttaaggactaagaaattagttattttttaaaatttccaaatagtaagtccatatatatgtatatatattatattagtttatataataataaatttaattcctctccaaaactaatcccgttctagtattagaatttaaagtaatatataaattactttaatactactataaattattattagacaatgaactagaattacatcctattatgaaatattataatttagagaatgaaaataaagaagagatgagaatttatttaatattttattttaatgaatgatctcttatttatacatataagagttaaatgtttagaaatttaaaaaaaaaccactaagaaaaaagaatattaattataattaatggtaataaataaaagatttgaacatccatataattattaatatttataactctcccttgaatgtccataataactgcctcactaaaaaacttgccgagaaaacccagtgggacaaaactcggtcgaaaaaaaaaagagtgcagtaagaaattactttccctcattttggcattcatggagctcttttaatcgacacatttcaatcttgtgaaaaatcttctcaaaaattaatgttggtaatgactttgtgaataagtctataagattatgacttgatcgaatttattgaacattgatatcaccattctcttaaagattatgtgtaaagaagattttttgtaaaatgtgtttagttttatctccttttatgtaccctcctttaatttaagcgatgcaagcatcattatcttcatagagaattattagttcgtctttattagatgttaatccacatgttcctcgaatatgttatgtcagtgatcttaagcaaacatattctcgacttgcctcatgaattgaaagtatctcaccataatttgagtaaatagccactagagtttgctttgttgactagcatgatatagcagtgtcaccgaaagtgaacaaatatccagtttgagatctggctttatgtggatcagatacgtatcctacatctggatagccaataaattatgactcacaattattagaataatcctttatcaatagtacactaaagatagcgaagtatgtgcttaatcctttttcaatgtttatatggtggagcataactaaattttgctaacaaattgacagagaaagctatatcaggtcgtgtacagttaacaagatacatcaatactcctattgctctaagatatagtacttttggactaaggagcccttcacgttcttctctaggtggaaaaggatctttttccacattacttgatctaacttccattgggctactcaatggatgtgatttatccatacaaaactgtctcaaaatcttttcaatataagttgactgatgaatgaaaattccacattttaaatgctcaatttgtaaaccaagacaaaattttgtttttcctaaatctttcattttgaactctttctttagatattccacagcttttgaaaaaatttcaggagttccagtaatattcaaataatcaacataaacaacaataataacaaacttataacttaactttttataaaaacacatgggaaaataggatcatttttatattcttcctttaataaatattccctaagtcaattgtactacatgcgtcttgattgttttaatctataaaatgatctttgtaatttaattgagcacatttctcgattgcgtgaattatatgcatcaggcatcttaaatccatcagggatcttcatgtaaatatcactgtctagcgatccatgtaaataagctgtgattacatccattaatcgcatatcgagtttttcacttaaagccagactaacaaaatatcttaattttattacatccaccacatgataatatgtatcttcataatcaatacatggtctttgagaaaaaccttgtgctacaagtcttgctttgtatctcacaacttcatttttctcatttcttttacgtacacatacccatttatatccaacgggtttcacacctttaggtgtttgggctataggtccaaatacttgcgtttagcaagtgaatataattttgcttgaattgcttctttctattttgccaatcttttctattttgacatgttttgatagattcaggttcaagatcctcgttttcatttacaatttctagtgctacattaaaaggaaaaatattgtcgataattatttcgagtcaatcccattcttttcttgtattgacatgatttattgagatctcatcatttctaatattttttggtacctgaatctcttcaagagatttatttatgtcaacatcttcctcgaaatttttagcctctt

SEQ ID NO: 221473 - DNA, 1270 bp, Cannabis indica
acttttaatatatataaagatatgtggccaaatttatggaaaatccaaaaattgggttgctgaaataatatcttgattaattgggaatagcccaacacagcaaagcattcattctgttttttattttattttttaaaagaagaaaaaattatgagagaaaaaaaaatataaattaatacaaagattattacaaattttaattttgttccaaaatggtgatgatcaacgcaatcttttttttttattattattttttaaaatttagatctgtcagtcattataaataattttcactggcattcttgatgaataaccaattcacatgtatacttttatgtgtttggtcaatcaccacaaatgtgatatatttattgctttaacttttcttcacaaaataaggtcaccctaaaaattataataattttacatttttatttaatttttgtttattttgttttataatacaatggtgtatctcttattagtttcttctattgtattttttctaaaacatttttccaataattataattttactgtaattttgtaattcaaaattgtaaaatttttatgtgttagtcatataattttataatataaagaataaatttcgtatagttaaaaaaaattcttaatacttaaaaaaaattcttaataattaaaaataaaaaaaaaaacttttactcaagctatgacatttgtggagtaattttgtccctcttgaattacattttttcttatttttgcaactttagctgcgacttatgtagagagaagaggtcattgagacatatttaaatagatactatatttacatatggatttgtaaaaaaaattctctcaaactatataaataattgcaaattactctatcagttacatttcattcattttaaaaataatttcttaatgtaagactaattcaggactaatctactgtaattcaaaaatccatacaaaaaagaattacataaatagtacttatttaacaataaaatttagattgcgtatccgtattttaagagttagtatttgaatgttagggtcattatagttttagctattttaaattagttaaatatgttgaattttcttgaacaaactaagaaacattttgctaaaaaagataaagttgaaataacaacactttttgattttttaatgaccatagagtataagggttaagaaaaatataagggaatacattatgaaaatgtatcatattgtgtcaagactaaagacactttagattgagttttttgatgatgta

SEQ ID NO: 221474 - DNA, 4142 bp, Cannabis indica
actcaagaacatatgttatcaaacatctttcttgaataagactcattagaacaagagtacctacatacatgtgcaccctctacgacaccatgtaaactcagtaaattgtcattaatgattacaataacaataacaaagcagaaagcatcaaagactatatcagaatataaataaaataaagcacgacatagaaaaagcttgtgaacactgcatcgacaacaaccacaaaaaataataagcatattaataagacccaagaaactaaaattaggatgagaataatgtggaattaacattattattaaacatttaaccttgatttaataattttctctatctattgtgataatcactaatcacaacagtatcaatcaatctttttggaccacatatacacacattttaagggatttaattatatgttgtgagaaaattgataaacatagcaaattagtaagaaacaaaagaagattgaaactttacctgtatcagttttgctgccatcgaggagaggagggaggaggatggtccatcaaagaacgattgggtgcggcgggttaaaatcgtagacttagggtttgaaggtaagagatgggagaagatgtcaacaatggagaggaagagagaggggaggagagcggtcgatgatggaggatcgacaatgaagaggaaagaggggagtggagcgatcaacaatggaggatcgacaatgggttgaagatgcccagttgttagagctttttcgtcttcgcaaaggttgaagatgaatgtgaacagtgagattgattaggaggtttagggatttggaagttttttcgtaagttcattaaccttaggccttttatttctcgttagttttaaaagctcacacatcttttactcgatattttcgaaccaacgagaataaggtctgcacatttaattcttcgtcagttttctttgtagtatcgttttattaaatgacgctaatccacattttttaaagtcattttgaaactgtcagttttattttttagacactattcacgtcagtcaactttgtgaacagtagcgttgaccgacacaaaaactagtttttgtagtagtggttgttgtgccatctttgggggtttgccttgtggtatagcctttgagctgtcttaacagctctggtaggccatcatcttcttatattgagttgtatattcacctagaacataacctacgactatctaagagtcgtggtgcgtgtctaggtggttagctcgtgcttcgtgtgctagcttggggccaacatttggagcttcatgttcagcctcgttagtagaagctttgaaattgaccttgttgtcgcgtgcatcagctgcccccaggtgccttcggggccaggcctgcatcaggcaagtggtcaatgcacctctcagattcttggtctcgcttctctctggctcttgcttttctcctaagctctgagagatttagagagatatgtttctatgattagccatgagggtggtgagagcttggcctttggtggccatgaaaggccaagcttttttgtgagatgcttttatgttggccgagtctcaatggttaacttgagtaattggcttgatgctccaagtttttgtagaatctaccgcaactgctaatcggtgtacacctttataaggtgtatctggaagtatggccttagctttttggaacccaagagtaagctgtgggtcagcttctctaggagtgggaaccgcttagtgtcgatcaatctcttgctggtgtagtatacaatgttgtacactgtcttcttctgttgtgaggacaacactcacaacatgtttgtgattgcttggtccacatctagctcttctttatctagggatatgggcaacaaaagtggccgagccaatctgtttcttcagctcttggaatgtgatttcacattttttgtccactcaaatttgtcgtttcttttgcttcatgttgtagaagggtaccatttgtctatatacttagacacaagtatgcttagtgtagcagtgcatcttgtttggctttttacttccttgattgttgtgggagacttcatgttcaaaagggtttggatcttgtgtgggtttgaaattcttcatgttgtagctgcaaaggattttgaaattttctgtctaggtcctccatatgccccagcccttttggacttgacaagcacgtcgttcacgcacaccttcatgttgcggctgataggatcattgaacattttattcataagcttctgatgtgtggcccctgcattcagccctaaagggcatgactttgtagtaacacatgcctaattctatcaccaagcttatatgctcctgatctggtgggggcatcttcttcttcttggcttcggacaaagccaagttgtaatggtgacaggtagattgccaatctcctctcgacatcctacctcatgccttgttgggaatttctggcaaaggtggtagatggatgttatcgccttcaagttttataggtctggtcagcctatcatggagttgaaagccgagggaacattgattacgatgaactgtgccattacagttctagtggttggattttctccaacattaaggggtaatatgaactgtgccatcacttgattgtagggcgccaagtcaatgagttggagcctcatcttttcatgtgtgtattttgaaaaaaatgttgagggaggctccattatctaccatgtatcttactacaattatattcccaatttgtgtggtaatgaccaaggggtcgttgtgcgagaaactatcttggataggatctccttttgacaaagacatcgtgcgctcgccaagctctttttcgtagagcctctttcttcgcctactaggaagtcacttttgggctcatgacggagtgtctgagcataggctttctggctttgttggtctcgactgaaatatggggttgtgagtaaggatgacccctgagtttcttgccattggaagtttgggcagagttggtggtacctacttgtacacctggcccaagatagaggccaacattcaaagattaaggccagccctgagagatggaggccagccttcggaggcggaagccagactttggagatggacggtagttcagatggaggccagccttcggagccagaggttagcctttgaagatggaagccaacctttgaagatggaggccaaccttcggactgcctgttgctgactttccctgctaaaatgtctagacatgccgtatttttggagctttgatagaagagtgaaacgtgaaaactcctcctccttcttccttagacttcatggcataaaagaatcattgaatttccctcttttgtcattatgttgctcagagccatcattcttgcgcttgcctccactattctccttgtttgagaatcgatagagatcatctgcactgtttggcatgttggacaatgcttggggcactatgaggccctaggtttattcatcgttgttctaccctcttgtttgggctttcttgatagcttcttctaactttatgaagccatcgaattgctcaaggaactcctccatattgttcgttgagatcctcttgatatcttttttgaatcactcaacggaaggatgcctccgagtatggccgtatgtcagccttcttctgctaggcctgtgaccttggtggccttagccataagccattgaatgtattccttcaagggttcaccttgtctttgccttattttgacaagaccctctactcgggcacgtatttgtcttgaagtagagaactggacatagaactcctaagaaagctcttcccaagaatttaatcttcctgtgggaagcttgaaataccattgttaggctagtttagctagatttgccaaaaagattaggcatcgcacatctccagatacttgtaggagatatttttggatctcaaagtacttcacctgtactagagggtcttcttttcccgtgtacatcttccaagttggcatcttgaatttgggcaagggagaggcattgatgtatgctgaaaatggtgatcccctcgccttgtctagctcgagttctgaaggttttggactagctaggcccttgagcatggctcgtatttgatcttactatgttgcacagaaggatcaatggatg

SEQ ID NO: 221475 - DNA, 2046 bp, Cannabis indica
tgaaaatggactagttaacatatcactacatatacatctaaaaatagaaagtgtaatataattaagaagaagggtttttttagttaatttgaattaattaattaagggcacttggggcctcctctcttggtcttccaattattgtaacaagggcatacttgcttgtttccataagtcccaggaggcacacacagacatgttgcgcaacactttttgcagaagaacatgcatggcttccggtactgcgtgttcgaacaccgcgccgtacaccgaggtggacactctgcaaaaatttaacacaattatttcgttttcattaaaatatacatcaaaatattacatacagtcacatgatcacaacacattaggatcgagttatcctattagagtttaacactgactagaagagtgtgtttcaatacttgtatcattactttcattaagagtatcgagacacactctttgagttagtgccaaactccaataggatatataacttctaattttcgttcatttcattccttatccatttgtgaaatgactttacatatttatgctaaactaaacactactaataatttactattaagcccctatactcaggaccgaccgccatttaaattttgggacattcactttcagaaatatatatatatacaaatattataaaaaaagaatcatgagactaaaatacaacccaattaactaaattatgaatatttgttgtttacaatatacttaattttacttaaatataagtataataagacttttttatttttattttgagccccttggcatttgcttagcgcacctatacttaaggccagccctacttacctatacccttccatgtaacaaagggtaattttgttatacataaacattataatagcaataatgttcactcaaaaaaaaaaaataacattataatagcaataattctattacgattactcttatatgagttatatgtgtaaattaacaattacataccttcaggtttaaggcttccttctgtgattccatgctgaatttttcaagtaaaagaaactttagtgtcacaaaacaatgacattactaaaataagagtaatgttatatataccaattagtcacatattaaaatggtataaaactcaactcttaccatgtaaggttttccagttgtagtgttcaattgaggctgtggtgatggagcctcagaaattttagtagcctgcaaagaaaaatcaacaataatttttattcatggagtactcaaaaacaagtgagagaataatattgtgtattttattgaggttgtgttagctatagagcttacatgagtattataatttgcaaccaaaagaagtagaagaaaagagattagttctcttgccataattttcttgtacttaggactaaaaacttgaatagataagaggaaaaaaaaaagagagcaataaaaaaaagtgctttttggatgggtatctatgttatgagatgaggtctctatttataacattcacaaagttattattatgtgtgactcaagattttaatgtaatctactttgtcctaactatgcatggaaatggtatattttatcacctttatgagactcttatgctttttaactcaatagtagtactctctactatttgtccttatatgtatacacaaaataaattatatgaagacaaaattagcaatgttaagtaagaagaggggatgtagctatatattgattatgtctttaaattacaagtatcctctttgttctactacttaaagtttgacaaattagttatttacaaattacattttttgtttgtctctctataggatcggatctatgttaaaacaaattaagtctgtaccaagagcccacccaacccagaggctcaaagaaaaatttatttccttgaaaaaaaagatatattattttaataaagggctcagtaaattttcttttttctaaggtcgatccaatctcaaaaccgaccctattgctacttgaaattcgacaaattagctattgccttcaaattacatgtctcttctc

SEQ ID NO: 221476 - DNA, 3091 bp, Cannabis indica
atgaacaagatagccttgggctgatactgtagactcgttatcgcacacttctagggtcactggttccgctaattcctaaaccatcctctctatctcatttgtagacaacaagacctcgtgagctcttgctatagggacctcatccttagacatcgaggttggaatgaagctatcgctccttttcgatttatccgcgaaggctccttctccagagtcgtacctctggctatccgacaggtcactcatctgaaagatagaagatcttttcagtgtggtgcgagtgcaattttaacaaagttaagtgcccccactcgcgttataaatattaaagaaaaacgttcatagaactagttgtgtatctctagaaatggctaggtgtttctcaatgtcctaagggtcgtgttgctacatgaacattaagtcacaggaaaacacccaccacttcaagaatccaatcagttccaacaatgaataaaatgcgagaaaaatgaaaactaactgcatgtctcaaaaaatggatgggcgttgtcacagtatcccaaggggcatgcgatgattgcacgaacattaagttaatgtgacacccccaccatttcgagaactcagatagttttcatattaaaagtatgtataatctaaaagctaaaaaaaagcctaagagttaaaactctagaaaaaaagggtcaaaaaggttaactatgggttagataaagttattttgagcatacaaatattcaaggtgttcttccaggaattagcgagtattcaagatgttcttctaaaaactcgtgaatattcgagaagatcttcctgaaactcgcaagtattcaagtttcaggcaaatattttccaaaaaaaaataccacattttgcctaaactgtagaatttgggttctatcatttcatatatttcctacccctaaaaacaaaaatgcataaaaatacccaaagaaaagacaatgatgataggaaaagtaaattactaacctcaaagtgctaatttccctaggtagtcttgcaaatagtggaatctcaggaagcaactttcgtaggaaagaatttaaaagggtgcagaaggatttttgaaagatttgaatttctaaagaaaaatgatgaagataggagggaaatgaatgggaaccattttcatatcaagaggtttaaatactggtatccctcatttattgggatgagagacacgtggcaaaggaatgcctaaggtctctcaatccaatggttatcagtgaactcgcttacacatacccccaaagggttttgatgacatggcacctcaaagaaatacaataattattacagccgtcttttcaaaaccctcaacaagacaaccaagagtcaccatctcgtgacaaccactcgcctgcctctctctgataatttccctcatgacatggttgttaatcgcgaaactaggggcatgtgttatagtgtgaattttttacctagaaacttgagaccaggctcttgtgagaatgagacgtggactcacatcccttgaggattgctgagctatcagaaaatgacctctcgagattaaacctcgcctgatccaaacttagcgagatgatgtgaccttgatagagtctagtcgcattattaaatctcgcatgatgtaggaccaagaaagaaatgttcaagtctcgcatataccaagatatatgcgaggtctataaagacttatcctgcgacttagtaaggatcgtttctttacgtagcaagttagtccaaaagacttaatatgctcgatgattcgataagaactcgcatgtcttagatcatcgacgctgacaaggtatccatatatgcgattagaatgcagatacctaagaacaagaatcgttagtctcgtttcgcaccctaagcctacgagcttgtgcgagcagatgaatagacaactggcattatgaaagtctcatatgttgatgtatttagtaaaacaaatttaaactgttcttcatttattttatttatgtttttcttaatttaatgctaatattcaatgtaaaacggtttgataatcaataaagttctgagtaatcaaaggacacttgttttttatataaaggagtgatccaacatgcataagacaggacagaaaattcttgcaacagtagactaagcagaccaaggtctgactaaaccactatatctcttcgtgttcattatttttactagctttctatttatctgtgtagcttcatttgaatactcgacattctaagttgagtactcgcttcttttatgtaaaataattataattttacattatctaatgttgtctaaattcttccaacaacacttaggttggccctcctaaacatatacaaaattaagtagtatgaaaagatataaaaatgacaaactattcaaattcttttactttgttatgataatttattttggaactaaatgaatattattttaatcaattagttaatgatattatttatgatagataataagtaattaactatttctattaatattaaattagacaaataataatatgaaattatcacataatagaaaatattgatgtactgtagatgacatataatctctttaatgtttttttttatatattgatatattaattatgacccgtaaattttttaggccgttaaaaatttatttatactattgagattgtgagatttaaaaatttatgttcaattccgttcaatgttagaaaaatattaattattcatgtactatatattatgttcctgatatttgatatctactaaaattgtatctcaaactttgatatgtattaaattgttttcatgaatttttatacacatcaaaaatttattaataaaattaaacagaatctttaaatctaggggtgtgcataagtcgatcaaatttaatgagaaccgaccgattcaattacagttgaccgcgaaacattaaatatccaattgtgatcggattgaattggatgttatttttaaatatccaattagatcggatcgaataatggatagggtgtccaaaaatctaatatatctaacatccaatcgaactaataagtattttttttttaatttagataagtaattagatttta

SEQ ID NO: 221477 - DNA, 2435 bp, Cannabis indica
aaacttttccaagttttttcgaatcttctctaagtatttttccatcccttagcctggtattcccctagtatttaatttacattcattcacgtatggcatataagatttttaactttcaacacttcagttatctttaaactagcgatcaaggcttataaagagcattttttctcactaaattataccaaataactttattttttttagatctttgtatgtaaataagtggcaattaatcaaaactaaaaaacacaataacaaatcatgagagcggtaaatattttttaggtacatatataattgccttccaacacaccatttagaaaacagaatcgatcataattatgttgataatttttatcctacattacatataaaaaagaggtatatatagtaagattcaaacagagaaataattttttattaaataattaacataatgatttttttttttattgagttatcaaattatatatcccatctttgaattcaaagtcataatcattaaacattgcaagtggagaaagcctccaaaaccaccatctccatacccacttgcttaacccacccaccccgtaaaaccttctctttcatcaaaagttcaaactaacatgataaactagagtaacctaatatcattttggacacttatttagctcatttaattctaatttaaaattagctagtatatttttatatataatatatttatatttgtatgtatatacatattgcatagtcgtagttacataaccacgtgaatgctgacataaacatacatatattatgtatgtatatatacatacttggtttatactaaaacaataatatgtttcaattttaggttcaaatattgtagcaaatctttgtcaatattgtaacttgtattattaatttttttcttgaacaattgttttattaaaatttagaccaaccatacatatatatcaatatgcttattagtataatattaagcttcattttgctaattgacgctctgtttaataatgtgaaaagatatcacaatcttggactcaaccttcaatgattctttatatatagacgtacaaattaatgcattggactagactatttgaagatataatattttaagcaccggaaacacatgaattatacatctacgtattttcaataatgactttagaccaaaaaaaaatatattgtttaattgttttagttcctctagaaaaattatgatggcatgcggcattgactcatcaacttgaagtatataatattgttgctttggatccttaaataatctttttcattattatatgtatatattaattaatgagaaggggtatgttttataattttcaaatctttttattttattttatttgttactatttctattgagggtgctgtgatttttatggatggtattagtggatttttacttattacatttgtggacaatcatttgggtttgatggaaccgtgttttctgactaattcattaaatgacttacgatgccatccacttcagattaaacaatttgtttaaggaaaggaaaaaaaaaagagccaaataatataaataaatatcgtaatggacatcaatctctgtcatcagttaatatataattaattacatcagtttaagttagctaatcattattgctaattaaaatgatataattatatggagagaacaccatatacgccataataattacagttaattatgagattaaaggcgaaggccgatctacctagctaccactgtttaggtcctctcataagatccagcaactggttttagtttcactttagttatcttttaagctaagaagaattaaatgatttgattaaataaagagaataatgatcaaacatggatatatatatatatatatatttatatatatgcatacaaaaatatgtctatacattcactaccacaaaagccactcgacagtcctaaaaattcgttttttaaaggaccgtcgctaaaaaaattaaatgagtgtttaaaatcgtcagaaaaaattagatatacccgacagtcttaaacactcgtgatgtattcctgacagtttttaaatgtgccttaaaaattgcaaaattttttttaaaagaaaattgctgactataggccacggttttaaatcgtcgagaattagtttaaatttaaaaattttcaaataacccgttttttctcgctccaatataacgcattttagatctaaattttttcaagtctataaattttcaaaacggcggtctatcactctttctcatcgacggtggtccatgagctccatcactctctcatctcaaatctctcgctctctctttctcgctttctctttgacgagctccaccaaagactaaagcacgttcaagctccaccatggtcggccacgaccacgagctccaccacgagaaccaccgttctctctctctct

SEQ ID NO: 221478 - DNA, 3693 bp, Cannabis indica
tccagtagtcaatgtccagggaaccgaagtaaggctacgagaatttttacaaaggggatttctcataaatatggctttaagtttctaaaaattttttgggaaaaagattgaaatataaaatatttagtagctaactggaaagttgaattttaaaacaaactcataataaaacctaaaaaaaaaaaaaagaaatttacggacaggctcctttattcctttatgttttcatttgtatacacttaattcatttattattattattttgtaacataagtttatgttttacccatattttgaaaaagaatatgatcataacacgtgtacgaaagctaaaaattaaaccagctcaggttatacaagaataaatacgttcaaaaatataaagggtagacattcaagcttctccttaaaaactttaatggtgagtcatgaataataactactatctcgtaagaccagcgaggtgaacgattaatgtaaaaaggccattacaggatacacaaagtaaaataataaaactacagtaagttagaaagggtagataataaattttttaagagtttaccacttattgtatcacatactcgtaagtatgttaaaagactaaaagatgtacacaaaaagtgattttcctcggaataagcacaaacgacacaaggtgatcacatttcatgtaaaagaatgcgaggagcacactttagaaataacacctcagcacaaaaaccatcttcaagataaacttcaatgggtgaacactgataccgcgaggcacagaagcttagtcagcaactgttttttaaataatgacaaaagcggttgtgacagttatctatttatcccatgtgttataaatatgaaatgtaagaattgtccacattttaagagcagttgcaaggataggatttcaagagaataattgtctatcccagaaatctataaataagggaagattttccacaattagggatggccaaattgagaattatagagaaagacacattgcattttgtactctgtaagaaactcatcaaatctcgataataagatgactcgtggactatgaagaattaacttcaaaactacgtaaaaatcttctttttgatatatattattactattattatttattatgtttatttattaaattaggcttgtttattgattaacaaaaatcagcgttaacagtttagtaattttattgagagccttgtaaaaaaaaaataaactcgaaaaaacacacctacctcaaataatattcaaacttttcctattctccaaccatgtatgaggatgcccatcaaaatgatgacaattagttgagggaaataactcagtgtcctgggaaagaaccctagggttcccaagggacaaaagcaactgagaacgcacactctagaagaagaaatactaaaggggtttttgagaaaaatagtgatgaaatccctgaaagacgtagtcaggatgcatacaatcccaaaagatacgtactattggtgaaattagaaaacagataacttcgacagagattgggagaatcgaatcggagaaattttgagttggaaggtgaggttgcgactgcaagagcgacatgtagtgatgcacaccctaaccaaccaaaagttcggaattatgctctgcaaatcctgtaaagatatttttatttttttaaaaaaaaagttgaacattttgatacatacttgaatgttaaattattaatattttatattgaataatttatatatatataaaaaaaatttcttatacaaacatgaggttgtgaattgtattgtacggagaattaagatcacttagccatgaacaaatcaatcatcaacaaattaaagttatggaatctttaattaatggttactagtatggtttcctaatgtccgttacttggtgcaagcaatctcaattcatattattgatttagtatgacatctaagtgaaggtgttgtatataatagagattatatataacatgtactgatatttaattaacttgtctttatcaaacatggcgtttaccataaagacctcattcatatcataaggatgatcaatagtagatcaacctaaatcttgagtaatcatgaactcttgttcatgtattagtttcttttgattcaatcgttaaacttttttagaaaaaatgattcttacaacttctattttgggaatataataaggtgaatggctaggaacttgatttataattatgaaatcttgattttcttaacagattgaatgttggttccctttaaatgttcattctggaactaaaaagttgttcacaaatttagattggatctaaattatactttaactagtgaattaacggtactaaatgataaagaagtatttagaagggtaaaatagtaatttgaccaaaattaattacgaaccgacacaaaaagggctaatcactagaattcattatattaatagacattgtaataaactcggcaaatataattctataattactaagagttcaattctatatttgtgatggagtaatcatggaattaataaaataagattatttggttgatgagattcaataaagaatctaatttattgaagcttactattataggtccatggtctccggatcgccaccttgcaacactgtcaagaagatggataaaactatacaatgatgtttggaaaaatctattttgaagtgtcaaaatagtaattattaatcttgtaataactaatttgttttaaatttattatttaaataaattggagaaaaaaagtgttgtctaggataatatatcactatttactggttaagacaatggtggcaccacatttactgtgttaagagtcaataataggtgcctataagatatggtgggcactatatttatttttggattaattaattaattcaaaagataaatatttatttaaatttgaattaaaaaagtagttacagatatttatatttgttgagatattctctcaaaattgttgagagattatctcaagtgttaagagattcccttaatcggttattagttatttaatttaaactaaatatttaaaataaatatttataataaaatcgattaaatatatttgtttaaatattattattttagtatttgaaatttatttaattaaaaatttattattattttattaatttgaattaatataatgttataatcctgaatctgtatatacgtataatttaaaaaacttaaaaaaggttaatcatattattattcactctagaaaaagaaaagttcttgctcatgtgttgagataaattcaagaacataaatataattttatcctattagcccacactcatcctgtgtgtgatggaagatctaaaaaatcaaggtgtgagtttaacgttacaaggatacaatttgtgaaaagatttaaggatacactgattcacatcaaaaagtaaatatttcctttcatgtttttatttaagatttagtatatgcacatatggaaatttttgggatgttgtacgatgatcattaaaaaatattttttcgatgcgtacttgatttagtaccacaaatactaacaattggagggcataatcgcatgatggtaataaaggaagaagagcgaggtgacaggaaaataaaatcaaggaggaagctttgagaagaaggaaagttaattaatttgatttatttatttaggtgacgtttggta

SEQ ID NO: 221479 - DNA, 2017 bp, Cannabis indica
atacggtggcagtggattttatgattgttggaaatgtgttggaaggtgagttgaatgcaattgagattgctctagaagtttctaactccaaaagtttcaagaaaattgtgattgaatctcattcgattgtggttgttaaagggttcaaagttaggtctttgcctcttgagtggggtacttttcctttatttatagattgtatgaattgttttaaaaactttgagtatgttgaggttgtgtttatttttcggtccttgaattttatggttgatcttcttggtcgttgggctagagtgaagaagatggttgctcttggctgtttaagggaagtgaccccctttgtggctactatttgaatttaatttgttttgttttgaataaagttagttacttatcaaataattaataataataataaaaaaataataactataaaacttcttttatattacaacattgtaaaggttagaaaaatgaatagttaacattatgctcaatggatttcaattcatactccgaattcgatttataatgataacacaatctttcaagtatttctttaattattagtgtacgttaatctttaaaggttttttattttattactattttatttttttaatttttttgttaaaaatgattgaccaattatattctagctaacttctcatcgtatgtttttattgtcaaatattaatgtggtgtggttgctattaattgtacaactgctagcttgttttgttagtttgttagttgagtatggtcattaatatatatatatatatatctctgtcttgacttttctaagctcatgacagtcaaagcatttaccaagcttgcatgttatgatgctagctttaagctatgtggcttaatatcagactagagttttgtggtctattgtattggttgattctctttgattattgatatttataaaattaatttaattacttctccagggtaaaaataccaaataaattggcatcatatatatatatatatgtggcttttaaaagtgagaaaagaaaacctacagaatttctaattcggatagttgcgcaatatcttgggacagctcacctgccaaccccatgctttgtattcttctgaaaaatcggagaatttcatcaaatcataaagaaaagtagaacaaaattaaagtgaaagagatttaacaattcatgtaattaattaataagttaaatccatatccagtaagatgtttatatataatatatacatggtagtcacacgtgatttgttgcagataatgccgtcccaattgcaacaaggatctgagccttcccaattatgaggtttgctgcttcttatccattcaaaagactgtaaactagttactgcatcacacatatataaattatatttatacatatgtatgtataaattgaatttaaaggctaaaacaggaacatatatatattgagacacaaattaataattagccatataacaaatatatattctaaaataaaactgggaaatatataccaaaagaattataataatattattcaaattatgtacggacaccaatgaaaaagtataattttcttaagaaaacaaaagtatatatatataatatattgtatatatacttactgtctggatgattgtttgagactgaaatgaccaaagttgggaagagcagaaatgcaaacacctcaactgctaatttatccattagctttgtcaaaaaaattcttcttctttagagcagcattatgtgtagtgattaatattccttattctgtttatgataataatctaattgaattatgtatatactatgtggaagaaaagtctttctaattagttaagtgctaaattatttccacaaacgatccaatcaagaccttgggtcatattcaatgtgtaaaaacgttgctatcgctattaataacacagaatttgcaagtggtgttactgttaatataatatagatgatttttatttattttttattttcttaacaaataatgaaaataatgtgttt

SEQ ID NO: 221480 - DNA, 3149 bp, Cannabis indica
aaatattatatatatatatggatgttaaattactcaaattaattatagcataaatattattgtatttttattttattttattaattgaatttttaattttttatattttttttagtggaaatacttattattataaataaaaaagatagtcatttacaataaaagagtatattggcggagggatagtctccaaccaaaaacaaatctcatccacccctaacgcaaacttggccaagccattagtagccatgttaactgtacgcttgacataagaaacaattacattaggaaaaaaggacaacaagcatctaatgtcaactatcagatcatgaaaagtagaaattgaattaaagggagcttttaaagaattaccaaccataagtgcacccgtttcgatgactgaaatcggtagatcttgttgtaatgcccaatttagattatggaaaagtgctttggcctccatttcatgagaagagaaattcccaattgcaggcattgaaagagcagccgtaacacatccatttgaatcacaaactaaagcaccgacaccaattatattgcttttttcatccacagtagcgtccacgtttaacttcaatgtacttgtaagaggcggcttccagggttctggggcaggaatgatcagtggaggtggttgcgatcttgtttgagaggcatcaacatgatacttgtgagtggctgattgataattttggatgtagatagatgcaaaagaggctaaattccttactagtgttgctctttgaccatgaacaaccttattctttcactccaaattgaccaaagtgtacaaaaaattcgttccatttcagatttaaagtaaattgagtggagatgtagcatatagtcacctcttctcattgaagaacaaacatgccagtcaaaggtcattttcgaatatgtctaaactttcttgacatatttatatgtgaaaagtgcataaccaattgtttcccaagtttggcgacaagctgagcatgtcaaatctgtaataatctttcttttaacaagagaagttgcaataggtaaagaatcattgataacttgccatgcaaagattttgactttcggaggaagttgtatagcctagaaaaaattccaccatgaagaggccgatgttgagcttgaagaattctcgatttcatcgagagatctagccaggtgataaccagattgtacagtgtaaatgcagtgtgttgatggttccatatgagcctgtcattggagctgaagaagctaagtggcatcgtcaatattctatccacatcaaggggagaaaaaaactgacgcagtaaagcaatgtcccattgacgttctggtggtgattaagtttgcaacaacaccatttggtggccccgtgtatcgaaaaggacgaaaagagctatgtcccaggatccacggatcaataccacttttaataaatcgaccttctcctatcttccaacgcattcccgatttaagaagctctttagtgtaatccttacaaagttaaggaaggggaatgaccgatatgagcctctaaagaagaaccctgtgggatgtatctgcttttcagcagctgtccaagcaaggagtcaggtttttcaatgaggcgccaagcttgttttgcaagtagagtttggttgaagtggacaagagcagaaacccatacaaccatcaccctttttttgaatggaaagttccctgtgtgccaatgaatttttgtaccattctcattcatgccccaccaaaaatttaccatcattgattctagttgtttgtagaaataaactgataaacgaaaacaactcatagcataagtagggatagattgaactaccgctttgagaagcacttcacgacctccaattgaaaaaatcttttcactccaagtatgcattagtttccaaatcttttccttgatgtggctgaatagtcccttcttatcttttcctgagtaagatggaaaacctagatatttttcatggcattcgctaatgggtatgttgagatgccgatgaaaaaatacttgggcagccaaagttgtgttaggggagaaaaacatcacagatttgtcagagttgagaacttgtccaaaagctcgatgataaagatcaagaactcacttaattacaaggtcataactttaattagcttggcaaaaaagcaggttatcatccgcaaaaagtacatgagaaatagggacagctcgcctagagagtttgaagccatatagattaccagttcgttgttcatactgaagtaaccgtgataaaccctcaaagtagattaagaacaagtacggagataaacggtatccttgtctcaatcttctagaaggggttagagcacctgtcactttgccattaatgagaaaagaaaagatgtttgttgttaagcacctcattatcagcgatattcattaattacagaatcccattttcctcataacctcttctataaacctccattctacgcgatcaaaagccttgctcatgtctaacttcaaagatgcaataccgtttctatttgaggtcttgtttatgatggcataaaccaattcaaaagccactaggatgttttccgttatcaatcggtttggtaagaaagcactttgcattttaaagatcacttcgggaagaacttgcttgaatcttgccactaggattttagtaacaatcttggaaattacattgcataggctaattggtctgaaatcttgcgttcgttgtgcttttttaacttttggaattagggtgatgattgttcggttcattcttgttgggtcagctccatcatgtagaacacttaatacaattttagacagaagatcccccacaatggactagttttgttaatagaacatagcagacattccgtcaacactagggctcttgtctgctaccgtagacttcaacgctgcttcaacctcagttagcataaaagtccttgaaagggtatcattatcttcatcagtgacaagagttgggatgcattggagtgtagtggaaagggctgcttcatcgatatctgtggccataaattttagcaaaatagttatgcacaacttcagcaatatcagcctttgaatgaactttttgccctctgttgtcataaaggagtttaattcagttggattttatgcccta

SEQ ID NO: 221481 - DNA, 2168 bp, Cannabis indica
ttaaatttaatttatttttaattttatttaaaatatttatgtaggtgtgccaataacatagtaccatgtgtacattgtatcaacgtggacaatactctatgtactcatggataaccaagttggccgttaataactaaaaatagatggaaagagcaaaacactataagaacttagatttatgagattttaccgttaaaaataaattttaaagattaattactaacaaaataagactttaagagttttgctgcaattaactctactataaatccaaacaataactaaagagatattcttataaagaaaaaaaaacccaagaaatatgatcgattgatgggtacatagtctcttacaaataatttgcatgaaaatacaaaataatcaagtgaagggtgtccttttaaaaaacaaaaattggtgattaggggtttatatcgatgattaaattataacatactttcactaacactatatggttacaaatttttaattgtagcttatctaattaaaaattaaaaaaaatatttaatttgcctaaatctttttaagaaatttgtgtcgtaaattttaaatatcagctttaatattcaaatataatataaaaattattaaatataaagtttaattttcaagttaaacactataaaattcaaactttaaatacaaaatagcttcactaataaacaaaatttatgtaatatacattatatacacttctttttaatatatataagtcaatttatctaaattaattcggtagtttagtaatttttaatattccacccaaagatattcattgaatggttagaaatttcattagattatttcaatgtgtattttttgtcaggttattcagtttggttaatgcagtttactcaggttggacaattagaataatttttagcacctccattggtgatgttatcttatccttaagaaaaatgattgggaaacactcaaattatacatactttatatatacataatgatgtgtaattaacctcaaacttaaaattaaaaagtgatatgtcctacctaaatatataaatggcttgttaactcgaaaatttttcctagtaacgtgaacatcaatgtttgagacgtgccatgaaggattgacgccacaaagttgagtagactcgagtcatagaagttaacttgggaagggaccctagccctatgcctaggttgacatcgggatcttcgggatgaaagtttagacttcaataacatggatctaactcactatctttcagtattctaaaccatgaagacattgagcaacctaatccaaggcccgagagctgaaattatacgaatttgcaaccagaagccaacttgggcacctaggtttcacctggcgcccaagttgacatatccaaccagggtttcaattttttaggaccatcttagtgcaaaaggattaaaacttgcattgaaatatcaattagacataccaccgacatattaaggcatccaaattaaaatcgagcaagttcgtttttgagcgcctagggccccgagcacccaacgcctaagttgacaatctgccaatctgggcgccttccaagtatcaaatcgaagatccgatttttttaatcttcttcattttttatgaaaaaatgggggaataggtcattttgaagaagaaacaacactttccgggtgtaaaaaatagggcccatcgcctaggttgacattttgtcaacttggaccattttaaatggagtttttcaagaattcgttaacatattgtcaacctggactgttttcgatccaattcatcaaaaagtgtttcgggcatttttctgtcataaaaaataatgaagaatcaagcaagctcgagaagaaaactgtaaaaccgagcccctagaaaaggggcctagtgcctaggttgacctagtgttgggcccatcgcctaggttgacaatcaacttgggacactgtcttcaattactcaaatgccaaatttgatgtaaccattgaattcagaatggtcaagaacaaggtaggagaccttgtcctcaagttcaaaagccttgaaagaatcaaaaacgagatctcgagagttagtacccagtgcccaggctgactaccaaactcttacatcatcaagagagagagccaatttgacaaagttatgagcatagggttgttcatccgatcca

SEQ ID NO: 221482 - DNA, 1402 bp, Cannabis indica
aattttttaattgaaaatcaattttttttttaaaaaaaattacttataaaatctttttaaacagttttttttcttgatcaatattttaagactttgaacacaatttagacttttgaatccagactcgaaccacgacttaggacccaaacctcaacccgaacctcaaacctggatcttgacctggacgcgaacccgaatcccgatctagactcgaacctcgacttgaatcccggacccagacctcagacttagactcctaacccggacccaaagcttgaacacgaccggacccggatcccaccccaaccccgacccaaaccacaaacccaaacttggaccccgatcctaacccctaccttgacccgaatctcggacccaactcgaacccgaacccggatcccggatccaaactcagaccttggacctggacccgaagcacgacctcggaccctaacctcaaaccccagacctaatcccaactctagaacccagcccctgtcctcgccttagccacagactcggaccccgtccatagaccccggccctagtctcggcctcagaccttacttaaataatatcaacaaataaaaataaaaaaaaattatagaacacacttttattttttgtttttaaaattgaaaaacaaaagtgaccccaaccttggacgaggagcccagatcccaaactgaacccaaacccagactccaacctggacccagacctcgtctcggaccacggacccaaacccgaacccctacccaaatctcgaacccgaacccgaactcggacccggacccggacctcaaacctcagacctcaaaccccagacctagttctggctctagaccccagccccgaatccggactcggccccggccacgggccccgaccccaacccggactcggccccagccacatgccccgaccccaacccggacctaacttaaataaaatcaacaaataaaaataaaatttagagaacacacttttgtttttgttttttattttttttaaattgaaaaacaaaagtagttataaatcacatttttatttttcaataataaattttaaaataaaaaaatttacttaaatttttatgattaaatatatttaaaaataaaagttataccaagagccacctaaaattattattattgtatatatccttttttttttaagggaattattgtatatctccttaaactatgaaaaatacgtcgaataccatcaagaacatgtgaaactttttcaaaagtaacaaatctaacatgtatgtattgataacctatcgaattcctatcaaaagtcatcgagattaaggccaaaaacaatacacatttcaagaccattgaattctcatcaaataaaatcgaaaacctatcaaatttttatccacatatgc

SEQ ID NO: 221483 - DNA, 3106 bp, Cannabis indica
atgtaaaatttaatgtttaattaatgtttttattaaaaatatagaaattaataattttattatgtaaaataataaaaaaaaaatgtaaaaatttataatttaatgtaataactaaatttaattaaaaatattaaaaatgacaataaaaaaaaatttgaaaataacatatttattgttgtaaaatttacatcctgttatagtgattccaaatttaaattaattttttgttattagcacaccatttggagcaaatattttcaatgcatctctaaggcgctctttatatttttagtaatattgtaatatgtgtacatataaattacacaaacttaatacacacttatgtagtaagttaattttaacaagtagtatccattttttttaagaaataagtagttaaaattacttgccacataacctcgaatattagcaagactatgttccgagattagtcaagcaaagtgtgccattaactaagtttcatcattaagcttagtgttgagtctaaaactcgaatgccattcaaccaaaccagttacaatgattatgaatcaataataggaatattggtctttattaatggtgtctaattcttacacaataactcgaattatgtcttagtttcaagtgaaaaaacaaggactttatataagttagtccaataggtattgacactttgaaactaactacacctaaccaactgaaaccaacaaactagagctaacataaaacactaactgtcttaactgtactaacggtcataactaactacaatttccaccttgattgatagtacagtatgaaagacaaagatagttaagaaaaaatagtaaacatacatccaaaaacaaatacatttatcaatcttaagacctaggacaagttctatcctagaattccaagtagcttcaagtagtgcttgaattttgttgttgtgacagccttggtcagcatgtctggaggggttttctgcagttgaaatcttgtctagcttgatcttcctatctgtaattacctctctaataaaatgtagtcgcacatcaatgtgtttggtacgctcatgaaacatttgatttctgcttaagtgtaaagcactttggttgtcattgtgtacatgtatttgtctctgacttaaaccaaaatcagtggctattccctttagccacaaagcttcttttacagcttcagtacaagctatgtactcaacctctattgtcaaaagagccactatagtttgcaagttagctttccaactcattgtgcagctgtttaagcaaaaaacatagcatgtttgtgatcttctggtctatgagtcaccagcataatcagagtcaacataccatgtaatctctagtgtttcaaactctgaatgatacctcagccctagagtggatgttccctttaaatacctcatcatccacttgacagccttccaacgctcaattcctaaattttgaataaatctactaaccatactcattgcatggcatagatctggccttgtgcaaatcatggcatacatgatactccctaccaagtttgtgtatggcaccttctccatacacaaacttggatagcttgcatgttggatagcttgaaatgttgagctaatggtgtgctaacaggtttggcatcttgaaaccaaacctggttaacagctttgagatataccttgcctgagatagaactaattctctgatctttctgtctctgcagatcttaattccaaggattttcttggctagcccaagatttttcatttcaagttttgtgcataacatctattttaccttgttgatgtcttccatgtacttgcttgcaatcaacatagagtaataggtaaactgttgactttaccttagaactcctgatgtaaacacaactgtcataagcacaccttttgaaacctgatttaatcatatactcatcaaacctcctataccattgtcttggtgattggtttagtccatatagagacttcttaagcaaacacacatggtcctcctttccctcaacctcaaactctttggtagcctcataaagatctcctcctctaattctccatgcaagaaggctgttttgacattcatttgctcaagttcaagatcttggattgctaccattgatagaatcattctgattgaagtgtgctttactacaggtgaaaaaatctcatgaatatccactccttccctctgtgtgaagcctttggcaaccaacctagccttgtaccttgcttcctcaacccctgggatctcttccttgtacttatatacccatttgcagcctattatctttctgtaagagggccttatgattagtaataccttttttttttaagaaataagtggttaaaattacttgccacataaatgtgtgttaacccagaatattaacaaggctacgtttcgagattagtcaagcaaagtgcgccattaactaagtttcgtcattaagcttagggtgatgaagccggatccatccccacttcgagtccctcatcttgaagactcaagcgtcaagacgagaagtcaagcttgcaagcattctggtaaggcttgcatgcaagcatctcaacagactttcatgcaagcatctcggcaagcatgcatgcaagcatcttgtcgagcatgcatgaaagcatctcgacaagcatgcatgcaagaaactcgacaaggcttgcatgcaagcatctcagcaaacttacatggaagaatctcgacaaggcttgcatacatgcaagcatctcgacaacatcaccaaggcttgcaagtatctcgacaacattaaggtattattgtctaaacttctagagacatctctttctcatattagtcgtaattttaatacttgcagctcataaattggctaaacatgtcttttgactagacgatgagcttttttggttagaaaaaaatcctcccaccatttgtaactggcttccaagatatgtttaatacaaatatcgtatttttaaccaaaaaaaatgttatttttgaaaatgacccttattatatgttgttgggaagtaaatgaatggggtatgttgaaaaatacctcttttattaatcaattaatcaaatttacctctaattttatatttatt

SEQ ID NO: 221484 - DNA, 1586 bp, Cannabis indica
tatatacatatatatactaggttaatgttacatgcaatgcacatataattacttttctttttaattgagtttaattatgtaatgttaagtgcaatacatgtatatttaattttttaattaggtaatgtatttttattttaaatttttaaaataaagtttgagattttgatctttgagagtttttagctattgcagctatattggtatgctctttagatatgattatatatatgtattttatatgtacaataaaagaatgaatttcattgttatacgtattttatacgtattttgtattgaaaatattagaaaatattttgacaaaatatattttatatattatgttcaaacatatatttttaaaaactaatgatagtgatagatacaatatacttaatttgtaattaggaagatgtggttataataaagtgtacaaattattagaagcatatatatcattaattatttttaaaataaaagattatcggaaaattaagatttaaatacatatatattttatatatatgtgattatacaaaaatataatttttatttttaaatatatataaaataaaattatatatataaaatatctacataatctttaattttaaatatatataataatattataaaattaattaacaatattctattagagttaacttagaaaaccaaaaaacaactttaaaccaagaattttgctatatagccacattttatttagaataggtacactcctatttaacaaataacaaataacaaataacccttttttttcactctcttttttctcaagttctctatatcctttcccatttaacatataagctttttattttatttcttgttaagttctttttctttatcttcttttcatttttttgacaaaatatagtttctgaaattttcattcatgtttttgaaaaaaataagagtgtagtttccaaaacttgcttgcaaatataatttctattgcatctagtattgaggttgtgcaaaagatagttagttttttttaatcatttttttcttttatttttttatttattttagtgttgttttacagttgtttgtcatgacctatttatttgacgttgattttactattcttactccattttgccggaattaatagttattttctgggtgttctcgtgttgctatgatggttttgtccgtaagtgtggaagatggagactataaatacatttcttcttcgttctctttggctatttttgtgattttttttattctggttctcttataaatacatttgattagctcactgacaaaaaggttttgaggtgtgtggttcttttatatctttctaagttgttatatctgcttcattgttttgcattaatttttatgttattttaattttgttttagtaatttttttgttccgattttccaagactgagcttgcaaatatagctgattacatctggtgttgaaagttgtgcagaagattgttagttttttaatcattttatccttttgtttctttttatttattttagtgttgtagtttacagttgttttgccatgattatttatttgacgtcgattttattgtttttg

SEQ ID NO: 221485 - DNA, 3363 bp, Cannabis indica
tttttttattttttcctaaaagcaaattgtttttatatattttagttaatatagtttaatgttaaagcaactgaaagttctaatttctacgataactaattgaaaaattctaattggttattattatgaattgaaacagaaatcataatcaaagcacatcatatttacaagcttcttctgcattgaaaatgcattccaaccgagtagtgcttggattccatgaaccgggtaaagtaacatccactataaaattaaatcaatcacaaacaccagttctgattttacaaatcaaacaatgtaatttgaaatgacttttacacaatgttacctaacacttgaacacactaaagttaagagatctaaactcatttagatccaagaacacaaggtcgccttgcatccacacagctgaagaaccttcagcagttcactttgaactctcctcaaaccaagcagattcaaactccttcttcaacctcttgaagactctctgaatttctatctgcatataaaccagaaaatatacaaaagaatattttgtcctagtaaagcaagaatcaagaaaatgattctaacagaagagagttagttagaaaaatgcagaatattatatatcctgaagatagagaattagttcgactaactaacaacccagctaaggacatatggcactgactgacaaaattacaagaaagctgacatggaaacaatcacagatattaagacaacagatgaaactaaatgcagcttagaagacatttgaaaacaaaaataaaattaatattattaatttttgttgtcattgttattttatttctaatcttttgatgaagattgagtgtgaaagagagaaatagaattgatgatgaacctagacttatcatcattgaatcacatgttttagaagagaaaaaattgataataggcttcatgggctaatcttaccatttttggattgggttgctttgaacttcaataaaaatgtcatctttttttcttttcttttcagctttgctttttttctctttcttatttcaacaaaaatacattttaattcctacaaaaaaaaaatcataaatttaatcaaaatcaaatattttcatttataaaatgtaccacaataatttcataaagatattaattaaaactcaacttattttaatatttaaaataaataaagtgtactttaaccactaattagagtgttataaaatattattgaaagatgtctaaattatcaaattaattatcaccataaatatttgattgtattttcgtttattatattgatttaagttcccattcttttagtcatgttcttgtataattttttttcttatattttgaaaaaaattctatttttttcaattttactattttttaattacaattttacgatgttctataaaaataatataaaaacaataaaagaacaacatcaaattaatgacaaacagtaaaccgtaaaaaataaaacaagattgcaacaaacaataacaaacatgaaaacatcaatagtatgtattttttgtaaaaaaaaatatataaaccgtaaaaatatttaaaattctttataaccatgttttgtaatttttttcttgacttttttgggtatttatgaaagtatccctaattgtatttatatatgaactattatctatgtatcttagacaatctttaatgcatggcaatatggtatagattttgtattattcttcgcttaaaaaatgaattaatactatattcatctcgatttttataattatgcttctaatgtataaagtgtaaattaataaaaaaaaatactaactagagacaaattgataaaagaaatttttctataaatatgaaaaaaattaataaaatttacttaaatatagcataaataaataatgcaaaaagatatgaaattaaaatttaatagaagtttaaaatatgggattaatagtaatacaacttgtaacatttctgataatattattgaaacttcatgtttttatatatgtgtcaaagtatagcaattcattatatatggtagctcttagtaacatcatattttattccaaattgttgctaataactatgaagaatgaaaagtgaggtcatggagggatgattacattttgaattttatcaattgaaaattgatggaagattgattttgcggtgtggaactcttaagaggtcagtgtcaagcacataggaacaagtcattcagtactaactatatggccatttttgacacaagtactctagatagtctttgaatgagataatggaaagtgtccccacaatttgattcacagctgaaaaccatttttgtggagtcatcaccataaatttgtcttatggttttggtctcaccaaattgatgggactgagagtgacttagggttggattgggactacaataattgatcaaaacaatgacaactaagatggataatagttttaaaaaaaaaatgaaataatactaataaatgttaaaagaaacaagtagtgttgaatagatgttatacttgctagaatggaatccacatattttaattggcaaatttaatttcctatgctttttttatatatataatttcctatgcttaaatgtagacaccttagcaaagtagtaccccaagattaaatcattaccaaaatatgctaatgttaccctaatttaccaaattgcctcctcatatttttttttcctcgatcattctctttttctctatatttctctctctttgtttatccttctcttgactttctctactcttaaatgaagcaaagccccttgtcggccacctccttcgtcgactcaaactagcgccacagtgaccctctcctcttccctctattctctcggctctcattctccatcattacccctcaccgtggcagagaggaacccatgttctttgtcgtgatctctccatttgttgtatctgtgatttgaactatgaaactaggtttgagacataaactctgccatctttttgtttttaatttgaactgctatactcaatagggattcaataggtctcagttagaaatttttctacaagttgaagatgattattcgaaaagtgttcgatggtactcgataggtattcgatgttatagtttcagttgaaaataaacaaacaacataactctctagaaccatcaagtaccatctagtacaacaaatattttaaatcaaataatataacttaacaacaccattgagtagcattaagagtatctcaaaaattcatcactaacctcaagaacatgcttatattgagtaaccatcgaacttattgagtttaattttatgagcagaaagctgaaaaaatcatatccatttttttttttttgcaaaaaatt

SEQ ID NO: 221486 - DNA, 1580 bp, Cannabis indica
atatatatatatatatacataccgcagcacaatagtgagcaaccttgatgttatcaaagtctacattttcagggtgacgccaaagcatggccaacacaaggttgtaaacatttggaataggcttgtatatgtccttgaaaaacatgttaagaaagtcctgcatgcataatatattacatattaattaattactacattaattactacattaattaataatggattattaatattgattaattacgtacttgctcagcaaaggcagtaggaggagtggtctcaagagcctccatgagattgtggtaagtgacaagacttggctcggaaacaaacatgccggcgttgaagtacaagggcggcggtgagcctgactccgccggccatggaaccctctcgggacactgctggcagtacccaatcttatattgagttgagaaattccaaactttctcacaaaagcaatccatcactgcgtagaaatacccatttggccactcaaataggtggtcaatgttttcaaatacttgtatgtctccatccaagtataccatcttctcatactcttcaaactacatcataattcatatacatataaatacatagtatacattatagttagaaatttaaatatcaatttgtttttacttatgtttgttattactaaaaaaattcgtgattacaaaaattataatttattatagctaaatatatttttagctatgatgctaaaactaatttacttgtatctaaatactgttttttagtcaatttttattgggactaaaaataatatttatagctacaaaaaatttatattgagtgaagaaaaagtagcttttttagtagtgcctggttataaattatcgaaattgaattattttcagcaaaaatgtactaagcttaaaataagattcaaataacatttagaaatattccatcattattaattcaacaagataaattatatatctagtgaaatattttctgtaactaaaatttactcaatcaaaaaccttagtatataagctaggtacgtagtagtttaattaccctaagcaaatatatatacgtatatacgtaccccccatatgcgaagctttgagtagttgatgacataataagccatggcaaactgagtttgagtgttgttgggaggatagactgggtcaatgagacgaacaatgcatccttgagatctaagaatttgacgatgttcttgaggaacatcgtccaaaatggccaccacaagagggtatgcgcttttaactttgcgcagacccttggctagcccaaccactcctttcacatagtctccatttccagccaaaaatgtcacataagccctcttactactattatttgaaactccatccatcttacttattatagtcgacattattatatatagagatagagagaagagagaagagagagagactgtatatatatttatatatatatatgtatggatttggtttggtttgtatttgtatttgaggtaagggttgagagagttggctcgttatatagtaggggcatgaatatgatgatgatcagtatatgtgatgactactactagt

SEQ ID NO: 221487 - DNA, 3097 bp, Cannabis indica
tggtaattctaactaaagaaaatgagagggaagcagaagacttgaatcgaaaatctaatatgaaattaaccaactcaaaccagtcgaagagttagaagaagttattttagatccaaacaatcccataaactgtgtttacattgagaaaattaggaggaagaactaaaatagcaattaattagttttctaagggcaaacaaggatcaattcgcctggaaccatgcagacatggtaagaattaatccaaaagtaatttgccatcatctaaatatcgaccctaattatccagaaaaacgtcaaaaccgacgaccattagattttgagagacaaggcgcactcaaacaagaaattgacaaatcgttaactaaggacttctacaagaggcctactacccctcatggatttcaaatctagtccttgttccaaaaccaaatggcacctgaggaacttgtatagatttttcagatttgaacaaggcatgtcctaaaagattgctttccactacccagaattgaccagttagtggaagcaacagcaggacgcaagttgatgactttcatggatgcatactctagatataaccagattaaaattcatgttcctaattaagagcatacgggctttgtaataaacatgggacttttctgttataaagtcatgtcatttgggttaaaaaatgctgaagcgacataccaacgtcttgtaaatggtatgttcgagaaccacattggatagaatatggaggtttatgttgattacatgttggtaaaatcagtgaaaagcgaggatcacacaaaggacctcgctgaatgttttgttatactaaggaagtgcgacatgaagcttaacctcaagaaaatgttcttttggggtttcctcaagaaaatttttaggcttcatagtgaatgtaagaggaattgaagccaactcaaaaaaaataaaggctttaatcgagattccttcaccaacaaagccaaaagaagttcatgctttaacaagaaggatggcagcactaaatagattcatttcaaagtcaactgataagtgcctcccatttttcaatgttttgagaggcaataagaaatttgaatggacagaagagtgcaaggaagcatttaagggtataaagagtcatttttcaacacccctagtttttccctaaccaataactggagaaactatatacctttatcttgttgtctcggaacatgccatcagtgcagctttagtgcgagaagagggtaaacaccagcaacttgttactatgtagtaaaaggttactggggccagagtcaagatacccacctctaaaaaaacttacaatacgcttaattcatgcatctcgcaagttgcatccatatttttaggcacattaatttaaagtcttaacaaatcaaccactaagataggtcttggctgattctctgagtgttaatcaaagggccagttttggctgaatttttaatagaagtaatattaaactcagaagaaaaccctaatgttgagcgcaaagcagaaacatgaaaactgtatgttgatggggcttcaaatgaaaatgggtcggtggcaagagtcatagtgatgtcgccagaaaacttcaaattccactacgcactgagatttttagtttgatacttcaaataatgagacagagtacgaggctttgttagcaagtttgagaatagccgaggccctaaaagtcaaaaatattactagctatagtgactcgcaactaattgtaaacaaagtcttgggagaatgccaagtgaaaggcgtaaaaatggctaaatatttagagaatgttcagaagaatttggaaaattttgattatttcaaaattgaacaaattcaaagcgaacaaaactataatgcaaatgcactagaaaaattagcatcttaattttatctcgataaattgaatttggctccggtggaggtcttagacgatccaaacataaatgaagaggaacaaattgagatgatagatactttgccaaccaggaacaaaaccaggagcttttgaatatgtccttggatgtacttaaagaaaaatgcaatgagtcgcaaataaccaatgcagcttaccagcaacgaataacgagatactttaagaaaagagtctgaaaaaggttgtttaaggtaggagatttggtattaagatgtgtatttgtaaacactcaagatccagcgacaggagtgttcaacccaaactgggaaggtccatatattattgaggctgttgtaggaatcagggtttataaattagcttggcttaatggctcgctaataaagaatcattggaacaatgattatttacgatcttattaccagtaatttaattatgtaaatattgtatttatctctataatgattgatcaatgttatgaataaaattgaatttgttcaagtaattacaaagtttatttcctttaaaattacatggggggcatatactgtgtataataactagattccacctagaaatatatactgtatttcaaaaaccctaaaatttaaatttttttcacggaggaaaggataattgattaaaattatccgtggacagtataaagtcaagaattgaaaaaccttttcaagtaaaagaaagaattaaaatagtagttgtaactgagaattttttctcataaaacaacataatgctatatgctatttgaggaaataacggctcacatgtttatagcatgtattgtaaacgagatacaaacgtgtcttgagaattaatacataagctaaaatataaataggggattaactattcatatgagcaataaaaaatattcaaaatagttcttaaaagaactattcaagatatttgaagtttgctctgaaacatagcagattataaacagctcttgtataacacaatagattgtaaactgcttagtgaaaaacaaggcagattattaactacacatctaaattatgataatgacaatggaactcatgtaacccaagaatatcctaagttaaattgagaaagaaaaatatttgattgtgaatcataataacaataaaaaaaacataaataactcgaaagaagcaagataaagggcataaatataaatatatttaaatt

SEQ ID NO: 221488 - DNA, 2224 bp, Cannabis indica
atacatccgatacttgtatactttactaataccctagaaaagacattccacataagactgtgtaagtaaactttatcgctgatatcacgttagtgtaaattcagtgcactgataaatcataaggctaaatactttgaagcatataatcatgattatttttcacttgtaagcaacactataatcacgaataactatatgttcaggatttaatagaatttatacatcaaacatataatcatgaaagtaataatgtgaacacataaaataatttatgatattttattattttgtaaatctaattatattgaaatagattttatttagggcataacatttcatcatatataacatttgatgatatcaccactttcttcagctttcaataaaaataccaaaatatttaccgaaaatttcaaaaataaatttactatatgtgaaagttaaagaaattgatcaactataatgaaaataacaatgaggatttttacatggttgagttgaggccttaacgagccttagtccatgggtcaataatattactttaaaattggaaagccttaaggtttacaaaaatatatgaactctatattttgcccgagcaattaaggaatgagtttctaactccttgcatgaagggttcttcgtatatttatagtgtttagggtttttgcttattagcctttacccactgatggggtgactacaagtaacatattaacttggacttatctggtgaagcctgacccatgaggcacttgatgtatgctgatgtggatgccacatcatgttgttagttgcctaaaactttgtcctatattcgtggagaataaatacacattaaatgcttaattattaattaccatctttctatatttagtaagatatgatcttacggacaagatcattgggaatgaattcttgatattgtgggatctagtaataaataaatagaaattggtactagacatctactgtgcgtttactaaactgtaattggaatcagaataatcaatgagagaaatgaatcagtttaaaataaaaaataatcggaaacaatatttattatgctgtttactaaactattcggaaagaaaaccagaatcatattattttatttatataactaggaaaagtaatcagaatgctttaatttgacaaaatttacattattagaacatgtaattattttctgtttatagatttttaaaggacatatttatcttttttatttttaattaataaaattaaaataaaaacaaattaagttaagttaggaaagagaaaggtattccctataaaaattgggggagaacctttccctttattttctccctaatttgtgtaggctccactactttctcctttttcaaaatttagtaaacaattgtatgaaaatcaataccatacttcttttggatgcgctgcttaatatcttccgaacgtatgccatgctagatgaatatctcgcctagacaagtctcctacttatctggaaggactgattgcttatggattcgacccaatatttcatttggacccgctgttggacctgaaatatttacattgtagttactaacaaaattgcacatgcacctatccgaaaacacgaataacatacagttggacccgattccattataacatacagttgcgtataagaaaggaatgtcaccatgattccatgttcaaaatttttattttatttaaaaaattatataaaatgctttcaatatgaagtttagttgttcttagttccatgttcaaaattcaattagaaaaacaatgagtattgaccttcaacatgatttaaattttgtttaggaaaattaaaaaacagttggactcgattgctttggtgcaatatacgggtggtgtggtggataaagagaagtttgaatttttctgcgtggtggcgtggcaaacttggcacattagagatggttggaatcattatcattggtgcgtccacccaagtccatcatatcttggagttcagttggagtggtgtcattcctttcttaacatatacagagattcattgccattggcaattgcgaaagttgataaagttactgccataaaagctggtttagtgatggccaaagacttgagatgttaaacaagcaagccttatggcctaaaaggctaaataaattcttttatcatttcattactgaaaaaatctatgatttctgcattagtacaaggacaatctcacctctta

SEQ ID NO: 221489 - DNA, 2174 bp, Cannabis indica
ttttttttatcttgcattggaatgttcattccttctattttaaaatggaatagtcattctacaaacatgatggaaaagtcattacattagaatgatattccaatactttaaaatgcaactaaacaaaagaatagaataaaaattatttattttttatgtcaaaatagtatttccaaagtgatctcaaagacattttagaaaatatacaaaaagttgttcaaataatgttgagattatttaagtgaagtgtaaagtcctctatggtagaaattgtgagtgtgagcctcaataactaaaattattgtgagattatggattaaattcatgtgattttgaattgattattctaaattaattttagttatgtgcatatgtgaaattttaatatgtttggtatcaaaatttagtaaaaataattttaaaaaggaaataaaatataagagttgtaacaccctactagtttaggtgtgtaagcgtgatttttaacttaaaagtgcacctcgttgctaatcaacaagtttattgaaaatcgtgaataattaaaactttatttaactaatcataaataccaaaatatacttgtattaactgggatcctgttttacaaaatatttacaaacgtttcatagtgcaagttacaaaaatttgtcgcctagcgactatacaacgagaagtccaaatactcaagcaggagggcgaagttataactggcacctaaagggggctagccagccctatggccaacataggccgccaagttttggacatcccatgcccggccagcatgcatcttggagatgcatggccgaccatcttttggcctggcaagattttggtcacaactttcatacgtggacaacatgccatatcacgaattgggccttaatagcccacaaaaatagaggaaaaatatctattttcaagggacattttagtcatttatattttattaatttaatatgtaaaaaataacgaattggacaacataaccccttcctccatatctctcttctctcttattcagtcactctcacacacatctccataccctgttgccgtgcccccatccactcatccaggctccaactccagcagtgttctagtggaacttatcatgactccttccattcagatctctagcccttaattcctatcaataacaaagcattatcaaaatctgaactgaatcttcttttcttcaatctggttcaacttgctcttcctcactatgctaggtattgctttgaaatgtgagggcatactatcaaaacactataggcttcaaattattcagtagagaagaagaagaattttgaaactaatagctctctttattttctaattgtctgacaaaaggagtctaatcatcatctgaaaataagagctatacttttatatttatagggtagcttttagagtcaggtttggaatttaaatgtaattaaaagagataaaaataatagctttattaaaccccttggctgaaccctatagtgggcctattgagttttaattttgccattttatttaaactcatctttctttcagaaactccatattttaattctaactcaataaatgtaaattctatctatttaataattataattaaaccttacaaagtcttttatttaataaatatactctaaaacctcttttcctctcaaataagtgtttgcttagtgaaaattctcaaacaagacttagtcttatttagaattctaattgattaattaaaatcaaataaatgagactacaaaacagtattatcctagttagtgcggggaccatgaccctacgttaccaagcttctaataagtagatctgaaatttaccaagtaaattttctaacttattaattcctcctgactctactatagattcagaattgcactcctgattacatagaatgctctatataccaaaaatagatgtgctttgaattatccatagtttcaatccaaataatcaaagatcttctatagataatctacatcgagtaggaacaaacttaatattctacccctcaatgtattttatccttaaagcacttagcttcctataaatgatatttcagtaaactaatataattactgaaataagagctcttccatttatctctattaagccaaactcaaaggaaatcatcatttcacttctatatagttacagaa

SEQ ID NO: 221490 - DNA, 1449 bp, Cannabis indica
aacataaaatgttatttctgatctttattaataagtaaatctgattatattgaccgttcgattatcattgtgccttcttggattagaatccacgtgtcaagcttacaaaaattttgacaacaaagtccatagggactcgagcttcatgcatgggcttatctttgtcagtcatggttggtattcaaattgaatctgagcttcatgatgtgagcatcacattggttcaatttttatgtgaaataaattacataaaaatttctcttccctaaattggctcacattattttttaaaaaataataagaataaaacctacacataattacaccatatagtgagcaattcatcaactctcatatatttacaataaaattaccatccattcacatacatatcacacatatatatattcataaaatccacacaacatttaatgtataaacattcttaaaactgctttgatgccaattgttggttttatcgtactaaattagtacgcaacggaagagtttcgtattattgattatcattatattatatcctaatggatctccatatataaataaaaaacaaacatagtaagtttagaatatacctcttggagcctatcaaggtattctcaaaacttctcgtatgttgtatcccttaatccagatgatgaggatgatgcaactagactcacaccaatgtcttctaaatcgttccaccacacataagaaatagtgagggatattaggataaagtgtataactttgttcttgttgagttctcaataaatgagtaagaacaattgagagaaaaatcaatttcctttttctttttaaattttgaagatttaagtgttttgagaagtgaaaagtgtgttctgatttttttaaatcagacttctatttatattggttaaatctttttaattaaatcatatttaattgtttaaataaataaatatttaaaccgaattggattacagatatttatgagggaatctctaaaatacttgagagaatatctcaacaaccttgaaatatctatagaaacttttcaaattaaatatttacatatttgattaattaattaacttaaaagacaaactccataggaacaggaacaacagtaggcgtctacccttgtctattttggacaaggttggtgtcttttatcttgacaaattttgtctcaacaaattttgtcttaacaatttttgtatttttcctatttaattaatttgaaaaataatttatttattaaaaaattaaataattactatattgccaattcaaaatagatttttccaaacatctttatagaactctttattcctacccttgatagtgtttcaatgtgacgattaggggaccatggacttacaattctaagatccaataaactacattatttattcagtctcatcaatcaaataatcattgtttattaattccatgattactcaa

SEQ ID NO: 221491 - DNA, 2253 bp, Cannabis indica
cttttcggcacataaataaatacgtaattatataaatataaatagggtaatagtacccatttcatatccattatatatatacgtacgtaccggataacctgagttccctgagagtgtctttgcaccttaaccatcgcaaattttgagtggacgcggctgtacacagtagcatctaagcttcggattgcaagcgtatttatgaagggattctgatctggataggttcgaacaagacatatattagttgccttagactttggaaaatacaagacctcataaccaacatgcctattcgaatttagagacatgttaaccgtagcccaaaagttgccatcgaagtagatgtcaaaagtgggaggggagtccatcccatcgtaatctccatagaaaaatgttgcacgcaccaaaattcgtcggtctttgtgatcatcttcgccgaggttgatggtgtagcagtacttattctcgtcaactactgttgggaaagctctcaaagatgttgttagatgggatccatctgggctgctgaacttagtctctctggagacgccgctgctgacgtagccatcatctctcacccaagttacggagtctatagttctgccacccgagccaccgcagtcgatgctcagaaacacaccaacgcaccagtggtattgcgttagtgttatcacaacacttagccaaaccaaccatataccactattactactactacttgtgctagtattacttcttatcatcataattattcttagctttgtgtacgtatcaatatcgcatttcaaagcactatatttatacatgtattaattacagtatttgtctcaagtttgactatgtttttattttatattttatttaatatatacatataaatgagatacatataaatgagacatgttctgcggcctgcaaaacaccgtggcatgttattagtttaacatagaataaggtccacatcaaaaagtactattgttgtaccaataaatatcactcatatattttaactgagaagtctacgacacacacaatagcttttaaaaactaataaccctaggccaaattttttaaaaacatcaaaaatgttattttctatttcaaaaacaattttgagtttttgtccaacatatctattttactttttctctctcatactcgaggtctgtgtctggttctgaaccaaggtaagagattgggtccgagtctagggtttagatcaggttcaagtctgagattcggtgtttgaggtcttaggtccgacgtctgagtccagctccaagtctcgtctaggtctatgtaatgaccgtataattagacataaaaattagcatattattagtgattaaattactatttatgattatgtgtgcgtagtgtaaaaataagtcttattgtcaaaaataggcattagcgatataatttctcaattataaaatttttattgaattctaagtgtgtcatacatgttatatatgaaatttgacattttcatgttttatgaccgataacagtagaaattcgacagattggtcattattgtcactttggtacgatttagtatctaagatttagcagttgggcaagatttatggacagatagaatgttgatcgttatgtgggtattatttggttatgaccattttatctctaggtttgaagatggcttagtggtgaatggacagatagaataccgagattatgtgggtattatttggttatgaccattttatctctaggtttgaatatggcttagtggtgaagtaaggacaaaataatcaattgccaaataagttatatttcactactataaaattggttttcccatcggtttataagtgtcttttatactatttcatatcagtttcctaaaaccgttagccatgtgggtgtcataaaaatgtgaaactttaaaagacggtttataactgttgggaaaaaatattttaaatgacgatttacaactgttcagaaaaatcattttaaatgactgtttataactgttggtaaaattattatataaataaattctttataaattaatttataaagaataaatgtaattgtttatttatatgagattttctttatttaaaaacaaacgtattaataaagaaaaatatgaataaaatataattctgaaaattaaaaacacagccaaacaactttttagagttctaaaaataaagttcaaagcagtttgttttttttactttgggagaaggcccagggattcaaacttgggacctcctc

SEQ ID NO: 221492 - DNA, 3802 bp, Cannabis indica
aatctatatttttgtagatttttcttttttgtgaaatttagccatatatatacctcaaaacatgtttttttacaatcctacagcaccttataataaatgcatgatcattgcacctgctatacaacttgcacaagctatactatatatttttacaagtattcaaaccattctctatctatttgcttcactttctttggtaaaattgattctattctcagctttacttctttttttaatcggtaaaccaccgttggaattgagctgacctttttgctccacaaagcctcattcctacatttccaaatctgatatattgcagcagcaagagcagtggccaatacctgcttctgaaactttgttatcttgatcctccttactgatttcagtagctgagggagtgttgtggcagtagttttctatcaaagccatcctttgacagcttctatacagttcctgctgaagtgacattcaaaaaacaaatggttcgagctttcatctgcttgatcacatatcatgcatcttttatcagtcacaatattgaatcgtattaacctgtccttcgtttgtaatcaattcaggacagccaaccaaacaaagaataggtgtttgggaatgagaaaccttccccatacctctccagaccatgttttgctttcaaagtgtggtgttaaccacttgtatccctggtgaatagtatatttgttcaaaacaaattgttgtggactgatttttcctttgatctcctctttcacttgaacaatttgtcgccaataccagctgctttgattagtgcttgtatagtcccaccagctagcaccttttatatagacactgtgtacccatttaacccaaaggttatcctgttttgtcgctacttcccatacatactttccaagtgctgcctagttccaatacagtagatttctaaatcccaatcctctttctttccttgatctacacaagttatcccaagctatataccccgagccattgtattcagccttccctttccaaagaaatgatcgacatatagctataatctccttcaagattgtaaaagtaggtagatggatcagaaatctccttggcagaacagtagtacatcatctgcaaaacacaaatggtttaacttcagattctgacatctttcatgatacttgaaatcattcttactcccaattttgtccataatcctttatagatattccatgccaagtatgaagataagaggggacattggatctccttgacgaagtcctcttttagctccaaaatagccttgcatctctccattaatcattagactaaaacgaggtgtccttatgcagcacatgactaattggatgaagtctgcaggaaattcaaatgcttgcaacacttcttctataaagtcccattccaccgtgtcatatgctttcctaatatccaattcaatcatccagtttgccctagcattggctcttccataatgcttcacaagatcttgacaaaccatgatgttgtaggcaattaatgtatctcccttgcacaaatccgctctaattttgcgctattgggtctggcaatactgttctcaatctagagcagattattttagtagctactttgtaaatgacattacaacatgcaattggtctatattcacttacatttgcacggcatttctttttcggcactagtgtgagtagtgttgagttgagttccttcaataatttctttgtcttcaaaaaatcagtcactgcttctgttactttccttcctactaattcccagttatcttgaaagaaaaagttgctgaatccgtcaggacctggagctttgtctccaggaattgcaaaaattgcttgtttaacctctgctggagtgatctctgccatcaacatcttcttgtgttgctctgttataatctgcccttgctttataatgcttggtatcacaagtcttcttctctccattttagtgcccaacaagtcattataatagttcaggaaagccttactcacctcttctggttgatccgtccagcaaccctccatgtcggtgatggaatatattctattggctgctcttctagctcggattgaggcatgaaatattgcagtgttctcgtctccatctttgagccattgcaccttggttgtttgacgaagaaaagaaagcattgctttgtaaattctttgatactctttcctagcttggatttctctttctattaattcaccacttaaaggagatttctgaagttcttgttgacactccaaaagctcttgcatagcctgttcatctcttctttgaatgccagaaaattccagtctattaatatctttgagcaccatttttactctttttagcttttgagtaagacagtatatcaaggtcccttcgattggttgctgccaactgtgtctcagcttctcttggaactcaggtccattcttccacatccgaaaatacttgaaaggagttcttactaccagaacttctggatgcaccattagaacacctggactatgatcaaagtttccttctggtaagaacactgcctctgccgaattatatttctgtagccacatttgattccccataattctatctatttttgaccatatccttccttctttgttcagtttgttaaaccaggtgtagaaattacctgaaaatttgatgtcttccattctacaatactctgcacattcctgaaattgttttgttttgtgaagctttactctttccccttttctttcttcagctgttagcacttcattgaaatcacccatcataatccatggttcattaattcgttgtgccagattcatcagttctttccataactcctctctctctttttcttcattcatgccatacacaaatgacacttgaaaattttcctttccagcccttacttctacatgtatcagttgtctcgagcaaaactgtatatttacttgaaacattattgggttccagctgagaattattcaaccccctggatcccattgtttcacaataataggctttttgtcaaagaacaggtagcctcctcccataatttcatctcttgcactagggtcatgaaatcttacaatgaatattcctggcttcaataaacccaccttacctattcccttttccttccaaattctccttgcaaaaccagtaaaggctcctattgggggattagctctcaatacataacagaccattgcagattgccagtaaaggatttcatcttcaatgtcttccatttctatcttcacctttatattctattctttttcaattttggaatcgtcagatttaccacttaaattctgtatcactgattttgacttcatggttgattcatgtaaaattggaggtgtaggagttttaccagaatgcacctgttgttcacatctcttgttgcagctaaaaaattcaagaaatcagaccttgcctcctgttcaaccacaaattgcctaactgtagatcttggagagacaacttcaacctcctcttctaccgtctgagctaccttcgcctcaatcacttcttcttcgtcgtcgtccgcttctgatactgataacgcatctgcccccaaaatcgcagccatggatttggttttgagcaccaaatctgaagaagacggacccttcttcttaattgtaatcttccgttttccatgtgtcttcgttccagtcgtcagtttgttcgccggagaagacgccttgcgtggacggccccaacctgccattgtgccagagagttctctgagtcagagccctagcagagcatactcctccctttatttttttattttttt

SEQ ID NO: 221493 - DNA, 1197 bp, Cannabis indica
aaaattattaaaattttcttatcctgtttttttcttttattttaaaataaaatattactttaaaattacattttaatacttcaaaatataattaagtaaaaaaataaaataaaaattatttcaattttattttattttattacagaaaccacttaaggtggcattttcattactaccaatgtaatatgaaaaagaaattaacaatttttgtatgcattttaaaattttattttattttattttatttccattcttattcttatttatatataaagaaaccctttgaataagaatcactaaaatacaaggttaattaaaataggccattaaaatatggggttttagagtctttaagtaggtcccttatgatttcagtttcatggggtcagagatcaaaaaaaaatcttttttctttcatattgtctctttttactatctttactcagatatgtgtgtattttttgaattgagagttactgagaacaactacagcagaagaaagataaagcctttgagtttttttttttttttttggtgcatgtgaagtgatccccacctctttccctctagctatggccactagatgaggcttttctttttgttggtttctttgattcccatctcatctatgactttcaaactaaggtaactcttttttttttacctgttctttctctttgacatttatttttaatcgtgaaagtgagtgttctgattcaccagcacaacaataaaagtgatttttatactactgctactactattgccattataactacctctactactagcatagtggtagtagtgtaccagtactgctactccatcaaccatgtgttctacacttcataacaatgaattttagtcgtttattctcttcattcactatcatcttttcaagctttcccatttctataaagggtcttttctctagataaaaatgttggttttggaatagtggtttttttattttggttggtgcttgaagctggagtggtgttgagtcgaactcatttaggataatatatcttgagattctctgagggggaagttttccaaggaaagaatctgatttgggttcttggaaatgaagaggtaggatttgatagcacagcaagttattgacacctgttcttgttgagttgtggagagagagagagagagagagagagagagagagagagagagagagagaga

SEQ ID NO: 221494 - DNA, 1812 bp, Cannabis indica
atggtacgtttacagcactcttttcttggggtgttttagtagactctttatctgttttagtagactctttatactgttttggtttagttatttaggactatttgtaaaattttaaaataatttaagtagtttacaatactaaataaaatttttattttttgttgtaggcacggttaatttttcttatacgtgtggcaattaactgtttaaatttgattttcggcactataaattatttagaattttttaaaaattaaaaagaaaaactagattagaatttttttttttgaatgctgaaacagagaaggagtctacctgaacgaccaagggagtagggctgggcaaaatgggtcagacacgataacacggttcaaaacccgcacgagaattaacgggtttaggtttttcgtaaatgggttcgagtcatgttcaggttgactcctctaacctccttaataaataggttatgttcgagttgacacggctaacacgaaactgatcctttaatgacttattagtactttaataggtcataaatgagtgataagcgtgttgaatatgtgataaacctattattgattgacatgtttaaacaaaatatacttataaatgggttacacgaatcgtgtcgtgtcaacccgtttataaacgggtcatgttcgggtcaactatgtatttattatacatggatctcgacgaatataacccacgaacacaaattgctaccctaccttatagaaatttaatatatgtggtgtttgctcttgctcataacaaattgtaatgataaaagatctgcaaaagcttatatactaaaggaatatggactaagtaccaatgacaagagagggcagtgtatggactaagtaccaatcaagcccaataaaaccaacaaaacagttggtaccggcccagtcaaaccaacaaaatagtttggtaaactgaagaaaaatgggagcttctgctcatgataggctttttctacactattgatatgaccagtgacggactcagaattttttactttgtgagaactttatttatcattaaaaaatatttatacttatattataatcactcttactagatttatttaattttgtgggggccttttttattattttagtctataattatcaaattaaaaaaaattatatttaattttttaaaaggtaatatttttgttagtgggggctatagcccccatattgatactactaggtccgtccctggatatgacactacttcattttgggaaatcttaggtagcgtttataagaaataaaaacataagaatagaaataagaataatatatttttctcgggcatgcttgatagtatgctatgtctaactcgacgatgcttaaaaatcatgttttttatgaaaaaaaaattacattttcgctcaatagagttcgaaaatgctcaaatgcaattcttacaagtgctatattttgcttaggtatccatttgaggtgatttttttttttgagttggctctcgttctttctttggcttaagcgctcataattttatttttggacaccttctcaaaagatctcatactaatggaataggtaaaacacttatatttaaggcaactcttatctattcttctaatgtgaaatttgagttgatactccaacataaacatactctatttttttgtcgtagttttgaactatacatttcttaaatgtatgtgtgcacatattaaacgtgtagattctcaaaaaaatactcacctaaattacacaattttatagaaattatgtaactcattcacaaatttatcaaaattcaaaaaaaaaa

SEQ ID NO: 221495 - DNA, 3815 bp, Cannabis indica
aacaaaaatattaattaaattctaacactattaattttaactattttatgtataacaaataattttttattatgtaagctaatttgataaagcaatatttaattactaaaagtatttcatttaaagtgctatatattttagcatttttacaacaaaaaaattatataaagtattaaaataatgtaaaaagatttataataaatattttttatttagtattaattgtagctgacttttttttttgtaaaacatagtactatgacattaatgcagtaaaaatatatacatgtaaagttatttaattattaaaataattaaaatagacagtttggtaacaactttccattaacatttccatacatactaattgtactagggaaatttgattttctatgcatcttttatacctaaatttgttccctaaactaatagtcatagctattgaaaaaatgagtatacttttccctatactctaaaataccactcccatttttctcaacctctctctctcttcctcctttctctctcaaatcaaacccaaaacccacaaagcctccacaccgagccacctcctccaccgcactaaacccacgccgatccacctcctccaccgcacaaaacccaggccgatccacctcctccaccgcaccgctcgaccgccgtaaccaccgcactgctcgaccgccgtgaccaccacgaaaattgaccataacgaaaacccatgtcgatccacctccaccaccacaaacccatctcgacagaaccaccgggcccgatgcaggcccaatgctcatgcgaatgggttggggaagacgaagacctgatggggtccgatgcttgtgttggattttctcattaggtccgatggcacccgatgctgggtttgatggggcccgatggtgttgagtgatttttcaaaaaaaaaaaattgtgttggtctgatggttccgatggggtccgatgcctatgtgttgttatctttttttggtgtgttgggtcaaatttgaatgagaggggtaatgtgggaattaagtaaatgttgtcttattttaccaatatagagtattttaggtttaaagaaaaaatttcctcttaatgtaaggataaaaaatcaaatttcccattgtactaaaacttttttgttgtaataagtgcattaaacgtttgtatatattatataatattttttcccatataaatataaatgtataactttaaattttcaaccctccaaaattgtggggcctggggcttaggcttgactgccctaccttctgaccggtcctaatagtaaagaataatacaactaatctaaactgaaaattcttattttaccattaaatgtgttatgttttctttcttagatgtacaatgttcctacacaccacaaaaacatcaaggcttattttcaagttatctttcttctaagaaacaaaatttaagctctcacacactcacttaggtagggcactatatactactactcctttcaaaatgtgaaaacaaagagaacattagaagtggcctcttcttaagcatcatcattcccctcatcatctggttcaaggggtatttcatgtcggggtctattgtacttctctcgcagctgcttgattgggatgaaatcaccggctgcgtccatcccatagaataaaaaggaaatataaggatgatcaaactgtccctgcgcggaaacaacgtaatctaattggatcaaaatggataacccaacaaagtaaaatgatcgaaacatagaaggcaagactaagtctaattttaccttgtttggtggttcaggggttagcaaattgtcctccgcaactgcaaaacaccattcaacttgttacaaacaaagagattgaatcgttaagggtttggtcaaatagttcaagatcgattaccatatgccaccaaaagatttgggtcctcatggacatcaaccaaaacctggaaaataaatgataaagaactctattaatttagttgagtcatccaaacattgtttccctctcatttggcaggaaattcagtctcccagactttttagcattcaaaaactccatgtaaatacggagcaacacattttttcagtaatttgattcaaaatgtcttgaaaagtgagagggtcacacctgatagaatggctgattagaaccccgaggcaacttttcaacctgtgcagtttccatccacgaacttgattcgcagcacactggatccattccacaaatgacacctttatagcctgaaagtaccaaataagttctcactttcaaacaaaagacaaacagtaaaaatcaacaagaaaaaacaagctatctaaataatctactaattacacactaattctttcgaattcatttctttgaaggagtttgaactgaatttctcgcaaaggctccctccataatcacaaagttcaacaagcaacttgaaatatctattataccaaatattggatgaaagggcatctatattataccaaatactttatgcctcactttctgccccaaacgaaatgaatattgggcattgtcatgtgctagagattttgctgcagcggcaagggactctgcctctagtttggagatttgatctcgtaacttagctgccaatgcataattctcgctctcaactgcattctgcagatctgcactgcaagaaaagaaaattaaaagcaatattattttacatttgaattgacctgatatgcttttaaagttcacaatacaatgggagaaggcattggaaaagtcaaatttgcgcacacacaagtaatatatatgacattgaaattaaaataaggattacaaaaatgaaacttgccgtagacgtatgatacttagtgccttatcttgaacttcgctttttgaagatgatccccgttttgcttcctgttgtctgataacctctgtttcaaccttcaaaaacaacacatatatagcacaaattaaggcaatttaccacccactgggcattgaacaatcatactaataagttcataatgaaataaagaggggcaagagaagggaaagataaactatgtcacttgtcctcacaaagattctattctaggccctcaaaaaaatggatcttttttagttcatcataatgtcacttccgcagagatagcataacatacattgacaaccaatctcagtggaagacatgttataaggacgaaggataggttgatagatgaaacttccaacttatcttctacccctgagttatgacatattttggacaatgaattcacaaaatgtgtaccaactaggcagctaccttctttcttatgattccactacaaaagctttgtagtatagcaacaaatcaatgaatcctaaggggtcgtttggtatgaggaggtttagacttgatgggaatgggaatgtcaaactaaattaaattctaataaccaaaaggtttgtgtttccaagtgaatcctacttttttaaattaaaattgtggtgatgtaaatctcctccaacacttaagtttcatattccctccaattttagtctctctaactcaaactcacataataaacatccattagatggcatttggttggaagactgaaaacattgctagaataggaatgacattgttgagtgttgtatggtgtggattagtcagattatggtattgccgccttatcagcacaaaggatggtcgatacctccttgaggtgtggcagtctctgaagatgtctttgacctgacaattgaagaacctttggattacttgcaacatgtgcggaagtgtattgatgtactaatgccggcttacttttgaaccaattcagcaagtag

SEQ ID NO: 221496 - DNA, 4701 bp, Cannabis indica
attacttgggtatgggacataagtcagaagtgtgagaaaaaggaaatgtcaaaacaagtatggggggagaaaggaagagagactgtggatcctaaaaagaagtccaatgctgagggcttccaacaagtcaaaaaaggagctaaggtggtgtggaaggaaaagaaagtaagtgaagggattgatactttgagcaattttaggatgttaccacaaattggtgaatgttctatgactagtgaataggatcgtacacagggaggggagagtctcctggggaaatggatacaatactatgctagaataccagggggatcaacaagcgccaaaagcaagaggaggttaaacgaataatcttctcttcccaagtaggtcttgttggtctccttaaaaccaaataaagactcataaatttagtgttgtatatgtaaatatattttctggttggtgcttctctataaatagtgagttggaattctattacgtttactataaacattaagaaatgtactagtcaatttatgcatttaaaagttcaatcgaggactggtttggaagaattcttggcagcatttgtctatgctttcaacgatgaggaaagtaggaaaatattgtgggatgatttgaaagagattgaggtgttagtgaagtctccatggatggttttgggtaacttcaatgatatcttgagcgtggaagagaggatcggggggaataaaaaaaggtagcatgtttctaaagaattcaaagaatatgttgaggtgtgtgggttggaagatgtaaaattcactagtaattttttacttggtcgaacaaataggatgccgaaacttgaatctactccaaaattgattaggttttagctaaccaattttgactaatcaaatttcctactgtcgaggtattgtttatggtagaggaagaatttgatcactcccctactttgcttttggtgtacccgaatgtccaacaagggaagaaacattttaggtattttagattttggccaaaagctccaaatttcttacaatagtttaaatatgtttggaaaaagaactatgtttgttctcttatgttaagactgattcagaaactcaaggcattaaaggtggtgttgaaagagctgaataaaaatgaatttgggaatgtgcaggcaaatgagatttgacttagacagttactgttagaatgccaagaagagctagggaaagatccactcaacaaggagatgatcacaaatgaaaagttagttcagggccaacatgaggtagctcatgagaattatatctctttccttcaagaaaaagccaaattattttgacttaaggatggagataaaaattctgtcttgtttcattctagtatctatgctaggatgacccaaaatggaacctcttggggaactctcttactggaaggaaatcggttaacaatggggtaatggctcaaggcccaatcgtaaatgaaactcacaacaacctattgttggctgattatacacttgaataggtaaagaaagcagtgtttgacatcccggggaacaaattgccaaggccaagtggttttagtagcttagtctatcaagataattgggaggtaattaattggaaaggatgttggggatgcaattatctctttattacatccagggaagctactcaaagagataaattctaccacctacactctaattccataagataaatgctgaactcagtcttagatttttgacctattagcttgttgtaatgtgatttataaaattacaactaagcttatctattctaaattgagaatgattcttcttgataccattactcaaaatcaaagtagatttatctaaggaagattcattgcgtataataccatgatatgtcaaggcttgttgaaacactatggagaagtaggaaaagacctaaatgtatgattaaattagatttaaagaaagcatatgatacgattgaatgagactttatagaagacatgttgattgctttcaagttcctaagaaaatttattcatctagtcatgatttgtgtttgaactccttgatttagtcttttatttaatggaagtttgcatgggctttttgaagcaaaaaaaggtcttcagcaaggagaccccatgtctcctcttctgtttatctttgtagtggaatatctatcaagattgatgatgaaagttgggggaaaagatgattttaaattccatggaagacgtgagcaattgaaactgaatcatctttgctttgcagatgatattttgccattttgtcacgataattttaaatagatttatcgtatgcttcaaggactcaaactgttctctcaaacatccaggctacaaccaaatgaaaccaagtctgaaatattctattgcaatatgactaaaaaagaaatctaaagggtgatggatgcctcaggttttagaagaagccagttaccattttgctacttgtgcattccgatttgtgacaaaaaactatctatttcagactgtgatgtcttgattgagaacattgtgcaaagaatcaaaggatggagttagagaaacttgtcttatgcgggtcgggcaaccttagttaattatgttttactcgctatccattcttattggtcacaaggtatgattcttccatgaaaggttttgaaaaaagttaattcaatatgtagaagctttctttggaaaggggtggactctagtgaaccggatttgatagcttgggatgacttgtgcaaaaccaaaaagaaggtggattgggattcagaagaaccaaagaatggaatgaagcagctattggcaagtatgtttgggctactgagtctaagcaagatactttatgggtcaaatgggtgaatacgatgtatataggagaaagaaattagagggcctatgaggcgctcccttccagcaattggaagcaagtggtaaaagtgaagagtaaattgatggggctgaatgcttttccaaatatactataagaggtatgtacttgataaaagatggatatgctaaattttatctaacttttcccactattgattcgcaagggaaaatttagaataaattatctatactaaagcacaagtttatgttgcgagtggtggtattagatagattgagattcaaatcacgattgtttaaatacaacatatgccaaaatcatgagaaatgtttaatttgtgggctaaatagggaaactcgggagcacttattctttaattgccatttgagtatttatgtttgggttgaaatcaacctgtggctgcattaggtttgggctacgacaaaatataccgttttggaaatattgaagtggctggctagagcaaaactaaatagatctcacgccaagtgttttcagtaatattagcggcgacagtataccacatttggtggtgtaggaatgatgctctttggaacatgaaaattgatacaatagatattattgttaaaaagattaaatataatataaaaagtagcatcaaaagtattatgtcaaaaaaaattgttacagtatggtttgagtttttttttaatagagggcaagtttatgataatgactgctaggatgtaagtttattttgtgaaatatatacttaactgattgaaaaaaaaattaaatgagctatatttattcttttagtattttttttttctttattgagcttccacttaaaatgtagtgtctcattttttgtggatgatttatgtcttttattattatgtattgtacactttgttttgattgatatgatagtattgataaaagttcaattgtttttatctatatagatagaaaatgtttgttgattgttgttatagattttccaaaacaagtgaataataattgccgaaactaccaaaatgaaacttctaagaatattccaccttatagctggagagtaactcatatatttgtatgttgtgtagatttctctaattgggctttattcttaaagacatatatatgatatttgtaatgagttatatatcctttaatgtcaaatttttgtattgctctagaattggggtatatctcatgctctagatttctctagtattttgtttggcagtgagacttattttatggttgtatctggccacaagttatggccgataactttattcaatgagattttatatagttctcccttttatgagagttgaaactactttctctaaaaagaaaaaagtatatgatatatattaaggttagaaactgaggtgtaagtaaacaaggtaataagcaggtagtactttatgacttataaatagtataaggtctttttctaggtaataaatggctgaggccgtaaaaattaataagtaggccacttcaactctagctagttaataatgagacgtactagttgttacccatttatgtatgattttatttttgttttataaaaatagtaaagtaataaaaatttagtttttggcgtgtataatgtagtgtacctccgccgtcaacacctagggcgacaggacataatccagcagccaccactgctgcagatccactagaagagcctccagaaatcttgtttggatcatatggatttcttgtagctctacaataatattaatcatttcattattgcattgcattcatcataacaaatagaggagtgctaattagtaattttctatattacaacctcttagtgaattttcacctccgaaatcacatgtcgaaat

SEQ ID NO: 221497 - DNA, 1845 bp, Cannabis indica
tttttccgtattaacgtatttttgtaaatttttttttttcaaatttttagtgcattaagtaaaaatttcttcaaaaccattgttttgtctttaacatctccctaaactttaactagtagaacataatcttgagctagttcatcttcttcatcctcatcctcattctgctcttgttcgacataattttttttttttaacagatttgatttttgcttttaatttatcaatatctcactctttctgagccacaacattagaaatttctcttttcttcctaccaaaaattaaagacgtcttggcaatgaacttgcaaagtaataaataaagttaacgaatgtcattttggaaggaatgtcattcgttaactttatttccagcagcattgacacgtccaggatgctctattgccccgagcgcctgagtgagaatgtcatttcggccatggccttgaacttgtccctgactaacttattcctccaattgagcctatagtgcacatattcaacgattatatatattaactcattattactttatcaacgattaataattactatcttagcgataatttccttatcgtaatcaatgatagattttgttttctattgtcaagatgatacaaacacggtggcgtgagggatcatgaacctcaagttccttaatctgcattattttacacaacttaaatgagtactattacagtttgatgtacattgctagaaattcgttatagtaattacttaccacatcttctctattgatatcatttctaatgtattgaccatcttcttcttcaaaggttacacttaatttccataacttgttcatgaattagttgcccaacaatgaagtcatcataacataaatcaagattctcctcatcctcttcattctctaagaatttcttttctagtgttgataaaacaacaaaccatttatcattcatcggattagaaatgtaaaaaacttgtactgcttcactagccatgatggatggatcgttcttgcttcctctcttacttaaataaaccaaagtaaaaccaagcttgttagtttttactccaacattcttttcgacccaagaacatttaaaaagtggaattcaaatgcaaagtaattgagctcccatatttcttcaataaccccataatacgtcatggtacctaaaacatgatttttatcttttgcacttgcaaaaagcatggcttctatgacgatacttatgctactattttgaatctctcgagcatcatctcttgattttgtatgaaaatattgaccccttacaatgtacacttcatgaactttactccaagaacaatacgactcaactcataggatactccatgattcgcttcgttcacctttactagaatggtattcttcaaccattgaatgaaaatttaacgatgctcgtctgcaatcaatttttatttatatgtatgatgtcttggaatccattaattgtaataactccttatagtcactacaaatcataaatgtgaaattagaatgaaaaggtaatgttgatctagttattgttcatcttgactaattaatgttaaataaaggaaaaactacctataacgtatgttatatcactactacaaaaataggttttcccgacgtttttaaatagtcgtttaaagtattcccgtcggtttctataaccgtcgcctatacgaccgtcataaaacgggcataataggcgacggttcaaaaccgtcgctaatgtgggtttctcgacggtttaaaactgtcacctataactgggtataggcgacggtttataaccgtaccctatactatagggcacagtttaaaaccgtcgcctataccttgtta

SEQ ID NO: 221498 - DNA, 1321 bp, Cannabis indica
ttttttttttttaaatatatctatacaacttcagtttctttccaaaaaaaaggtctgggagctttattagcacggatctataaaaagtgtgaatcttatttggaaaattttattagtgtgttatgtcttgttttgtttacattttattttgaagctgacatatatatgatctgtcagacattgaaataatttgaaagttgatttctgaagacttcgttgttaatttcttaactcccttcccttcctgctgaatttgatatgttggtccccttttttgagggaatttattcaacttcaatcatttgggaatttattcagcatataaattgtacctattcaatttgcaaaaattaagaatggcattgttatacagcatattggacttacttgcacccaccagtatttgaaatagcaaagcatacatacagtaattcttgtaaatagttgtttaatattttcttgttgtctttttgctgtacaatagctgcttgatattggacatttttgtatcataaacatgcttttattctctgttagaatctatcatttgatgagtgagagagtaggtggaagttcagttgtttgttgctgttttaacatatatgaaattgtattattgcagaaacctggaggtatcattgctcttctggatgaggcgtggtatgtattgatatacaagcttttatgtattttaccattggtttgtttaagatacgaatatttacattacctgtagatggtattgttttatgttgttgaggtcatgacagctcgtaattgttaattgtagcatgtttccaagatcaacaaatgatacttttgcgcagaagctgtatcaaacctataaagaccacaaacgatttagcaagccaaaattagcccgtagcgacttcacaatttgtcattatgctggagaagtaagtgtgaaatttaatatactcattgtaaaatacgatgattgtttaatcttgtggaagaggatgcaaaaaattgtacaatatttatatccatggtaacattgtactgtcaggttacatatcaaacggagctcttcttggataagaacaaagattatgttgttgctgaacatcaagaacttttgggtgcttccaattgttcttttgttgcaggcttattccctcctttaccagaagaatcatccaaatcatcgaaattctcttcgataggctctcgctttaaggtctgtttttctttcctaatatttatatcttcgggtatattggtcagatctgttatggtgacaatttttcttgtactttgtatagcaacaactgcaatctttgcttgaaacgttgagtgt

SEQ ID NO: 221499 - DNA, 2652 bp, Cannabis indica
tattttaaattagtttcattttttgaccgaccactaaacaatcaaggatggttgtcaaggggtctggccggccaaggggtgtgcccctaggctagccagcctatgcctggaaaagggattcctgaccgaccactagactaggtcataaggtctggtcggccactaaggcctgaaccctagccggacaaggccaagggtctaagggggcagccagttttcttccctctattaacctcggctagggtctcgtaacggccttggaggcatatacaactgtagccttatgtgtagttccccttgagaactctgtataaggctcagtagtgagtccattatagtcaattgtggaatttaggacttaccatatgtctaggcagggatacttaagacggtacttggtcgataattgaccttgtacattatggttaacctgaaaggtacccttgagtactgttgattagaatgtgtttgtagctttgtcaggttgctcgcctccccttagctcttctatgtaggtagctttgggtgttggataggagaggagacagaccgcataggtcccttatttattttgtaattatggccaaaatgaagcagacttgtcgtagggtgcctccgtgtgacccccatgtagcccgggtagctacaaggggtcaagtcaggattgtagacgaggctactcagtctcatattgatgttgatccagagaatgaccaggggctgaaagtctcgatgttgagtctaatcttgaagtggtggcactagctaggaggaggaggtagaagacctgtattatcccccctaattgtcccttggattgttacgatgtcgatggtaacctgctgaacaggctcgatgagccttcagtgcttggcttggatcatgtcttggatcagtcttctatgcctgagatactggatgcgagatcacagggagacagctgggtctctctcgcttctacccattctgaggatgcttttagcaagacacttgctagtggcttagtgaggggtgtccattgtgagatacctgtagagattaccgagcgcgtcggcttccccttggttgactggcttggtcagggcggcatgttgaacagggggtagtcctaccaccttatccatactttcgagacatcgctgcttactttagtatgtgcctgatacaaattaccccaacaaaaatcaagtacctttcgacggtgtttgttttatatagggagctaggctgacctcagcctactccttatgagattggatattattttgacctgaagtctactctgaagtaaaataggacagggtacttctacttcagcttgatcggtcaccagtggttgggtgacaccaacagtgcagccatgtcgaatgctggcaggtacgccaagaggtattttatttcttatggcatttggaggattggacactacgaatttcaacgggtgccattcttcaaacgctctatccccacattataaatgagggatatgccaaaccacatcctatttctctcggtggagaagagaaacattattaggtggaccagtgtggccaacttctagaagtatggtttggatcctcttgcttctggagttgtgggagcgtagggcccatcggttgagggggcttgtcctagtgatggataagttcctaacttggacgacgacgtgcctttgtccgcatagcacagaatttggagaggaaagagagggccctctattgatgcttggccaacgggggtctagttggtgatgcttctctcctgatggggcctagaagccaggcttctgagggagtggctcgccccttgcttacatctagaggtaaaggcaaggcgattgtagaggattctaacagttcctcttctaaggacgatggtatttgatagttgataaatcatctcttacattcttttcttgcatcgaatgtttatgattactttctgactttgctgctttctttttgcggatatgtattccaggctgagatatctcagtggggaccgtcagatgagcccacgagaccactgagggtcaaggtggcccagacttctcatggcagagatgctgatgggtcatctctacctcctcctccactagggcctgcaccagctaggcagccagtgatacggcccatgggcatcccatagatgtataaagagagcttttcctttcatgaatgaggagctcaaagagcttggtgatggcaagccaaacatgctctactctactggccttcgggatctttcactggtaggttgtatttttagctttattcatcttcctggcactatgtaagctggccagccaagggatttgttgcatgtggctggccggtggctggccggccatggatgtacctatgaggggctggctggccatagcagtcccaaagatggggtgaccggctactgttgtagtttgatactgattttgtcttgttttactttcagggcttgataaagttgagctcggtacatgatagctcctaggggtccttaaatgctcttcgagagcaggtgaagaccatggagcttctcttctagcgaaggacaaagccatgtctgagatggaggctctccttatggagatatagagcataattattggcttaaagaccatgcttggggccaaaaacaaggagaacaccacac

SEQ ID NO: 221500 - DNA, 1803 bp, Cannabis indica
taaatataccaataaaaaattatcacatagtgacttgactttttaaataactacaaaagttttgaaaatataacttaatattattatagtaaaaaattaaactaaaatatttatttataatcaataattaaatttatttacgctacaaattactctttaatcatttcataacatgtaaacaacaaaccctaatatgggtaaaataaatagataaattttcagatgaactatgattccttaaaaaaaaaaaaaaggtcaatcaaataacaacataccagaaaacactaattatggccctcttcattcataatctggacaatttaagctgatatatcatgaaaattatacaacaggaaaaccaacttaggacccggcaacggcaacagaaaaaatctcgaaatcatagccttgaaatgccggggcaactttaactaataactttaccctaacaaccaccacaaaaaattcttaagcagcttggaaaaaacaagttataagctaagttagtcggaaatttaggcacccgttattcttccaagatgcctctcaagcgattgggtgtgcgagaaggggttcaaatccccgttgttttgctattcctctaagatagcgcgaccaagatttgttgcaagagctagcctaaccgaactcaaggcttgttgcggtaactccacttctgtgaaatctggacgcaaccttgccatggataactcttggagtttattcagtaagaggtttgtttgtggtacggttaacaaaggacgttcctgccaatttagtaacttcaactgcaaaaagtaaatcaacccgaaaaatggcacattagatcgaaagaaaaatatttagagaatggtgaattgtatagcaaatgctcaccgaatcatacaatagtggcagccaaaaccgtggcggtgtagaagtgtttttcataagctgcaacaacattgggaaacaaaaactaatcagttaatacgaagttggcctatttcgattaagggtgattatgaatagtttgagttctcaagcatttgcgtaccgatatgagagattctacagcttgcttggcagaatcggtagtttttccaaggtgaacctgcttgagggactttttaaaatctctatacctgaaacaattataatgttagaaccaaggagataactgtaatattgattaagaaaatcattgcctgggaaatttgctagaaagataatatttcttacttgtgcaaaaattcaaggccaccggcagctttagtctcagaacccaataattcaattaagccttcccattgctgtagatagaaggatggacaatacccactggttatttttgggggaaagacttggttcctttggtaaaagggaagaaagaaaaactatttaccttgaaactttcgtcagatattgactttccaacagaatcaaacaaatgctgagcaatcctgttaaggcgaacttcatctcgagcttgctgaagccagaacactccagcaccttttctaccatgcttccaatggtacactccagcaatctaaaacattgaagagtgcactcatcttttaggcttaagtaaattatatgattcaaaactggaatcgattccaattagataggacctaggtttacaataccttcataatattagaactaacactatcaagatcatatagacggcatatctctatattctgcaggcattgaaacgaaatttgttgatcggccacagaacataacaaagaaaggtcgcaaaaaccacaaaattaaagtgtataaaaaaaatctcggcaaaagaaaagtgaataa

SEQ ID NO: 221501 - DNA, 2175 bp, Cannabis indica
aagcttgttcaagccatacaatgatttttttagtttgaaaactaaatttggtggcaactcccccttagtctataccctttaggtagagacatatacacatcttcatggaggtcaccatgtagaaaggcattgttgacatccagctgatgtaaatgccaacctttgatggctgcaagagataaaaccaacttgatagtaactaatttagttactggtgcaaatgtatctttgtaattaatcccctcttgttggttgtaacccttggcaaccaacctagccttaaacctttccacactcccatcagcattaaatttaatcttgtagacccattttgaaccaatgacatgctggcctgcaggtaatgaaacaacaatttaggtaaggttcttctcaatagcctctatttctgtgtctatagcattatcccattcagggataccttgagcttggttgaagaattttggttcaaaatggcttgaaagagccaaaacatcagctctaaatgcaggagacaacctgtggtacccaagaacctgagacaaagggtgagttgtgataaaagaagcctgaggaaaattagaaagattattagtggccaaataagagtgatattcatttagatatgagggttttgagacttttcttcctgatctagtatgtggagaagtgacattagacatgtcagaagtaatcacatcagaagagttaggtaaaacagtttcagaatgagattgagaaatacctgctgtatgtgaatcatttgactctgcagtatgaggagaagcatgaaaaaaagattcatgtgcaggaggaagacccccaatatgaacaaaagaaaaaatgtgttcataaaagtagacatctctagaaatgaatgtcatattagtgttcagatcaagtaacttatatgctttcataccaggagggtatccaagaaaaatacatggaacagacctagatgaaaacttagacctagattgactcaaagtagaggcatatgcaaggcatccaaaggcttttaagtgttcatatgtaggggctttagaataaaggacatcaaatggtgacttgttttgtaggttgggtgtaggttttctgttaattagatatgctacagtagcaacacaaactccccattacaccaaaggaatgtaagactaaaataacaaagccctagcaacattgagtaaatgttggtattttctcttaataaaagagttttgttgagatctttgcacacaagaatgataatgtataatcccaagttcattgaacaagtctttgaattgtaactcttttgacttatctaacctaactcccttaatggtattaccaaacttgttttgaacaagctttataaactgaggtatggcaatttgagcattaaaatttttgcttgatgagtttgatctaggtgtacctggaacagtcatcaacgatggtgatgaaatacctatacccttcagttgtcattgtgttataagggtcccaaatgtcaacatggattaaatcaaaacaattttcagcaacattatgattagatgtaaaagacaatttttttttgttttgcatagtgacaaatggaacaatggaatagggaattagaatcatcatgaaactttaaaattttattcaaatgatgaatttttacacaagatggatgacccaatctatagtgccacactatttcattagaaatttttgaatcagaaataaaagaggaaacaaaagcaaactttctatcaccgttttgattacaactcaagtaatacaagttgccaaactttctacccatcccaatcaccttggtcttaaaagtgacttggatgacacaattttcttgagagaataagaaagtacaattagtttgtagctgttaaagaattgacagacaacaaattgcacttgaaagaaggcacatataaaacattctcaagaacaagatcaggagttaagacaattgttcccatgcaagatatttcagtgtgtaatccattaggcaaaagaatagtctttaaattaggatcaacataggtatttttgaataagaaaggcctaggacacacatgatgtgtggctcctgtgtcaataatccaattggtactatggataaaaaaactttacttaccagagaaatgggtaaaccacaggctgatcatcagaggaattaggagt

SEQ ID NO: 221502 - DNA, 3323 bp, Cannabis indica
aacaagaggttctgagggaactaaggtcagggtggttagcatggtggccctagaggctagtttacatttccaaagtgccctcaaatcaagaaacatcattgggagagtgtaataggaaaacatgctttcagtgtggtctagtggggaatttcaagagagacaaccatcagttgaagaaagaagaaccaaggaaagaggcaatagctactccattttgggtgtttgccattactcaggccaacactgatgctaggccatctgtggtggtaggtcagcttcttttcaaattttcctttctctgcattatttgactctggagctacacatttgtatgtggcggctagagtaattgataaactaggtaagccttgtgatagttttgaattagggtttggaaccctattgcttagcaaagagttaaatatctcaaaaaggttgatttggtctatatgccgattaggatggatgatagggatttgcgtgttgatcttttagagctaggcttagcatactttgatatcattttgggaatggacttcctgtctaagtatgcagctagtattgattgcaagagaaatatggtgactttttagcctgcaggtgaagaaccatttgtatttgtgggatcgattcaaggttcccaaatcccaattatctcagtattgaaagctaaagacctattgtaggaaggatgcatatgattcctagcgattgtgatagacactagcagacacgaaacagttgggcccgaggacattagggtggtaaaagagtttttagatgtatttcgtgaggagttacctcgtttaccactatagtgggagatagatttcattattgatttggcattgggagtgacgccagtatctaaggcaccttatcggatggctctaatggaacccaaggaattaaaactacaacttcaggggatgcttgacatgaggcttacctgaccacttgtaccgccctggggagctctagtgtttcttgttaagaagaaagacaggacccttcgtatgtgtatcgactatagagagttgaacaagttaagaatcaagaataagtatccttttccaagaattgatgaactatttggtcaacttcaaggaaagatagtatttactaaaattgatctttgcttggactatcatcagctgagaatccgaaagaaaaacattctaaaagactgacttttgcactagatatggtcattatgaactctagttatatcctctagactaaccaatgatccaatagctttcatggatctcatgaattaggtattcaaggattccctcaatattcatgttatagtatttatctatgatatccttgtatactctcaatcagaagcaaagcatgtgaaacatctatagatggttctacaagaactcaatgaatgcaaactttatggtaagttcaaaaagtgtgagttctaggtatcataagtatttttccaaggtcatattgtcagtaaagatggaattacggtagatctagggaagattgaaccagttagaaattggccaagaccgaagacggttatagaagtcaaatgctttctgggtttatacggatatcatcatcattttatgaaagggtttttttaagatttccacgcccttaactaagtaaccaagaaaagtcagcgagttttgtggaccgacaagtgtgaagctagttttcaaaagttgaagcggcgattgattacagcttcagtgttagctttaccatcacatcaagaaatttttttgtttattatgatgcctcaagacatggtctaggatgtgttctgatgcaagttggcacggtcattgcttatgcttgtcgtcaattgaaggagtatgggcaacattattcttaagtataaatttatgataattattagtgtgttttcaaagtgttttaattaagtttagttttgttctgtgcaattttacgctttagtttgttaatgttttcaagtttagtaattggagaggaagtaaacaaagttgaagaaaaatgaaaaaaaaaataatgaattaagtgaggctttgtcgctagtgcaccaaaagatcaatccatggaaaaatcttgaagatttggtgtgattgaagctcttgaagttaaagaatgggagaaattggagtagcgccatggcatagaaattcaatgcgagggcgctaaaatgccgaaaacaggtagcaaggtcgaggttcaaaggtgtaaaggctggcctcaacattggaatcccatgttgaggcattggatcgatcaatgcccccttccaaaaaatcaccttcaggggcctcgacatagaggttcaatgctgcaacctgctatgtacaagtttgcgtgtggtttagtgataggggtcatgacatacccctccaatgccacagcctgctatgatgtgttagcaaaatttcagtttttaaaccctaattttgagattagaaggggacttttgacaaattggagagcagaaactttgagagatgaaaattagaagtagaaaacagctttggagactatcatcattaattttttgacgagttctttcttcttctttacttttcatgttcttaatgagttatttttatcattagatttaaaaagtagttgagatattctctcaaatgattgagagattttctcaagtggttgagatattccctcaatcggttagaagatataaatatctataaccgaatttgatagtattatttattcaaataattaaatatgatttaattaattaaataaaacttttattagatttatttattataccatataataaagttctggataacagtttttggaataagttttttacgtaatttttctaaaagcctagaaaggttttatcagaaaaacttttttctctctattacaaaagaaattgttcttactcatgtgttgagattaaaacaagaacttcatatacactttgtcctagtagcccacactactccttttgtgtggtggatcgatctggaagactccggtgtgagtttctaatcaacccaaaagaatacaacatacgaaaacaagcaaggataccttaataggcatcaagaggtaaatattcttttcgtctatttactttttgtttaatatatatatacatatggtgatttaggcatatggtacaatgataatcataaatatttctttgcgtacatcatttagtaccataaaaccaacaattgtgagaagtcaaattctaactttgatatttcaccctttcaacaaggtggaatatcgacaaaatcgagaagttttgagtctacctaatttcacaaaaaaaagcgacatctctgagaactggtgaacaa

SEQ ID NO: 221503 - DNA, 4979 bp, Cannabis indica
ctaagtgtgatcacctaaacactatataaaggagtctaaggtgctcatttgtaagagatgaagttttctatcaagaaagcacattgctagaaaaccctaaggcttgataattcccaaagctatttcctagagagttcccttagtgcttagagatagggggaaataagcttttggacaaaggtgtaataccttgttcaagtcatggtgatccccactaatctacactcaaggttgtgagtgagtgtttatatatatattattctcttgttatatatatacatatattatattacatgtgttgtaatcttctcttctacctttcatatatatatatgtaatatatatagtgtatatatatgtattgtaacatatatttaatcaatctcttattttagtccttgtattattttacaatagagttgtaataaatcttgattttcttccattgttataaaatctctaacaaatatatatttttttgatatagtttaaatgtaggagatcgttaatatggtgtacaaaagcgtatatagtaacatgaccttagttggaaattggtacaattcatgacataactacaatctttgtcgaagctgcaatttttaataaattttatgtttgatttttcatttcatatatatataaatactaaaaaatacaactagaaaggaaacttctagagatatggaaatgaggaagaggccaaataataatatagggaattagtaaaaccacctcatatctaatggtatcccttcctttttataataaagacgaatttttttgtatatttaaaatataaaatatacagatgtatacatgtgagtatttgtctattataattaataataatagcgatgatggtcctctaatatagtagtgtattaattaagaatgttgatcaaattcttcacacttgacaaattactgtatataaaatacagtttgaaatctttttgaaattaaaaattatagttttaattttttaaatttaataattgttatttaaattagactacactatatattacaaaattactaattttcataatataatttttattttattttttatataaaaataaatatatgtgtatattatattattttttttagacaatttaatataataatttgatgattaatatatatgctataaaattaaaatcttaataagattttttgatacatattattaaaactttattagattagattttaaaattttaattataatatttaataataataatagtttggtttaaaaaaatattacaacccgcactacttgcaccgtaaaaaccgatacaattgtaacatttaatttgaagtaaaaaaatagattagggaagcagaaagtcgaacgaaatggaaggtttgggttggtaattaaatatgaaaataaagggtgtttaaaaacttggttagtaagtactgataaagcaaagcaagtcgcctactgcgaccgtggactgtcattatgagaatgtgagattcgtcttgaccaattacgtgaaattaggattaatattttatttatagtctcggcaacagaatacctatcctgtgtcccacaacaccctaacattccctaaacccaaaaccaaaataactcaacccaacccttctctctctctctacattttaggaaaagcagactttggttaagctctgagctgtacaaaagccattgttatcagccccttaaggatctgcaactctctctctatctctagcgatacgcgaagcgcgtgagctgttggatcatcttcttgtcaacgtcgtcagctagaaggctgcaacggtagaccaacctctccgtctgcagcaaatccaggtaacttctctatatatgtcaatatttatttctttttttctttttctcttcgattttcttggcttccaatcacggcgtttcttgattaatttcgttctttttattgttttctttcttggatcgtgagttttaattagtttgttgttattcgagttgtggtccctccttcgattgacgaggaaatgtagacaataatttgttaagttgtgtatgtattaagtttttttttttttttttctttttctcaaaattaaatcaatgtgcaagcgttgaatttcaatggcgtaattggtattggtggcatataacttttggattttgaagaaactgaaattgcgtaaattatttgggaaaaaagattctgtgacctagcctttttatttcggttgttgtgattagtgttttttttttttctttacataactatggtgttctttggaattggcagtggggaaatggcgagtcgagtgaaggaggatgaaaagaatgaacgaattattcgtggactgctcaaacttgccgagaatcgtagatgcattaactgtaatagtttggtacgatatttatctcttcttttttatctatgtctttttaagcttcatttttatatgttgtagccgtatatttctgcttcttcttgcatgtttggaatgtgcttctttcaattatgcatagtaacgttacattgaatgtccgaacaactagattatggggtattgcccatttcgttttctttgataagcttgtccatttcttagtgaattaaattattttaatttgtgtttgttggcttgtttttgtatttgtttatccgcaacaaaaatgaaggacgtcctaatatgggtttctagttgagttagattcaccagtttcatttaaattttactgaataggaaaactactgatttaacagaatgatgaacgaaatggcacctcataaaatctaattctatataacctccaatggcactggcaacaatttttacaagcatctgctttgtatatagacacacgcacaacacactcagacacaagtggtaccttttgaattctcaaacccagataacccttggtgatgatgatttaataaagcctctggactatgttgaccccatttgaattatcatcaatgccataacagaaatatgtaggggcacgatctctgtggctttgttcgttatcaattttgtaaaagaaggaacaaaaacaatattaatgaacaaaataagaaaggtggataaggttatcctgaagagaaagcttcgttgcttatcaaacaattcaccatggaaatatattatgtactgagaattaatgctgaaggatttctctcttagatttataactatgctattgaaatttagtaattggagcaccataaaaaatttttattggattttgcattttaggttgctgagcaatggttatggatcttcatgtaataaagagtttcttaacggcttatagtaggaattttagaaactgtaacaactgttgtccacatctttcttatgatagttgtttctttttctatcacaatattgcttacttctttatgttaaacagggaccccaatatgtttgcactaatttctggacgtttatttgcacaacctgcagtggaatacagtaagttctgtcctttgctgttaaaattttctttttttatagatgtgaacaaggtgtggtttatattgtttatttatgttaaactttcagccgagagttcacacacagagtgaaatcagtatcaatggctaaatttacatcacaagaagttaatgctcttcaagaagggggaaacaaggtaagatgcatgtgttttccccagctgttggaatctttttcccatctttctccttttattgcacatggcttatctctgtttcccattgacagcgtgcaaaagagatttacctgaaagaatgggacccacagcggaattctttcccagacagcaggttttaatgcaactgcaatttttttaagtaatgactccatttcaatttgatgctcattgttcaccatgctcttgtttacagtaatgttgagaggcttagagattttattaagcatgtttatgtggatagaagatataatggtgaaaggaacttggacagacctcctagagtaaaggtaagcttattgtttcctttagtgttgagatcacatgtaaatattgctagaactagaagtgctttaaatggtctatttcactattttgcacttaagcatatatttgtatattttaatattgtgtgtgggtggatgggtttaaggtgaagtatccttatatccttttttaaatgtatattgtacagggggagaaggaagaattatatgaaagcaggagaacagattcatctcaaggagggtctagaagtccaccttatgaggataatgaccgtcgttataatgagagatcaagccctggagcaagaagttatgaggggcgaagaagtcctggttatgatcaagaaagtcggcagtatggtgattttagaaagagtcctgtccgtcctgaaattgttaatgattggcgccgggatgacaggtttggtaatggaaggagacaagacgataggagaatgtctgaaggtgatctaaagctggaaggtagatctcctgaacgaccaaaagatgtaggggcctccagtccacctgtggtaaggcctgttagggagattttaggggagaatacaatacctctccgtattagtgagcctccaaaacctactgccaggacttctgatgtccctgcacagactcaggtgagacttcttttaacagaagatgtttttactatattgatgaaaatacattattacatcagtagttgttttttttcttttaatttattcattaagatttgatggcttctctatctaggcaggttgtatataatgccttagttttttcaagataattgagttagctaagtatatgaaacttttttctttaagggatactattatcaatctaagtatataaatatagtacgtagctgtaccagtttctagtactatatttttctgtctgctagcaattaaaggctttatgtctcctccttgagtctgtactcattctgtttcttagatgcttgtatactaatttgatttaggcctctctctattaaaaatttc

SEQ ID NO: 221504 - DNA, 2869 bp, Cannabis indica
gggcgtggccccgtggactaggagcaattcgaaagagttgttgataccatgtataaaatattgtgtgtcattttattttctgtatttttactttctgtcgtatatttctgttctttcagattctgtgtttgatggaacagagataaattctgttcaaacacttttactacagttccacattatttaaattgtttgataaattcacttggtaattattaaaaatagaatttcaattggtattagagcagttcactaaactcttagtgagatcttgttttttaatttccatttattttgtttcttgtgagaaatgtctttctttacagaagaaagttcggtatctcgtccttcgctactcaatgacacaaactacccctactagaaagtgaggatgagagccttcattaaagcacaagatgaaaaagcatggaaagcaattttgtctggatggtctcctccgtcagaggaaaataaagatggtagcacaaaggtaaaatctgaacttttatggaatttagaagaagaaaagttatctagttataacagtaaagctcttcatgctatctttaatggtgttggagaatgtttcatcaaacttttttgtacttgtatttttactaaagatgcatgctatccttcaaactcagtttgatagatattaaaaggtctagatttatcatgttacaaactaggtttgataatctaagaatgactgaatctaaaacactatctgaattctatgaaaggttatctgatatttttaatgaatatttttcccttggtgagaaacttgatgattctgttttagtgagaaaaatagtacaagtacttcatgacaggtttaatgttaaactcacagctatggaagaggcaaaagacttcagtactataaaagtagaagaattgatggggtctctatgtacctttgaattgaaccaaatgattcgttcaaaggaaaaaccgagtaccttcaaggaaaaagtaaagactattgctttcaaaagtactaaaaaggaagcatcggatgatgaagatgatgatactgacatggctttgcttgcaaagaatttttagaaatacataaacaaaattagaaataagaattctaatgttaagactctaaaaggtatttcttcttctcttaaaccttttcaatctaacaggaaaaatattcagtgcagggagtgtgagagatttggtcatatccagtcagaatgtgcaaataccttgaagaggaataaaaaaggtatgatagcttctttgagtgataatgactcggagtagtgaagatgaggaaggtaatgttgctttaacttctattatgtcgaattttgtatccaaaggtaaaaattttgtgtgtttgaataatatctccaaagatgaagaaaatttagatagtgatgaatctttaagagaatcttacaagaagatgtattattcttggttaaaattttgttttgaaaattgaaccttggtaagcaagaataaagaattatcatttgaaatcaaacaactttctaaattaaatgaaaattttgaaaaagaaataatttcaaaaaatgatgaaattagtaagttgtcaaaagatttaaatgcaattgagaaaaatgtaagaatgcttaatcctggttcatctatttttgaggagataccgaatttaggtcaaaggaatcatgtgggacttcgagcgtcaaagtctcaaatttcaaagaaaatggtttttgttttcgatagaattctacctgctagtatgtctgttccaacttcttagaaagttattgcatcaactggctctgtagtgtaaacagatcggttacagctagcaggtaaaaataatagtaagcttgaaaaattcattcctacctatcatttttgtggcaggaaatgtcatattcgacctaagtattttactctaaagaactttgctaaaaatgaatttattgagagattcaaatattttaaaaatatcaaagagagtaaaaagggaaaaagttcagaatacttgggtcaaaaagaataaatgctttactggttttagttttgaatatgatggaggaggtgcttcacatttttagtattttgatagtgggtgctcgagacatatgacaggtgataggtctattcttacagacataaaaagacatgcattgtggatccgtaacctttggaaatggagttgaaggtaatgttctcagaataggtactcttaactttaaagggttacctaagatcaaaaaggtgcttcttgtggaaggacttaaagctaacttgcttagcataagtcaaatatgtgatcaaggttacactattaactttgataaagacaattattttattttgaacaaaaatggtgagaatgtgctcgaaggttttagatctaatgacaattgctataccatgttgtcttcaattatgtgtcaatcttttgtgaataacaatactgatgtgtggcatgctaaacttggtcatattaattttaaaattttgaaaaagttgtcacatgaaggtattgttcgtggtttacctaaactagtaaagaatctaatggtaagtgcaagtcttgataacttaaagcaattaaaaccacacataattaaagtgtttctaatgtaaacacttcaaaagttttagaattgcttcatatggatcgtatgggtccaattcaaattgagagtttaaatggaaaaaggtatatctttgtttgtgtggatgatttttctagatttacttgggtagatttcttgagagaaaaattagatacctctaatgcttttaaaactctttgtttgaaattgaaagttgaaaaggattgcaatattggaaagattgtgtgcataagaagtgatcatggtaaagaatttgaaaactc

SEQ ID NO: 221505 - DNA, 4812 bp, Cannabis indica
gtcactcactatgcaaggggtggaaaaaattgaagatttcactcactatgaagttcattgtgggaaacacagcagtaagttttcaaggagacccaactttacataagacccttgtgtttttaaaagctatgatgcaaacaattaaacgagaggggcatggattaattatttagcttggggctgcctccattgagaacgagaatgatgaaatacctgctgaaattaaagaagtattaaatgaggccaaagaaatctttgaaatgccaacaagacttccaccatttcaaggccacgagcattcgatcgtcttacgagaaggtacatcgccaataagtgttcgtccatactagtatccataagcctagaaggatgttattgaacaattagtggaggagatgttagctacagacattcctcaaccgagcgtcaacccattctctagtctggtgttgttagttcgcaaaaaggatgggagttggcggttttgtgtggactactgtgccttaaaccgtgagatagtacccaaccagtttccgattcttattatttttgagctaatagatgaactccatggagccactatcttctcgaagctcaatttgaaatcaggatatcaccaaatcgagtgaagccttctgatatgcataagacggcttttcgaactcatgatggacattatgagtttctagtaatgccatttggtcttactaacaccccgaccaccttctagtcattgatgaatgaggtacgttcccatctctatcaatttgtcttagtgttttttttattgacattttggtttatagtagcagcttaagcgaccatgtgcaacacctttccaaagttcttcaactcttgtccaaccacaagcattacgctcatctcaaaaaatgttcatttgctcgtcaaaaattggattatttgggtcacataattttgagggaaggagtagtgttggaccaatccaagattcaagttatgttagagtggcctaaatccaagaacatcagggagttacgaggtttcttaggcttaacaggttattatcgtaaatttgttaaagggcatagtgaaatggcttggccattgacggagcaattgaagaaggacaaatttggatggaatgaggctacaactatcgctgttgtaacacttaagcaagttatgaccatggtgcctgtgctggctttgcccgattttgaccaaccctttgtagtggaaactgatgcgtcaagatacggcgtcagggctattttgatgcaaaactagtgacgcgtggcttattacagtcaagttttaggacaacaagcaaggttgaagcctttttatgaaaaagagttgatggcaattgtatttgcaatccaaaaatggaggccatatttgttaggaagacagtttgtggtgccgactgatcagtaaagtttaaaaatcctacttgaacaaggtattgttgccccagaataccagcgttggatggttaagctcatgaggtacaattttgagattcagcacaagtcaggggtaggaaaccgagttcctgatgctttatcaagagttcaccaaccagttgaatttaaaaatatgcttgtttctcaaggtattgactgggtagcaatgcaacatgaagtgcaacaagatccgtttttaactagaatggttgctgatttacaataggggaggtcgagagtagctgagttttctttggagcatggaaaattaatgtacaaagggcatttgatattgtccaaagatagctcatttattcctactattttgcgagaataccacaactctcatttgggtggacatttaggtgagaagaaaactttttgaaggattgcttttgatttttatttggtgggaatgagaaaaatggtggttgactaggtatgagaatgttaagtgcgccaaaaacataagactatgaatacttctcctgcgggtttgttgccgcctatagcattaccctcgcttgtttgggatgaattgactatggatttcatagaagggttaccccgttcacacgacatggacactagggttgtacataaactattgtaaactgcccaacccgaataaccgtccaaaccaaactgagataacccgacaaaaaatacaaaccgaaaaacccgacgaaaatataacctgctcaatctttatattgggcgggttaaaaataatactaacctaaccaacccgattaagagagtttttatatatttatatttatatatcatataatttatatgactatttaaaaaacataaagttgaaactaatatgattttttatggtgattgatttgaactttgaattcaatctatatatatatttgtctcattattacatttaactaaaatataacaatgaaatgtagaaataaaaaaaacatattagtggtcggtttggacgggttaacccgaccaaaccgactaatttcaggcgagttactattttcttttttcttaattgggggttacagttagatttttataaccttgtgggcgtgatcctccagtgcttcttcgttaccaaaagaatgctactccagtgtcttcggcggatgaaatgttagaagagcgagatgcacagctagatgaccttaaaatgcacttacttcgagctcaacagaaaatgaaggatgtggcagataaaaacaaaagggatgaacagttttcagttgacaaaaaggtgtttgtcaagctcaaaccttatcgacagaaatccttgacttttcgacgcaatgagaaactgtcacctcgtttttatggaccatttgatgttttcgcacgaatagggactgttgcctacaagcttgcactactagccacttcctcggtgcatcccgtgttccatgtttcacagttgcagcgtgcccatggggtgactcactcttcttcattactaccaccataactcaatcctgatttggatatgatagttgagccagctgaagttttaggtgtacgaaacactcaatctaatggaatgggggaaatagaggtcttaatcttatggaaggacctaccaatgtttgaagctacttgggaaaactacaacaacttgctacaacaattccctcaattccaccttgaggacaaggtgaaagtttgggcagcaggtaataataagccatcaattcgtatacctatgctagaagatctcgcagtaattgagatgagttatttaggaaaatttatgatttgttttgccttatgatttaattggaattatttgtttctgtttttgtgataataactttgtttggaaagtttagagaattaaaatagagaggggaatgtgaggagggtcagacttttgatttgtaatagagcagtagcttttggagagaaaccaggtctctcgaatatctgggcaatttcttattttcaataaatactctctgtttctctatatacatttttcttatattttccttgtttgactcaatacacttctggtgtgtaccaagatcacccaataaaagtgtgcatgaattgcatatcggaacaaatttaaatgtagaaaggtggacaaatatactagatcaatagcaagtaaaccatctatccggttccaaaaatctaacataacttataaaccatataatcattaacagaagaagtaaccagcaattaaaaataaagtgcattgaaaaaaaaacgcttgaatcgacacatccagtgtaaaactatttaggtcattcttatttctgctttcatattcctttgtgatcatcccttaacaaaactttacagcaattactgtattcaacatatttatctcaaatgattgaaacatcatgaaagactatagactaaatggcaaatcaaagagattgaaaaagtaaatgaaaaagagttgtttgttcttatgataagaataaaaaaggtaagagttacaacatacaaagactgattttaaattctgcatacaataaataaaatttgacgacttcataaccagggttgatgatattcactttgcactttcgaaagtcattgatatctctaggaaacatgagattgtatgtctacagaccattactccacagacttgacagaatcaccacaaacaagcatattggcataaagtttagatgaaatagaataacagcatgccaaggccaaatttccaaagtaaactactatagagtgataaggtatagaaacaaaatgaatctcttaacttacccctcctttctttaaacgctctgatagaacaacaattatcataaaagctaaccttgttttgtaaacctttttaactagttgtaaataattgtagaaattgatattcaaaatataacacttgaaaacaagaaatagttcaaaaaaacaatcaaaccattacaacaaaaatctcatatttcatttcaagtcttcttagatttcttccttgcagcagttgttttgccaattcttttgccaatatctcatataagtagaaaatattgctgaaattcaatttatgctgctacaatgcaatgagtaattgagtaatatagtgctgaaaattttaacaatctttttagtggtcacaaatctttgacatgtttaatcaaatgaagaaatttacctgaggaagaagctcaagaaacttggaggtttcttccacgacaatgcctctgtcccacctctgattcagcaactgctcccacccaacatcgggcaccatagattcgccataggcaatctcagttcccacagacataacagtgatatcaggggttaacaagggtttctcggcccttaaaagttggtaaagaattgggagatcttccagttgaaaaaaccagaagagagtcagggc

SEQ ID NO: 221506 - DNA, 2238 bp, Cannabis indica
tggctacgggaatcctatttccatctccatcttctattgatagtatcttgttctgtcttcttctttcttttaggcaattatggaataatgctgagttctgatctccttcttttatccaggaaattttggctttctgctgcataaaggaaaggtaagctttgtgaactgtagcatagtgttccctggcttctttttcttcttgctggagtgtgtcatttagaggatctgtttgcagtacttcttgcctggaattgagctcttctctagctttagaatcagcggcttgaatttctgagaagccacttttgtttagttctttgaaaactcctttcagccttttctgtttggaaacaatttgcaacatcttggagcctttaactacttgttgccacactttctttacttcttgtttgtattctggatgcattgcccacattttgaagtacttaaaaggcttcttcccactttggacttcaggatacactttgataattgttggtgtatgatcaaaaaggccttcattcaagaataaagcctcagcttgctgaaataaatccacccacttttcatttgcaagaactctatcaagctttgcatagatcttatcatgaccttgttgtttattgctccatgtgtataaattcccactatattgaatatcttctagatgacatacatgaacacaatctaggaactcattgcaaacatgactcctcactttgtctcctattctttcatccatttgtaaagttgcattaaagtcaccaagcaccacccatggatcttttgtgtttagttcttttagctcacgccacaacactttccttcccatctcatcattaaagccatagacaaatgttaattggaattgtaagttatttccaactgtacaaattcctaaatgaattacttgacttgaacatttcataatacttacttggaattgaagaggattccaagcaacaattattcttccacctttgtgccctgcaatatttgttgtgaagcaccacccttgaaacatttgttggtataaggcccccaacttggaagccttaaccctagtctcgaggagaccaactaacccaacattatgatgagcaataaattgctttacttctctttgcttttgttgagagttgatccctcggacattccagcttaagatcctatccattaggagtaggaggtcccccccccctcccctcctatgaaactctgtatttctgctacattagttatctcttccccattttgttcttgagtcatcagcacctggaactgattagtgactttggtggcacttttttgagttttttcttgagttttagcccctcgagcaaccggttggaagtcctcctctgcatcagcattttgttgcacctgatcattcatttttctgttgtcttttttaacaatccactcaggatgtttgccttctttcctcctacaatctgatgtttcatgtcccatacctttacaatgcttacagacaattggtttccactcataatcaatggaaactgaaacattagccccaaactcatcctcaaattctataaggttcggaaattcctaatgaattgaaacctctaatagaactctaggaaaattcagtttgtctctttcctttgtaacatcatcaaccattaatggtttttcaacttgcccaatgatcttgtacaacgatttctgtccccaatacttaaattaattaaatattaattaaatataatttttaacataaatataattttcttatttaattaaatctcttaagaaaaatatcaaatatttaagtgccttgaacaaatcaacttaaatattaattttctatttaattaaatatatctaaaaaataccaaaaagtctacttagaaaataactatctagatatttcataaactaactattgattttctaattaaaatatattttactctattcattttaaaaaataaaaaattacttgatttaagctgatccaaaattaattaacaaattaattttcaacttaatctaattttcaaaatttaactactgttaatgcagattttcgttaactaaatttgagcctcacggtaataattccacagagaaaaaaataaaagttatagaaaaataatatatatacacagggttttttacgtggtttgtagttaaaattctgcatagtccacgagtcaatcttattcagatttctgagtatttttttttaaggcctctttcatatgagtt

SEQ ID NO: 221507 - DNA, 1345 bp, Cannabis indica
atttattttcatttctttctcaggtattaagactcaggttgcagccgttgagcaatcgagtgttgcttctgtagctaagaatttggaggggcctgtggttgtggtcactggggcttcgagagggatcggtagaacaattgctcttactttgggcaaatctggttgtaaggtctctaatcatcattattattattattgttattgttattattattatgttcgttctaaatttgattctgtgaaatgaacaatagtaactataaataaccagttagtattttaaattgtattatatatcatatttttatatagaattatgtttggcattgagttgtatacatatacatatacacatctacaatattttgatatgaatcaaaatttcatatacttttatacaattatatgatatacactgtaatttaatataatattatattatactatttaatacggcgtataaaacaaatcctttaaaatcttttacattaaaatgggatatgttctgaatattctataattactttacatttaaattaatgtgtttacttttatatttggcttgttgaatacatttcaaaattaaattaaaacaaatagttgaataactaagaagacttaacaaataacatctcgaaggcttcttaccaagtgtctgcaagtatgtcctgagattacaatatttttaactatggatgaagtaatgtagctgagtttcctatctattgagtgaaaacaagttctaaacttccttgtaaattatggccatcataaaacccttgtaaattttctagtgcatgctcagaatcttactttgctgtgtactgtaatggaagattttttgttttacctttttgttgttagtggttatgagcttcaattactattacaggtacttgtaaattatgcaaggtcatcaaaggaggctgaagaagtttccaaggaggtgtgtttatagccattttgacatttgattgtagtctctgagtcctgaccattcttttgtgttcaatcagtttgttctttcttttccatttcattcctgatggtgacatcgatttaatatttctgtgcgcctctttctatttttcagtcatttaaaaatgaaatatatacatctataaatgaaagctgttccagaatgttgatcatgtgagatagtattctgaaactttactgtgttttctagattgaggcacatggtggtgaagctcttacttttggtggtgatgtctcaaaagaagaagacgtagagttgatgatcaaaactgtaagtaaacctcctttggctttactataaaaggaaaaaaagaaaatctatttgcaggtaccctcaccctcactt

SEQ ID NO: 221508 - DNA, 1290 bp, Cannabis indica
aatcagaaaagttatatcaaaatctattgtgaagagaataatagatataattagaatttgatcaaggcaatcatataatcaaaatgggaagaagcaaaaattcaaacttatatagtttatatttagagcatttaaatattttattaacacttctaaaagtaaaactgaaaagagacaaacaagttcaaaaaaataactccatgtataaagcaaccaacatttcgtctggtatctaaataaaatttgtatataattgccaatgaaaatagtcctaagtataaaaatattattagaaagtaaaaattgaacaacaaagaataagtttctctatatggatcatttcttctcatatattaccatttcttctcatggaatggctcctttaatctgctatgacattatgcagattttataaacttaaaaaaaaaaagagtattggaagagacattggtattattttctcaacaaatgagagcaaaaacacaactacttcccaagtgttaaaaggaaaaatcataaacagataaagtctacaacaaataaattaaagtaccattaaattttaattacatttgtctatatagtatttgacaactaaacaatacaatcgaaaatgaaacttgggggaaaatgaaagaaaaaagtaatgaaatatggtcatcaaaagctcaattcaaacaaaaacaatatagtggatacaactatatcgtcccctaccctcaagatcccaacacctaccaaacgatcttacactaacacccttgtacagaaagaaaaaaaataccaaatagatatattgattgataataagttaataatgacgagctgaaaaaatacaatcacaaatctaaactttccaaaatctcaaaatcattatttacaaacatcaagatttcaaacaagaaaaaaataaatacataaacacacatatatatacaacattttgagcaaaaaatctatataaaaatagaaagaaaatcaaagaaatggatgacttactgtcaaagaaaaataaagaacgaagatttgggtgtaaccttcaaatcaatccgaagcataattatagaacacaattatgattactcaactctactacaaaattacaaacataaacaatacaaagtttgtttacaaaattctaaaggcctgagaactgagactttttcctaaaattagaaattaatatattatataaatatatatatacctgaatggaacagagagggggtgggctaggccttcgacggccgattcggtcgcaacgccgatcaaacagagagggtcgaggac

SEQ ID NO: 221509 - DNA, 2636 bp, Cannabis indica
ttaattattcaaggttataattgtaattttatcatcaaatttttaactaaaaggactattttgttaaatttttttaaaaaaatggacatttattaacttaattgttagatttaggaccattttacatcttggcccgtttgtaagtggcatgtttggaagtaatacaatcttatctgatttataaaatatatatatatatatatatatattataatggacttcatttgctctaatttttcatttactttaatcccgcattactattgctagtttaggtattcatgcatttaataattttaatacaatatgagattaaattttgaatacacactattcacaattttactattgctaatttatgtattgacactttaataatagtaagacaaaataatatttaaattttaatacaatttttatagaaaaaaaaaagcatatttttatgatgtacaatttttattgcaagcgtacaattatttttttttttttttgaacaaaagaaacttttttattctaaaacaggaaaacaatacaaacaaaaggaactcaccactcccagacccttaccagcccttaataacacttattacatacatttcatcttttttcttaatacaattttgtaagcttaaaattctccacttcacaagaatcttgatctctgtacaaagggaaataaccgagctacatataaagtcaaaaacacacctatttctatttttccaaatcaggtaaacagtcgctgtaatcacagagttaataactctgtttctcagatcaataaggggcttcaagcaccaggattttagctcagcaatgttgttcggccactgcagaaaacccagccattgactaatctcttttatcacctttttagagaagatacagttagtataaatgtgatcatgagactcttcatgtaattcacaaacagggcagagtatgttgggaatagacattatgttgctaaatttatctcttgctaacaactggcagttgataactttccagtaaatgtacatgtgttttggaatacaaagcttgtgacacacattggcagcatacttaactttcttggcatctaataaggattcatagaagcatttaactttaaagtacaagctttgctaaggtcaattttcacgatccagcgcgctaaaatgttctttctagtgtaacctttcaacaaatcttgaaagatgagtaagttatgggctaacaatctgttcttaataaaagccccttgattgtcattgaccaagcacgtacaacaaaatctctgacagtctagcacataacatcttcgaaatacacttatagagagtgtgttgcaacaagcagtaggtctgtagtcttttacatcagtaggattttcaaccttcgagataagagaaataactgtttcatttaaattcagaggtaacttaccactctagaagaaatctaaaacaacagcaaaaatttcctcaccaatttctaccccaaagccctttgaagaatcctcagtccgaacccatccaatccaggactcttggtgttatgatttccgaaaaaagctatttcttcacatctttcttgttgaaaggtctgatcaaattgatttgattctccaagttaaggcaataaccatatagccaagacactccttatttatacctctagtaattaaacttttcctccccattatacctctaaaatggtggtttagaaaatgttcaatcattttaggataatcatcaatcgcaacatcattctcagtaaaagttgtaactctattctcaagccttttcttcttcatgactgcatgaaagcactgtgtgttttcatctatacatttgatccaatttttcttgttttgttatttcaggaaccaagtgtagctcttcaattcattatagtaggttcgttgcatcattattttttcctgttgcttctctatattacttgggtcactagccaggtctccttgcactttgcttagattctcttaggcctcgctgaacttagctttcacatccctaatccccttgctgaatttcttaagaacatgattcactctatagagcttcttcgataggttaatcatgttaccgttcctgtcaactattccccaactagctacaattgtctccttgtaattattctgtaacattcagtgattacagaattgaaacggtttgataccaccagtgccaaagtcatgaagcttcacaatgcaataactatggtccgaacagggatcccatttaaagcaagcctccgtacaagcgtacaatgttgttatactaaaattttaattattaaaatattgtcaaacccacgtgaatttattattaaatttcactagttactattattttttttttttttagttttatgctttaataattagacaattcaaagtaaataataattaagaatggattaatataatagctgaaaaaagtaaacagataaaaaaataatttcaatcaaaaaataaagatttagagtattaattttcccatttcaaactatgtatatcagtttaattactaatcatcccaatttattttataatttgtagtttcaagaattccaatgtaatctttaacctctctccagtgataatagaattgactaaattaactaacaag

SEQ ID NO: 221510 - DNA, 1585 bp, Cannabis indica
tctctaatgagagagagatagagtcttaggcatgtagaggagaggagaagagtggagttatggtttttagacttagagttgagagcgtagggagcttagatgcttaatgacttagggttttagagttaggctagtgctctttatatagtagagcttacatccctaatatcccatagatataggtaaaataaagctattctttacataattaattaatagataatgactaaattatcccttgtagatggggaagttactgatattttcccctattttcgtgcactgtcaaggcccaactcataacttggcttgttgtccatggatgaaggttacgcatcgaaggcctgccaggcaaaagtttgtcaaccgtgcacctacaggatgcaggtgggtcggccatacaatgtttgcaggttgaggtttggccagccatgctcctgctaggatcttgcaggtcatgtttttatcagctttggcaagtgcaggccagcctttgtaggtggagtccaacatttttaggtggaagcaagcctttgtagttggaggctaaactttgtaggtggaggccagcctttgtacaccttttccttgcagaggtcagggtttcttggtttgaaagtcacctttggtcagccagcttgtgcccaagccctggctggccatacaagctcatcctggctgaccaatgtactccccttggccaaccaaacactactacaatttaaccttttagtgacactatatagtgattctcacttttgtgcgcatcactaaatagttaagaataatttttagtgacgcgcataggtagactctaaattttcggtgttagtctctcatattgcgcgtcactaaaaatatgaagtgtcactaaaaagtattacccataatttttaatttttttatttattagaaaaactgacttatagagtcacatcaagagtgactaggaaaatgtatccccacatgctttgcacgtcactataggtatttttaataaaaaaaaaattgaaaattgaaaaggcacagtaattggttggaaattgtttctctacatagatattttcaatattttattctttttatatttttttattgaaaaattatttagggtaataatttcaaaaccctaataattgtctccgtctctctctcctttctcaatagcgctagccctctctgattttttatttttttttatctcatctcttctctctatctcattctctccaaaaccagccatctccaaccctccatggaagaccacaaccaccaaaggcccaggcgagctccacccatggatgactgggcgtctaaccttcgagccccaagccgattccctctactctaccaccgtaagtctgacttctgtgtcacccaaacacccactattaatcagtacatttttttccatctgaatatttgtctctccctctctctacatgtgtctttaatctatgcagttgaacaacatttgaaggtcatcgtgggtctcaccttcaatgtcgtttgtggtactgtgtacacgattgacgttcgtgttctaagggttgggttcgacgggctttgtaaagaccgcttagtt

SEQ ID NO: 221511 - DNA, 2232 bp, Cannabis indica
aacaagaagaatgtaaaagacataggagattaggagatgtttgatttataataataagaattgtagcggtaatcaagtatccattactttgtttctttttactttttaagttctgtatctcattatatttaaagtattttcaacttatatactaaatttagtgtcacactattatcaaatttaatatcaaaaactattttcagttcaaccacgacacgaaaatttacactaaaaaattatattttataattatattaataaaatatattatattttaacattaaataatgaatatatacacaaatcaactataaaatatcaataaaaatataattgctacagtattactgcatatatgcagtacactccactgtagctaaaactgcatatataatgatgaaataatattacgttggagtgatatttctactgcaacctcaaatttaaagtctcattggagttgctcttacacttcatcacaaagctaatataaaattataataaagaaaacacaaaaatccattctattctttcatttaaatatttgataattataaaaagagtaatttacgacataaataacgaagtttaactcctggttgcaaataaatacctaaatttaatttttgacggtaataatacttaagttatatttctggaactctgtaggtacctaaccattaaatgttaagtcattatccatgtatcattttttatttgtatatttaaactatttttttaaaaaaaagataaaaaaatttaatgacttgaaccaatcaaggattgccacgtagcaatttaattaacacttaacattcaggtaactacagaagttctagaattataacttaagtattattaccgccaaaaattaaacttaagtatttatttgcaacaaaaaattaaacttagatatttatactacaaattactcttataaaaataaaagtgatagagatattttagttcatatatattttattctattacatttatgcacaaaatcataaattttaattacaatactcgtttcaacaacaaatcaaatattataataaattctcaatctcattatgttatactaaattaaacatcactttagtggtactggtgattagttcctttagtatactgtatattgtattatattatattaaattaaattatataatattttaatttatattaaaatagtatatatttatatattaataaaaataatatatttatataattttacataaaaaaaatcatataaaatataatttaataccacttaatatgaggcaacaaatgaatccgtatattggtaaaattaaaagttgataatttagtattcatttaacatgtgggagttataggtgtaaagattgtttggtcctaaatttgtaattgtagatagaatacaatacaaggccaccaattgaaatgagctccagcacagagccacgtgattagaacacgtggtgaacacatagcatgcattattattagattttttttttggtggatgtgtgtggtactggtaatttatacattatcaaatgaataaaaagaaaaaccttttcagttttcagagcttaatttcaaccaatcaaaccgttgtaccatgttttatcttcaaactcattgctaaagggaatatctccaataaaagatgtagaaaattaactgtagtgtagttttgtgatatttttattaactaaaagtaataataaaattttacatcatgctatgttgtgatttgaatttagatcactttttgttatgatgtgacatattagtatcacaatttgacacactattagagtagagttttaacaaagtgagctatattttacatttgcattactcatttatattggagattcttttacatatatatatatatatcagtatacttagtactttctttaatgttatatccctattggtataattgagtatcacctcccatttaatttaagataataacttttagagaatatatttaactaatcacagaacaacacctctaagtagtgttaggcacatattatcaatgtgttacctaacaatgaggatgtcttatttatttatcttacaataaattctctatgtttaaggtaactttactaaggaccacaaagtatagcccattattattattattataaattttttgaaaaaagtactttttttatatatatttaatttacaattttatggattaaagtttttatttataaaaat

SEQ ID NO: 221512 - DNA, 2414 bp, Cannabis indica
gaaacagagttttatttagggcataaaacccaacattaacacctcccctcaaactcataattgaatggtcttcaattttgagtttgctcctaagagtagagaacctttgactggatatggctttggtttgtccatctatgagttggtcaaatgtagcaacatgtttgatgtgcaccattttattcagaaccttttccttaacaaagtataagttaagttctatatgctttgttctagcatttaaaaacagggttctgagtaagcattatagtgctaagattatcacaccatatagtagggggttgaggaagctgaatgtgaagttcaaaaaataggtaatggagccaagtgagttcagatgtaacattagcaacactcctatactctacttctgtgctcgattgagaaatggtttgtttcttttttcttttccaagctatcaaatttgatccaaaaaaaatatagcataaccagaagtcaatttcctatcatctggatctgatgcctaatcagcatcacagaaggcaacaagatcatgtgactctggtttggtaaaatgaaggccatggttcattgtaccactaacatagctcagtattcgtttaacttcttgccagtgtgtggacagaggtctttgcataaattgacacactttattcacattgaaagatagctcatgccttgtaattgtgaggtactataaagcacctacaatggatctgtacgattgaacatatgtaagaggttccccctggtgagatgataagagaagtccacttgtcaatggtgttggagaaggcttggatcctagcatttgagctttgattgcatttggcaaagatggataccaatatttgtgaattaacctcaactcccaaaaagtacctgagggaaccatggtcttttagagaaaattgagtgttgagtttggtaaccagatcagtgacagcagcctcatcacttccagttatcaaaatatcatcaacatacacaagaacaagtgttgttgactgagatgaatgatgaataaacaatgagtgattagactttgaggaaataaaaccaactgaaatcaagctgtgttgtaacttatcaaaccaagctcaggtgcttgtttgaggccatataagaccttgttcagtttgcacatcagatgttcttgactaggaatttcaaagcctggtggttgtgtcatgtagacttcttacaaatcaccatttaaaaatgcattgttaacatcaagttgtctcacagcccaacctttggacaaagctagagttaacacaactcttatggtgattggtttaacaacagggctaaaagtttcagtaaaatcaaagcctgcttgttggtgaaatccttttgcgaccaatcgatctttgtgcttgagaacgctaccatcggggttttcctttctcttataaacccatttgcagcctatggcttgtcttcctttaggcagtctaactaaaacccaagttctatttctagccaaggctagaacctcatcactcatatcattattccaacactcttgttgaagtgcttcctagagtgatattagttcccttaaggccaagaatgctttcggtttaaacactcccaatttagacctggttgtcatcttgtgtgaattgtttctgccaggagcatataaacagccaatcatgagaggtaatacagtaggagaagaacaagcaggtagaggcctggtatctagtgtgacagacactctctacgatggagaagtgtgtgtagtaggtgtatcagtttgaccagattcaacatattgaggttgtggtgcatcttgtagaataacaggcaaatcagcagtagcattgacaggtaaatcagcaataacataacaggatcacctacatcaaaggttgagggctggtttggaaaccagctgttagcagtaatatcataaggatcaaaattaggtgtaagattatcaagtaaagcattttggtcaattggaactgttaagactgcagcatcaggaatttcagtgtttgagttcatgactggttgaactaaatcagtcattgtgtaaggctgtttcaagtgagaacacacaagtatcaatactaaaataaaggatggaatctctgtggtgttcctagtaacattatgactaggcatttgctcatatgggaaagaaaattcatcaaacaccacatctctagagatatataatctacctttggaatctaaacacttgtaacctttgtgattaagattgtagcctattaaagtacatggggcagacctaaactcaagcttgtgtttgttgtaaggtctgatatttggataacatttacaaccaacattctaaaggttgtgtaatttggttttgtgttaaataatgtaatgaccgctctagtaatgtgggttagtaaaggcaattagca

SEQ ID NO: 221513 - DNA, 1024 bp, Cannabis indica
caatcaagcgaagtccagaagaagaaacttgaaagtgttacttttgtagaatgtctgaatacttgcaaagattttgcaagaagtacaagaagcagcaaggcttcaacaaatctcacaataaagataggaagggaaatagtcatcatcaccacatgaaagattcggctgcaattacggaggatagtgatgaatgctcaacggatggagaattgttttctatctctaaatcttcaataaatagggagtggattcttgactccagatgcacttatcacatgtgtccaagtcgagaatcattttttgattataaattagttgatggaggtaaagttctaatgggaaatgactattcatgcaaggtcattggaactggaaaggtttccatcaaataatatgatggtggaattaaagtgttgacaaacgtaagacacatttcaaagttaagacaaaccttatatccctgggtgcgcttaaagatgagggttacagatacaagtccatgcacggaagcttgaggatcactaaaagttcgttgatagtaatgaaaagtaaaaagatcaacggtttatacattctctaaggagaaactatgccagtcagagaagtaagtttggtgaaagggcaagaattagatatgcagttgtggcatcatagacttgggcatatcggtgaacaaggcctcaaagaactacacaaacaaggtataattgaaaattttaaatcttatgccttaccatttgtgaagcttgtattttaggaaaacaacataattcactccggcaagacacacaaataagaagaaacttgaatatgtgcatgtcgatctttgggggccatacaaagttcctactcactccagcaagcaatattttctttctgtagttgatgattatagtaagtgtgattggacttatttactagcaactaagaatgagtgcctagaacagcttaaaatttagaaaactcaggtagaaaaccaaaccgatctaaaagttaagaaccttaggacagacaatgggttaga

SEQ ID NO: 221514 - DNA, 1781 bp, Cannabis indica
taaatatgttttcaaatatgtgcatttttaaaattgtgtttttttacacatttttttgtaattatttaaaaaatatatatatatttatgtaaattgtcctttattttatggtagtaattaaattcaccctcacacatattatatctctatatatattatacattaataagaataatgtgcactcctgctttttaactgcttaataaggaaattaattaaaaaaaaggtatgtcaaagttcctgtattatcaacaagtttgaaaagtcaaaataacattatagtttaattaaagttattttgtcctatatttgtcaaaaaataataacatgcaaagttatattgtcccacttaccagcttcttaatttatttttgttttaaaaaaattcaatagctatgtggcaaccctaaatcatatctcccatatgcatcacctcaacttcacaaattatatttgatcaactttcaataatgctctgcataaaaaaactttcaagaatacttttatcttacaattttgttattataaataattgattgtcaagagagtaagagtgatagtaaaatatagagaaaattacacagattacagatattttaaaattttgtttgaaaaatatggcacaatttagttggcccactttttatgggctttatattgtgattttataagtgatcctcttatgtttttgggtattttaatttgtaacatcaaaaccaattttaagtaaacacttttagtattttattcagctaagtcagccctacaagtttatacaagagctgaaagtggatggtaattttgatagaaattttggcttttgaagagatatgtgaaatttgaaagtccctcttaaactcaataatatattatgaagagcgatgtctaattatcttactaacaagattttaactttaggttttggtaagacatgcatgatgttccttcctccttgtccaagtttcacattgtctggcctttaacatgcttggcgtttgtactttgtcaacatattcagatattgacaaattatctttttgaacatgtgagaattggcctttgagttgcaataggcgcgcacgagactagcttaagaatttctgctcaagagctctccaaactatagagaaagtgtgatgattttaccacagaggcaagaaactccttcagtcatggaggatttgagccacgagaaaaggaattgatctcctttttttccattgaaggtagacatggttgacagcacatgtaaccaaggtttgtgtgggaggaatgccaggaaacaagattttgtcgaggtcatgcccaatgatagtacgaacaacttgagacttccacgacagaaagttggtacgatcaagcttgatcatgagggaagaagataacgaactagagaacggattctagattgagggtgctgaaataaaagattgagacgagttttcttaagcaatttctttgcctattgacactgtaggaccaaaggaattggatgactccattagaagtaactgactaccatgtagtaagtttaactataacttaaaaaaaaaaaggtaaaaaccagaaggtgcaaccaacaaagaaaaactaagacaaaacaaaggaaaaccaaggaagaaaacaagaaaagcttaaaggttgtttggcttcataaaattgaaaacaagtttttaaaaactaatagggttcatttgtctaaatttttaaaaatagtttttctaaaaactgagttttaaaaaattaaaaaacaaaaaacatcaaaatgttgttttcaattt

SEQ ID NO: 221515 - DNA, 4877 bp, Cannabis indica
atagcaagatgtccaagcagagtcgttggtggacatccgactagctcgatcgtgtgatcaacttgcatgcaccggtcatgaaatgtgagttgctaattccagcagtaatcgatacgcttcaaacttgcatatcatgaagcaatccctacttttgtgggattaatttgtatcttcagagaattaaggcaattaacctagatttgcctaatttcttcattgtaattataaaaatatgctagtttcctattttatttcttatagattaaggaaaaccatttctatgtaattagaccctataaatagtagtctcattgcactattcagggacacgaaactaatcagacgaaacactcaagagaaaaattacgatctaagagtaaattactcaaagatctttgtaagagctttcgagaagtaatacttcattctttgtctcacaagttaatacaactaaaaggggagtaggttattactactatcacggggccaaacttctacaaatcctggtattttctttattcattattcttttctttctactacttattcaatctaattgttttaattaagactcattagcgttggctagaagtgaggtcaacatgtaccacttttgaaaatacaaggtataaattgtcatttaataaattagagagctcaatcaataatttttataaaacacatgctccaaaataatatttgcttatttaaaagtaatataaaatgaaattgtcatagcatacgtttattgattattatatttttttcaaaaaagggcatacattaaattattgaattgagagaaggcatgaggcacaataaaattattaaaccctatacaataatggaactctttgtaggagattttattttttaaaaagaaattctttatttgaacttagttttgttgatttcttgaagagaatttgctaaaaggcgtcactgatacttaatactctcattagtatcatactgttattgatataattaagtattgttcacatatactttaagaaaatagtttttagagaatatcgctaaccaatcatagggtactacctatagaaggtgatgtgcattactggtacctaatatcaatgctctttcttgaattgtactttttacacgccactgtgttggaaacttgtattgaaattcatttggtgctttggaatgctaggtaccttaaggtattaagtatacaagatgtgacatattattattaatgtaatttatcattagaactcatatattttaattaaataaataatataaaaaattgttaatcacttttaacagactatagtggtatagtattggacaccttaaagtacctactagcaagagaaatgtcaaaaagcaccagtgctgcctagtactgttcttgctatcaaattgatgcaattaagtatcagatcacatataatttaatataaaaacattgaagggatatcgctaactactcgtacaacgccacctgtagaaggtgctaggcatcactgatacccaattgctatgggcaccaaggtgcctagtacccctatgagatgacactctataattggttaacaattatctataatttttattaaataaaaataagtgaaacctgatattaaattacaccaatagctattggtgcaattaagtattggatcatatataatataatataatataataacattaaagagatattgctaatcaatcgtaaagcactactctataaggcgttaggcaccactagtacctaatattaatgctcttaatggggcactaaggtgcctagtaccactataagatgacaccctataactagttagcggttttttataatctttattaaattaaaataagtgagacctgatattaaattacagcaataataatagtacacctcacaaaatcttaagtaactttgatgccctttattttcctaaggtggcgtttggttggaggcaataaaatggaataaaaaggaaaggaaacaatttttattctattcttttgtttggttgcaatttaaggaattggaatatcattccaacagattggcctttctaccattttggtggaatgactataccattttgaaatgaaggaaagaccattccaatgcaagaattaaaaaatttaataatttttcttatcaattttttatgcattttaaattttattctattccatttctattctaattctcattttcattcctataaattatattggaaagagagtctatcttggactctagagcttgaaaagaaggcccatcatagttgggcgcggtctgtactttgcgaataagggttgcgctttaggcattgtgagcccagctccttcagtcatatcaaccaactcctcgccacttctctcccactgaaagcactgaataaacgatcctactgccaaaccaactacacgcatcgccaagctctcgccgggacaacccctccttcccgctccaaatggcagaaatttgaaatgaaacccgtccactccctcaacttggaatctctccggcttaaacttttctggctcgtcccaaattttggggtcatgttgtatggcccacatgttcaccaacagcatcgtgccacgtaggacgcgaaatcccccaacggtgcactcctccgaggactcgtgcggaaccaaaagtggatcagctgggcatagtcgaagggtctcatatataacgccccggaggtacggaagtttgagaagatccgactcttctatcaacctgttttgaccgatattcgcctcaatttcggcatgggctttgagaagggcctctgggttgttgagcaagaggctcattgcccattccatggttccggcagaagtatctgtacctgccgatagcattacctgacactaatgatattagtaagattacaagaatagagggacaagaaaaaaaacagagtaaagtccaaataaaacagactcactagcagcatgcctcttatgaactcgtcagtgtaatatccgggttcagtttcttgtagtgataataaaacatcaatcatggttctctcttcagaaccagaatttgtatttgtttttctatgatgttcaatcaaatcctgcatgaacttatccctcttactctgtaacgacaccaacttcgtatccagtccgcttaatccaaaatagttcaaaacaggaacaaagtctccaatgttagtggccccgctcaagcgaaacgtctcggtcacaatttctttgaactgactcccttccacttcggctgcattctccccgtagtatctctttcctgcaatcattctcataacaatattaagagtcaactcgaaaaatgttgacttcatttcaatgttctgaaatttatcgtcttgacagcctcgaaagagttggcgaaccgacgaccttgtctcagataagcgcaccccactaaacatgttgagtctgttcgacgacaataactcgatggaagctatgcgcctcaagtttcgccagtggggaccataagaggcccaggtcagtgtagaatagttatagccgaggtgttttcctgccaacaaagtaggacggttagagaaagtgacgtcgtttttggtgaagcattcctctgcggctgaaggggaagatatgagcacgacgggacgggaaccgaactggatgtgtataacgggaccgtattggtggcttaacttggcaagtgttcggtggagaggtttctttaaaaggtagaggtgacctataatcggtaaggaaaaagcagggcttggtgggagtcccttgttcttctgaagcaaataaaattttaggaaataaagagaaatgaacaggaaaaggtagtagtagaatggtgcatccatgaagagagattgtctgcaattctgtgagatatatctcacatatatatatttctatttcttcttacttagttactaactttactatgatgtttttatagcaatgtacgaaccttttggtgctttttaatccctccatttgagatatttttgatgatgaaaggtacaggtggttaacgctagtcacaatgtgacaattttgtcaattttaggtactttttatttgattaaatattagctgcgagtcggcctagcctagctcagctagaagtatcaacttcaatgtgtaatttgtctaaagatgcaatgctgcaattgattatgattgaatgttatttggctgacgtgttaattatgccatgaatgttgcgttctgtacataccggacatatatttaatgaaagtgtacgtcgcaggattgagcctaaaagtatatacctttgtctctaagactaattctaatatttgaatatcgatcacaactgtatctcagtatcctagcaaaggaataaattgtttacaaactgttagaaatctgcagctgcctaacaccactcaaaattcattaatacccaatatagggattttggcctttttgcaatatttcacttagtctatgcgtcatgagagtaaatggtaggcccaaactaaacctaagtggagctcaaagccaaacccaactctcacactaatcccaaaagaaacctaatcagcaggatctagacttatttgagtcttctctttcgtctcttcctctttctctctcaaagaaacacaacctagggtttctaacacaaagtttttatatgatctatcagattaagcacaaacacacacacaacactagaaaagatgagatttagagtttacagaaaacaaacaacaagtaaaagagaagaaggcaccagatttgacctctgttgagaatcatgaggttccattttaaaaccaattggtaataggaggagtagcccatgttcttttatatggctcaatactttactattttttttctcatcaatcttgaaccgtatc

SEQ ID NO: 221516 - DNA, 1465 bp, Cannabis indica
gaatggtggctgacctattcattacaaaggaaaaaaaagagaatatttgttaaaaaagtattgctaattatatatataaaagaaatcacctaataaaacaaaaatatattagtaataatatttcggagttttttttttaattatttttatgaaccatattttggaattattatatagtttgtaatgaaatatttggtctattgctaaaaagaaagaaaaaaaaagaagaagaaatatgtggtcttttttttttttgttgaaaaaaaatatttacaccatttaacactttcgaagacacataatcaagaactacaactgtatcataatattgagaaaacataatatggaaaattttccaatcaagtaataattttattttttatgtgtaatgtatatttagtgaaacaaaatgtaataaaattagacatatactaagaaagagagataaaaaagatttaaaattcttaaaatacatccacaaaaattaagagtagaatagagcaatctactaatgatgtcaagctctatgaatctaaggaagaaaagcctttagaaaagaaaacatctcttacatctagaacttttacactatatagaggaacttcatttttcttaatataccaaattgaaagtagaaatctaacccacacttattttcactaaaaaaaaatagaatatagtaaataacataatatagaaatttctcagaaatataaataacaaatgctctataaagagaatgaacaaaaaaaaaaaaaaaaaccaaacaaacatataatataggttcaacaccaattataaaatcaattaaatatctaataacttcaatcactacaaaaaatttagatatcaaaataatacttagtatttttgctaaacttttgatactgacgtgcccctaaaatatacgaattttctctaaaatataatatagttacataattatgcatcttctattaagttctgtttcttttcttattaaaaattagtatttttactttttgaattttgaccaatactaaattttacctctttttattttaaaaaattaattttaaaaattataattttttattaattctaaaaaattaaattgaattattgaaagacttgataaaaatattaaattaataaaaatagtattaagtttacctaaaacacccaaattattcctacaaaaatatttttaaactttattttctttataaacacatatattaaaaattaaactaaaattattaaaaatctaataaataatttagagaaattctacaatgcacccccttaaaatggatacattgatgcaccctcatttgttttagcacctgaaataattttttagtcaaattttttctcatggtcatatatgttatagttatttaagacatcctataaaattttaaaaaatttggaaaagtttaacacgctgaaaactacgttcaaacagtgtattgcacgcgtgact

SEQ ID NO: 221517 - DNA, 1572 bp, Cannabis indica
aaaaaaaaaataatattaaaaacctaaccagtaatttttttttaaaacctaaccagtaatttaactaagcatttccacaaaacatgcataacaacactcttcacacctgaaagtcaatctaaatggcacaattgctcgcttaaaggtccatcttgttgccaaggttatgctcaaacttatggagtggactattgtgatactttttctcctattgctaaactcacatctgtttgactgtttatttccatggcaattactcatcattggtctttgtattagcttgatattaagaatatttttctacatggagatcttgaggaagaagtgtatatggtgcaacaggcccggtcctaggctaaggcgggctaggcccgtgcctagagcccactcaaacccagggcctaaaatttttatatagtatacttttttcattaaaaaaatggtatttttgaaaaaatttgtaaaaagaggcccaataatactcacattttactttagataaaaaacacaaaatttcttgggcccattattactcagggtcgaccttgtggtgcaacctcctgggtttgttgctcaagggagttagggcgagtttttcatcttcgcaaatctttatatggattgaaacaaagtccccgtgcttggtttggtaaatttaatcgtgctattgagaaatttggtttgttgaaaagtaagttagatccaactgtgttctataaaagatcaactgctagtatcaatttgttagttgcgtatgtggatgacatcgctattactgaaaaatgatactggaggcatctcatcccttaagtctttcattatacccagttttacacataggatttattgggagttgaagttactcagagtaaataaggtatttttctatctcaaaaaaagtatgtacttgatttgttaattgagacaggaaaattgggagcaaaacattatagtactccaatgaatcccgctgtacatcttacacatgatggggaaccatttgaagatcctgagaagtatcgcaaattggttgaaaagttaaattatctaaatgtgacttgtctagatattgcaatctcaattagtattgttagtcagtttatgttttctccaacaattcatcattaggcagcattagagcaaattttgtgttacttgaaaggagcactaggacgaaatattgtttacaaggatcatggacacacccagattgagtgtttctcaggctggctctaaggtagatagacgatccacttcaagttactatgtatttgttgggggcaatttgatctcttgaaagagtaagaaacaaaatattgtgtttagatccaacgtagaattagaatatagaactatgacacagtctgtgtgtgagatagtatggatttatcagctttcgactgaattcaggtttaaaacttaaattctaacaaaattgtagtgtgataatcaagttgctctttagattgccacaaatcttgtgttttacgagcgaactaagcacattgagattgatagtcattttgttcgtgaaaaaatttaacaaggtctgatctccacaagatatgtgaa

SEQ ID NO: 221518 - DNA, 2629 bp, Cannabis indica
aataaccgtagaacaaccgtgaaaacttaatacagtacacaatataaaacttacacagtatttttgaaaaaaattctaccccacagtaaaaaaaataaaaaaaataaaaaattacagtatgtggtgtaaaaatctcatagtaaatatgtacaaataaaccattttttaaaaggaaattccaagtaatttttcttgctgtatttacagtgagagaaacaatattgaaaattttcatacatgaaattggagatgcaaatttactgcaaaaaaaaaaaatggttatggaagaaatgtgatctttatcctttaatatattatatggagaacatacaatactaaatttgaaccaaaaaaaaaaaaaaaaaaaatatttattaaaatactaaatgtcaaataaatatattccccatattctttattagtaggaataataattataaacttactaaaattatattccttaaataaatcctcaacttataaatactcttattctttttttttttcctgaaatgactcttatactttacctaaaagttatatattctttcttaaaatcatatttctatttttttttaagaaaaaagtcataatgaaatattataattttttgtgctgaataatgaaagattgtaattagtaaattcatacttttttttgacacattaaattcatacttaaaatggtgaaacaaaatttatttacaccatattttaaaaatttgtttagcatctttcggaaaaaagaaaaacaaaaacctccaaatataactgaattaattgcttcaaataataaattattaagttttttcttattaatttaaaataaaaataaaacatagggtaaatacaaaagatctatttactttgttaaagactgacattctcaatttattctagaaaaaaaaaaaagactgacattctcatcctataatgtttgttttcttaatttttatgtatatggtaatttcattccaatgacaaatagttttatttagagtactcataatagtttgtttactttattatttaaagaataaatatcattttaaactctgtattttataaaaattactaattaaaccttctattttgttaaatgataaaattaattctgtattttccaaaatagtaaatataagactcttaccctgaacacaatttttaacaattttataacacacatgctgacaaaaaaaaaaaaaaataatttataatacacacaaataataaaattttatatatatgatataatatttatttattaagttttttaggccttggctccccaaatgtttttattttcaattttttagttttaattttgtaatttttttcattaaaattttatttaatagccctcaaattatctttttttatactttggccccttttaaattagtttttatactttggccccttatgtatgtaagttactatatagatttttttttttgaaaaaatagcttcagagaacaccaccaaagtgcaaagatcaactaaggggcagagagctttcattgataaatgacctcagccaagataaggttccgaatacaatttggataattagatcactaaattgtatttgcagtagctgttaaagtaaatttagcaaaaatatcagctactacattagtagttttggagcaaaaggtaaacgtaaagtatacctcacaacattaaaatgattacatatatctaatatcatcaataattaaacccaaaaagataaatctaaaactatatgcatattaagtttatgaattaatctttggcaatttaattcaaaatatgcattgcgaaacagtttgtctaacggcgagggcctttgcccactcaagttaagggagggactcacgtttctacactgctgacgcaaacaccactcctcttgaatcccaaatgaacatacctagaccacaagaaccaccgttaacgagagtgacatcggtattggctttgaggattatagttgctgggggagtccaacgaggtgggggttcttctaactaataatcaagagcagcaggaaaaaaagaaagtaacttgagtgttttcttaatgatattatggttccgtttggataaggctctatttttacttagagttagaagtataagataaatataagatttaacttatttttaccgtttggataactattaatgattctttttttaataaaaaataattttcaaaatatttgaatattattaaaaaaaaaagactattttttattcaaacactcctaaaatgattttttttaattataaaagctaaaaaagagttataagagttaaaccaatctgaattaagatcatcggttaaaaagtggtgtcttatactgtgttaaaccaatctaaatttgattttatttattaaaaaattaaacctttaactaagtgaacaaaagtagtttgtatatttaatataaactaaattaattgagttattaaaattaaattaatattatatgaaacaccattttttaacccacaatcttaattcaaccaactcgggcctatatagaattatttctcacggagtttctgacctatgttctcacaattctctattttctttcaaatttcaatctccatttattcatttttttttttcagaaaaaa

SEQ ID NO: 221519 - DNA, 1783 bp, Cannabis indica
ggagacattaattccgctgccatcaatgtaaggttttcttaactttatatgtgtttatttattattttagaaagttcatatttagggtgttaaacaacatacttgtgagtagatctaagatcctggtaaaagaaattccaacgtatgcctctaaggctatcataagcccctggtcgaggttaatagagggagaaaatttggctacacacttggagctttggtcttggtcggccggagttccaggtcctagaggccagctagaccccaagacctagtctagtgggcggccagaaaccctaattccaagcataggctgaccagcctagggggtacagccccttgggccgaccaaaccccatgaaagcctcccttggctggctaggcctcaaacaaggcttccttggccagccaggatatgcatggattgaaacacatgtttttcaagaactcaaacatgctctttgtgttcttcatgttcttcgtgactcaaagagccaagaatcacaatgaaggtctgattcagatcctcttcgtctagaaatcacacattatgtatcctaaggctatcatgcgaattagaatatcgaaaggataacaatctaatgtaagaatcaaagcatgttcaaagcaaagaatagtgttcataaatccatggcaaaatcaacgaaatcaagtaaattggcgagaatagaaagcttacccactacaagatgtcgctgagaagaaggtgggaagcttgggtcgtcaaaatggtgaaaaaatcccaggaaggtgatgcttgtgggttcgtccctttagaaagaacgaagagattttttaaagtatgtttttagtgagagaaagtgaaaggtaaaaagtgagaagtaaaaaacggttccccccccccccaaaagtcacttatataatgcatgtgggacccttttctttacttacctcacctacacatcattaaggcaactaaagcagccatttctctacaacaatgagattagacagtcaagacaaagtgcttcaaaaggctaaaaaatgcatcaacttttattcagcaagggctacaacagtcccgccgcaccaacatagttggtaaagtcctctctgtaaagacgttcgcacagggacttaggggcaaacgttatcccaattttatctccttgatgtggcacgcttatgtggaaaaaattagtgccacgtggtagtacaactcaccaataagaaggccaagtcagcacctaagtaaacagagacaccgacactcaaaagggcatcaggtgatagactagctccctcataggagttggccctatggtcggccaaccttgggactgcaccatggccagccatcctaccctccataggggcctggtcagccaagaagtggtttgcagggtttcctgtgcacctctacacatggacagcaactcatgggctgtaaattgggtcgtaaaagcccagcaaaatagccgaataatatctagattcaatggcattttagtcttttgtaaatatctaacaaactatgcaaatatctagggtttcaaactataatctaaggtttaggcctcctataaaaaggccttaaccctagcctagaaacctaagttgaatttaagcctaaaacctgcctccaagctctaaacctaagtttgacaatctctctcttcctcacttcccctctcttacaggcctacacaagaattatctcaacacttgagttttgccattattgactcatactttatattcctgagggtgctatagtggatcccatctatagtgatttgga

SEQ ID NO: 221520 - DNA, 2560 bp, Cannabis indica
tttttttttttttttttttttttttttaaaagtagtctcaattttaaaatttcgcacaaggccctcaaaatgcttaggccggccctgacccacagaggctaactgctgtaagtagtgttatgtaataattttttttaaagtaattatcgataattttattaatagagactaatataatttaagtttctatagctgacacttcgtcctctaatttatcaaaatgactaaaaaagaaaagataaaaatagttttatgaatgagcattagtttttgtaaaattagttttgtaaaaaaaaatatgtatataaatagtaataattaaattgctatattctttttttcctttgaggacaataaatttgctatctttacccgcggaagaagagtaccaatgaaatttcaatctagagagttaatggtaaatgtacctccacgtggcaataaattattggatttcggtattaaatgggtctgctgcggagtcaaagtatgataaaaaacgcggcaacttgccaattatatcaaaatttattattcaagttttcacattcaccatcactaatccttttaatctatctttttcttttcttctcaataaaataatctaaattggtaattactattttttttttccctaaaaaaaagagagaaactattagttagaaaactaacttgtcaagagatgagatcattaactatttttcacgtatctatcagtttttaaaaaaaaaaaaaactcatctatcagttacatacagtcaacagcaatgactaagctggaaagatatatgatatgactcacctattcgcagagttaccttaattgtaatagagaaaaagaaatctactaaccaagagtaattcttaaatttagttactagggccttattaaagaaattttgaattaaataaaaaaagaatattcgtgacaattattttttctaaaaaaaacattttatttgtgaattaataatgaataattaattaggacaaaacttttaaattcaactataattaatggatgacaatgtattgtaatataaatattaaaaaatagttggtatattaaatattagtgaagtgggtagatgggcattacgaggctcagcctgaatgaaaattttctaacaatatatatgcaagtcaaactatgcctaatatgagttccttcctagttcctacagctaattacaaattaattagttccctatatatgtaagtgattaacatttctccatattgtatatgtaactaaagaaaaaagacaagaatcttaacaaaaaaaacagaagaagaagaagaagaagagaattttagaactttgtgtttcttatcttttatgatgaaaacgggtaaaatggaaaagaaataaaatgtgggaatgaagtgaaacaagagtaaagttgtaaaatgttttttgtgggtatcttatatccaaaacaaaattctagaatctcattttttgttttttcgttatataaaaatattctatccatgaaatgaaaatgaggatccttatcttaaagagaaagtctttattccctcaaaaaaaaaaaaagtctttattttatttatggataagcaaatgtaagcccttgctcatttcatggatcacgtttctccaatcgagcaataccaataaatttccaaataaaaaaaaatatttttataaatgtgaatccatgtttggtaattcataatcaaaatcaagtatttttctttttggtcccaaccaaaacttaatttataaacactaataatacactttcaagtaacaatttttccattcttcaaaacattgcatagcttgccaaaaatcacacaaattacatcctctcaagtaactaaatcttcaagttacacttcgttgctatgcataaagccaacacttatttggttgagtacaaaatagaacaaaataataataaacaaaaaaagaaatcccaaaactttcttatacaatccaaagttttaaaagatacagatattactaacctacttgggatttgtggtacaacatttgcagtagaaagatgactttttaaggtaccaaacaaagatgacataatttttttttttctgttgggggtattatgtagtaccaataccatatgctttactcaatagaaataatatagtacctaagattaccaaagaataaagtatacttgaatagtaaaaaatagtccaagttacgtgtcagagatagagagtgggagccaccaaccccaactctcactctccctccattcttcaaatgtttataaagcagagttggctttggagaaacctcccaagtcccaaaatcaaagtaccataatttcctctcctcttcatgatatctatttgttataaaaagcatcaaacttgagggaaaataggaagagtgcctaaaaacagaggtccctatctaaatttttatttctattctttctcatatattatcatatataaatgagtataaaaggcttagagcttttaaggcaaaaattgaaagtaaaaaaaagattggggttttcttagaggttcgaaatgggtcaacgatcttgtgttcatttgg

SEQ ID NO: 221521 - DNA, 2403 bp, Cannabis indica
ttttcactaccaggcctaagcggcaaaaaacagagttacaaaagtacatcactggtagaccccaacccacttggtctagtatggctcgaacatgtacatacatcgcccagcttccgcactcatggctgatcagagatagatttaccctttcctgcacaatatagcacccgtgagccaagacccaaaaagatagtataatatcaataatcataactatcaaatcacatatacaattatgccatttcacatttgtctgtataacacagacccgcgtgttacactcacatgccatttatgtatatgtggcatagacccacgtgttacgctcacacgtctaaatacgataagaccttataatagttcatctcggttctagttaccgagtccaaccaaattatgccttgaacggataattcttaaatctcaatatacatacacatgtatcatggcataacaattcaccagggtaataaccctaggccaataaaccgtttattttatggtaataatcctaattcgagtttctatttactcacatatatcatattcaatataagcgccactgtgcataactctacgtgctaactactgtcttacctgatgtcccacatacgtagagattccaaattcccgggtgctcctgactaagtaccgataatcctagtcacaatttctaggattcacaaatatagggttaaatccctaaatccactttcacatgatatgaaattggcatttaaattccagataatcacatagagctcggaacgatctttccaacgatatatagaactcctgaaatggagttcagatcacaaagttacaaggattcgaataatgcgtttgaatctgcccaaaaacgaagggtgggctgcggtactcccgacatggggtcgcgtccctggggtttcaaacccatgatttccaaggaggcgggccgcggcacccaatgagtgggcccgcggcgcctgggtttcaaacccaggaaatcctaaaaaccagcttcgaaaatcaaccccaagcacacctaaaacatgtcaaatatttcgcaaactcacaaatcgtagtccataaatataactcaaccaaacagagagttgaaatactaatttcatgccttataaccttcagattaacaataatcccacgaagtccaatacatgaacaaaattcacatatcctcacctaaagaagctacacatgaaagtcacaaaataaatcaaaactcagcatacctttctaaccaaccaactcaaattcagcaactaagaattctcaaattcacaatctaaagcatacacaaggcaatatctataactcaaaacacaactatggccataacaccataatcaatctaaatctcacaagcatacaattttaagaacataatccacgatttcacatatatttcactatgaattacagcaataaactcaagatggaaatggtagaaacactaccttaagctctttcaaagaccaagcacaaaattccacaaatccaagcttgaatcaaaccactttcacaccaattacaagtgaaagaagaggaatatagtgagagggagagggtcagttatggggtgtgaaataaaacagaaattctcattctatttactagaaattgcttttattacaaataacacaaacatccaaaatgacacaaatgcccctagggccatataacatacatacatacattccaagggcaagcatgtcattagccacacattatttcaaataattttagaatgttaaataaaatgccaataaataatcccaaaaatgaatttcagtcccgaacctaattcgacccaaaattcccaattgtgaccataccgcgccgacttgtcagaaaacacctaaaaaaggacactacaaatatactatataataatatagtccacaagcacacaattaagttaaattcacagttttatccttctcgggtcaaaattataaaaatgtccatggctcaccaatggggggtcttaacatgtcatatatccaattaattcacatataataaattatataataatataattccataataatacacatttaactagttacggtttactaatccattttcttaatcgtagggtattacaatacaacatctcataaggaggcattccctattgtactttggtagctgatgttgtaggagaattcaatcaaaggtaagtacttactccatgagcccccaaagtccatgacacaggctcgtaataatctcctaatatctgtatttttctttctaattgcccatcagtctgagggtgaaaagttatactgaacttcagctttgtgcccatagctctctgaagattaacccaaaattttaatgtaaactctggatccctatatgaaacaatggatttaggcactccatggagac

SEQ ID NO: 221522 - DNA, 1696 bp, Cannabis indica
ataccttgttcaagtcatggtgatcctcactaatctacactcaaggttgtgaatgtgtttctatatatattcttcttcttctacctttcttccttatatatataaatatatatatagtgtagtatatgttgttgtaatatttatttaatctatttgttggtccttgtattatactgcaatacagttgtaatatcttgatttcttctattaaagatgagataaatcaagattttgagaatacaatgattaaagattttgtgtgaaagtcatttatgggtgagcatggtggtgtaaaacatgcccatgccacaaaaatcaccttccacatctaaagatgcatgcatgttgaccttataaaagcccgccaaaggaggtgcccaacgtgacacaataggatgagaggaattagccacgacttgcccagaagatctctgacagctaatctctttggtctccaaaagaggcttttggtaatcactcaaaaaatcacgagcccaactgaccaccaactcaggggacattaaaatattattatgtaccatttcatttctcttataccaaactctccacatgataacaagggctaactccacttgagaaattgacaaaggatccaaaaacagatagataaaactaataaaataagtacaagtaaccaaagggtctcagaggttaaactcacaaagtttttggaactgagaaagagaagaatgtccccacatagcataatgagaagtctcttcctgagcgtcgcataaaggacaaaggccatcagtaagcatataccatgtatattcaaattaaacttgttggaatctaattatttgatatctgcttagtaaacattttaactttgtgaggaatatgaagactccaaaatttcttccactatctcaaaaacccctgagaagtaggaggtctgtcacactccaaaattctagtagcaaaccagtaactactcttgacagaatagaagccagtagaatcatgaccccaaatcagtttatcacaagaagaatttggtgggcaaggaattgaaagaatggctgaagcttcatcagagaaaaaaagaccatgaatcacatccacatcccaaccacccaaatcgtaccgcaaacaatccaccgtgctaacaactctgagcaaattcaaagacaaaacagagaagccatcagtcaaaggaatccaattgtcttcataaataaaaatatctctatcatatctaactctccaaattgccttgcatcatataattcattttctcataaaatattcttccaaacagaaaaatctcttttggaagacttgattgtcaaggtctatttctatgatacaaacttttcaaaactcagagccgccaaggaagaaggatcttgataaagcctcaaagcttgtttagccaataaggcttgattgaaaagttgtgaatctcgaaactccattccactattatccttgtgccgacacaatattttctctcatttgcaccagtgcgtttttatcttacatcatcaccttgttagacatttatatgtataaactgaaacatacatgattatgaataaagtgcggaattaataaatcatatatgcactataatttaaggatcgaaatacctccagccattgattctttgagcattaatcccacataagcttgatctgcaaaagaaaccgattgatgtgggtaatcgggc

SEQ ID NO: 221523 - DNA, 3319 bp, Cannabis indica
aaaagaaaaaaaaaaaggaaaaccctagaagaagagagtggcgcggcaacttgtttataagaaacccttcaaaaccttcgatttccgcctctttcgttgctcaattctttgactgtttcttctctctcccaaaaccctaccaaaaccctagcgcctcctttctcttcacactcgtctgctgcaatggagttctggggtaaaacctctttctcttcccttattatcgtttatattcttctattattttatagcctctagggtttatgatgttatgtgttcgtgtttaatcttgtatgatttcatttgttttgttgtttggtttagtattttctgtgtttctctatttctgtgtgatatttatatttattatgattttcatcaggcttttgtttagtttctctgaacattttgttgatatattttgatgttcttaactctgttgtttcacttaggtgttgaaattaaggctggagagccacttaaaattgagcctgatgatgacatggttatccacctttctcaggtaactgttttttttttttggtagatatatgccattttgatcaggaatttatttgattaattttatttatttttctgttttaggctgttttgggtgagaccaaaagtaaaggaagtgaaactgtctatcttaatgttaaagttggggaccagaagtttgtgttggcaaatctttccttggacaagttcccacaagtgacttttgatttggtttttgatcaagaggttgaattgtcacacaactggaaaaatgggagtattcatttgtgtgggtatcaagcccctactggaccataatatcctttgcttagatatttatatattatggttttgaattcatttttacaatgcacattgtaaggcattgttttttatttattcaatatttgtttttccttgactctttgttgctcctactgagggagatgaaatggatgaagggcaatttatgactgactcttccgatgaggaagaagaagtccctgtaactgctgttgaaaatggttggtgtcacattttgtaaattattctagtgttttgtttaactttggtttgtgcataaggagtataaatttttcttatctaactgttttgatacttatttgcaggcaaaggtgctactaaacctgcagctgctaaggccgcagccggtaaacgtgttgctgctcctgccaaacctgaagcttcaggaaaggctaaagttaaggttgtggagccaagcaaagatgatgaagaagatgacagtgatgattctgattctgatgattctgatgaaattgattcagaaggtgattctgatgaggtatatattgtcccggcatgtactaaaatcctcaatatacctgattgatgatgattgttatagaagtgtttaattaatcattttttttaattctcggttgcaggacatgcttgatggtgatgacagcgacgacagtgacagcgatgaggaagatgatgaagagacccctgtgaaggtaattaacttcctatacatgtttgatgtaaatgtgtttttgttttgctctaagctttagctttagtttcttatttttactattctttatttcgattttgaagcctgaagtgtccaagaaaaggccagccgcctctccttcgaagactcctgtttcttcaaagaaatctaaagcagcagcttctcccaaatctggtattgccttcatttacatatggtgttttcattgaagctttatgcattaaaaccgaaataactgcatcatttaatgaactttttcttagtgatattgttgtatactcatccaatgttcttaatgattttttttaacagatggtaagaaggtagctcatgttagtaccccacacccttcaaagaagtctgcagctaagactccagccacacctgcaactgataaatcgaaacagaccccaaaatctgctggcaacgtttcttgcaaaacttgctccaagtaagatttgggatcccgaattttgaaatcatttttgattgtatgcttattttgcagtaaattatctaacttttttgaataatgtatcaggagttttaattccgataaagcgctcgagtctcacactaaggcaaaacatgcttgagatctgaagatggagagagagtagaggttgcttttggtattttaatttttgacataaagctataggaaagggatgatggtgttttggtggtggaatgaattgtttgggacaagtattatgaattttatgttaagttgttttaggtttcaatggattgatattttcactcaatcgtattatatattatctttacatttttgttgttatgcctactcttactattattgtcttgagtattttttattaagattacttactcttgcctttcgagatatgtttacttagataattagtgttttgcaacttaattagtgttttgcaacttaattataaaggactcaatctatactaaattactacttttaacttaaaaatcttggcaaatgagattatatcaaagtgttgaataaaactttgttatatggatgaatatcgaagtgttgaataaaatgagataattatatcaattttacaacagatgggaatgatccaattggtcttgttctaggtggtttatgtcttgttcttcttgagtaatgttatctcttcatcaatatttccaagacaattcttttctatctttgcaattaacgtcataataggtatacttggaactgaatgtgctacttaatgtagtacagtcttgtgaaaccaaatttgttttgattgttgtgtgtttttagcttgtgtctcattctgtgattcttcaagttgtacttgaacactacctgtgtttttttttgtctgagcatcattttctgatgttttcttcatggccatttcactcattgaagactacataacagtttgtaactattcctctggattcccaatgaaacaacactttaaagttctaggttctagcttatcttgtcttatctgtgattgcaccgaagattctctaagtgatcaattccctagtgcatgacttgtccaaactttttgaggtgttttaaattttagtgttgttgaagaacacttattgatgaaatagcatacagttttcaaagctttaccctaaataaaacaattttcctaacactgcactattcaacaaacatctgactttctcaaactattttattcgtgcttgcaagcttgttgtatcgtgtctaagcttatattttcgtatcatgtcgtgcataaactaatatttttttcgtgccatacagttaggagtgtggataaattgatccaatccaat

SEQ ID NO: 221524 - DNA, 1613 bp, Cannabis indica
caattccggagattttattaaactctagaagtattatttacgttaaatatgaattatgtaatttttatgatttttgctcggcgaccacgaaaaatgcgatggatggtcgtttaagtcacatgcgtaactctagaacctttttcttagcggatttaatattagagataaatagaacatcgagtttaagcggggttatggttttggaaaattttacccgtaagcttaaaatggcttaagtataagttagaaggatattttggtaattttactaaggggattaggtggctagtttttctttggacagatggccacactaagtttcagcttagattaattatatttttggaaattatcaattagatccaaattaagaaaactcaagaaaaagctagaaaaattcatccatttttctctctctctctctctcttgctcggctcccacacaaccatagaaattaacccaagcagcctttaattttctagaattcagtaggaattcaaggtgattcaagttgaggtataccctagaaactgttactttatgaattctttatattttagttggttttgtcatgtaattttgagatgtggtggctgttagggttagattgatttgtggttcagtgtcttggttcattttttattagaattgagttcttgtggctaattatggtgtttgatttggtgaatgatcaagtttgagtttgaaaactcaaacttgggtcattaatgaagtaaaaccttactattttaggcatgttaacgtgattttaaacttaactgcgcagcaccttgctaatcaacgagtttattaaaaatcgtgattaattaaaacataaaataccatatatataaaaatttgggatcccgtttacaaaagcatttacaaacgtttcactgttgatatacaaaattctatcgcctagcgactatacaaaataagccctaatgtcccaaagatcgtacgctccaggcctaaccgtcccgacatgtacaacctccatctgctcgctctcacggttgctcagccttagccttgcccttacctacacatggaaatagcaactgtgagtcaacagacttagtaaaaaaagcataacataaaacataataataaaccagattataatcaagtgctcatacacccaaccataatcctaactgagtcaggaacgttctcgacaaagtatgactaattgcgaatccagtctatactcagtactctagttgtaccgatgtggtagcagataactcatactactgatagcctagcatatatctgttggcatctcagtgcaactctatgtatacctcactaatgcccaaatatgctaatctgatgtctatagatttgcctaacatatatatgttggtatctcggtgcaactttatgttcacctcactgataccctgatatgttattctgacggcaactagcatgtaccctaaacatgtatacatatatgcatatcattatactaatcttatcttatttctgaattcaagtatgctggccaacctgagtggaacaactgctcggtgaattacaggcccctaaatcacatcgttcataacatgggtaagtgacacgctaaatcacaactagggcttag

SEQ ID NO: 221525 - DNA, 4281 bp, Cannabis indica
ctccagatgctaaatcgataacaaaatttatttctccctgcagtgctaaaccctgaagttcatcaggaaatacatctaaaattcctgaaccactctaacatcctctggtcgaattgactcaagccgtgtggtaccaataccactaccaaaaaccctagacatccatcttgtaacgattctctagcttccaatactgagataactggaatttaggatccctgaactgatcccacaaatacaaatggttcctcaccctcaagttggaagatcaccatcttctgcttacaatcaatactagctgaatacttggacaagaaatccattccaactatgatatcaaaatccgctaagcccaattccattaaattagctctcaactctctatcctcaattctgatcggcatagacctaatctactttttggagataactaattctctgccaggcagtagggttccaaaccccttatcataactatcatacgacctacccaatttatcaaaaaatttggccgccacatatgaatgagtggccccataatcaaataacacagagagataagatttgttaactgagagttgacctgaaacaactaaggggctgacttctgcattagcctgagtaagagtaaagacccttgctgaaacgggctttgttgctgtcttctgttcttctttcttgagttgtgggcaatccctcttatagtgaccaggcaaaccacactgaaaacatcctcaccctttacactcacccagatgatgctccttacaattgggacattccaggtaagtgtgtcaagtttcataaccaccctgtcggttacctcgaccctggttccctcgaaacctcttgttctgatttgggccactgggtgcaaatgttgcctttcttttctgggtagtggtcgagtcactaccactccttccataaccagaggtaggaagagtggtggctccaccaataacctatgtccctcgggactcttagatgcactctatatccttaactcgtagtgcttttcccaccatatcagcataggtgatgttatcatcggttgtgatcatcaggtcgtgtttaattttggaattcaatccatcaagatactttctttcttactaaaatcggttggcacaattcccaaagccaacctaggcaatctatcgaattgagttgtgtactcggtaacattcatattctctttctgagtcagctgggtaaattcttttctttcttcttcgcactacaaactgcctcgttgtaataatctgcattgaaaaattcttggaaccattcccaggtaatggtagtgacatcccaagtcagggccaccatatcctacaaaactagggcaaattagaatgtggcacaagccactctgtcattgtcggtgactcttataaaaattcagaatctatataatactgtcaagctttcataacgtccaggcctcccagaatgactagagatgcctgcttgcagaaccctccgtacagtggttccatccagtttttaacaacaactgacctcgcttccctcagacgcttgacctcttcctcttgttcattgattctagcttgcatagatgcaaacctaatctgcgaatcctaggcagcatgcggtgggttaacatctccccgaccgcatgccctgcctcttaggcctcttcctcggccacgaacattcaggggaaactaaacaccctgaccgacagtggattcgaccgaaatatcctggcttctcatgttccacttggcattcattctaatagaacaacctacaaaattaagaactagactggtcagattgcggtcaagaataatttactaattatcgcttattttagaaactaaaacatgcgcctattcagctatctggctactaacgtgcttcctatcaagcttttcttataacatacttataaaataaactactaaagaaataaaggcttataaaaccataattcgaacttatctttgatgatgattgtacatgtcatgacgatctagcggctttgataccaaattgtaacaccctactagcatgaggcgtgttagtgtgattttatattaactgtacaattcgttgctaatcaataggttcattaaaaatcatgatttattataacttttatttaattactctttaaatgcaaataaatattttttttacatatttaagatcccgtatataaattatttgcaaaagtaatacaaaatatataatacaaaagttattggctagaaaccatttaaaatacagcctattatttgaaagatagtacgctccaggtctaactgtccaaacatgtacaattttcatccgcctgctctcacggctgcttagccatagctttgcccttacgtacacatgtaaataataactgtgagtcaacagactcagtaagaaaagataatagtaatcgtaaatataatcggattacaattaggcacccgtacccccaactgtaatcaaatccctgcaccctaggcgatactcctcgcaccctacgcagtactgagtcaagaacgttcaaacgacagtactattgatcataatatcatcttatactcggtactctagtcatattctagtcgtactgatgtgatagtgtcaaatagcacttaagccaaacatacattcatcaatattcaatataattctaaatatattgataccgctattctaatgtatataacaggcttaaaaaacatgtatactaaatatgtaaacacatatacatatcattatactaatcttacctcgtttttaaattcaagtgtgccggtcaacctgagtggaacagctgctcgataatttacaggcccctaaatcacaatcagggccgacccaagcattttgggggtctcgtgcaaaattttaaaattggacttttttttttaaaaaaaaaaaacgtgtatattaaaactacaattttattactagcctttttttttaagatttattcataaattttcaatttatgtgtatataataggaaacaataggccttttctttaaaaaaaataaaaaaaaattgggccttaaaaaaataggggccttgtgcaatggcccaggctgcccaatgcttgggccggccctgatcacaatattcgtaaattgatgagtgacacgctagatcactttttggggacttaaaatcgaaaccaaaagttttcctatctatggatagcatgacaatactctaaatattgcaaaaataggaaaaactaaggttccctaaaatgccccaactggtagaccggttccccaaccgaaaggccaattctgtggggtctgcctggggatcaaccgaaatttcggttcttataggtcccactgaactgttcgactggttcagtgcaggaaactaaaaaatcctcctaaacaattcaattcgaccccaaactgcataaagacttccagaacacctatacaagccataatgaatcatttccaggtactaaaacctcaaaaatcatagaaattcacaagtcactgttgttgaaccaagtttgagttcataaactcaaacgtggtcaacgccacacacaacttttaaatctaaccaaattaagcctaaatcaactcaacttaacctcataaaatatcagcaaaacaaatcaaccctaaatagcaactaactcaaaattttcatgcttgaacctaactttaactatgaaaaacaaaggaagaagagttctaagttttacctcagcagcttccaaactcacttgaattccagctgaaagttataaagattgaaggagaaagctttggtttcttgatgaatcttctagggctgaaaatagaaaaaagaaaggaagaaggttattttcttattttgtcatcttctacactaaattatctaagtaaaaccaatacaaaattaatttaattaactcaatattggccagctggcagctcaagaagaggtcacttaatcccaagatcaaaatgactaaaatgccccctcactcataactatagggtaaaatgacttaggggtaaaatagtccaaaacctaaatctcgtctaatcccgacattctaaatgtctaactaacttgccccgctataactaaaatactaaaccataagaaaattgtgattctatcgaccaaatgacacgttccaatattgttgggcataagatatgaaaaatataaaatttcttatataacgtaaataacacacctagaatttaaataaatcactatcaattcataaatcataattaaaaatctagtttctgaattaaaccctaatcatctgctaatttcca

SEQ ID NO: 221526 - DNA, 1503 bp, Cannabis indica
tactatttcagtgattgtttatgtactaaactatgctccacagactgtgatatctaccaaattatgcccctcgaactttgatatgtactaaatcatgtcccctaaactttcacctattttagatttcttttactaaaattagataaaagtctttaattccaacaatctcaatagttcaagtggtatttttaacgaccttaaaagttcacgaagtgtgatttggtacatgttgaagttcggggaacaaaaatcctaattagcaaaaacttaaatatgaaaatattactagatgtttattatgacattttgtctttcgttttaacttttaacaatggactataataatattttttaagagtgtttctcacattaaggttttgatcttattgagtttatttgtttgttttagttaatactctaccattaaattagttacactaatttcaattgaattattatctcttcttctcttttaatacaatgttgattacacataatattaataagactattcttcatcttaatacaactaatatagtatcagaacagaaaaaataaaataaaatctatatgatcaatacaaaactaataaaattataaaaagatacaaagctcctttaatagtaaaaaattataccaatattaataaattataaattattttaatactcacgctccaatgataaaatttaatataaaaaatttatctttgctcctattgttatcaaataatgaacattaaaccaaataaacataagcaaatatctttttacttgatgaattgaatgaaaatattcatataaaactatctcaaggatatacactataataatgaagaaaaagttcacatcaatccaatttatacaatgtaatgttataaaaatattacaaaaatatatttaaatgttgtataattttttaaaacatatatcaaatttaaaaaatgaaactcatatcatgctataaaaatgaagggaagctaataaacaatattgctcatgacaatcaatttggtaaccctatctcaattgtgagactaacatttttaaaaattaacaagtcaccaatttatcttaaaaaataataacaagttgcataacttttgtaattaaatttaaacatataatttgacccttaactaagaataatttgctttcacccaactaggtgttgtattctaattaagtttctaattatttccaacattaatgattgattttgatttggtaaagatgctataatataatctatctattatagtagcaactagcaagtagcattaagattaattttgatatttccttctaatcattaaaatggatatattcataaagtggtcaaaatttaaatgtcgacactatcaactatctaccccaccttctatcctgcccaaatatgtgctaattttcttcaaatgatttctaacaagaaataatatgatttgtactaaaaaaagagtttgttctcaacttaaaaaattgataattagaaaaaaaaaaaaaa

SEQ ID NO: 221527 - DNA, 2411 bp, Cannabis indica
ttctgctgatagaggttcttatttagctcttcaagaagtctttaatatctattctagggcttcagggcaagctattaatttttccaaatcttttattctcttttctcccaatactttgcaggaggttcgcactttgtttttttgatacttttaacttagaagataggccatttgtctgtaaatatttggaccttccttaatgtctctctagatctaaatatcactcgtttgctttcctttgtgattaatgttgcttatgtacttagatgttggtcttctaagtattttttagtgttggtaaagaggttcttttgaaagtcgtgattcaagccatccctgcttatgcgatggcttgttttaggttgcctattaagatttgtaagggtattgaggttgcgatggccagattctggtggggttccactggagaggctaggaaaattcattggaaatcctggaaggttctttgtcaatcaaaatttcgtggtggtttgggtttttcgttctcttatatatttcaatcaagccatgctagctaagcaggcttggcgtatccttaaaaaccctaattccctgcttagtttgatacttaaagctcgttattttccacaatcttctattcttgaggctgtccctggtcacaacccttcttacacttggagaagtattttatggggaagagacgtaatggcttcggggatcatttggaaggttggtaatggcactagtactagaactttggatgacccttggctccctaatcataaatataaatgttttattaataatgattatccttcttcctgtttattatcctactttattactaatttaggaacttgggatgtggttaaattgcgatcatttgatgaagcaatgattaatgatattcttgaggtccctatttttgggtgttatggccatgatgattctatttgggaacgggaaagttttggtattttcattgttaaatctgcttattatttagctttttcttgttaggatctcccctcctcctcctcttctttctctgcttctaaaaagtttggtctaaaatctggtcctctattaccccccctaaagttaagctttctgtatggagaatgatgtctaatgcccttcctgttgcatcctctctttttagacaatgtgtgattgattctcctttgtgtcctctctgtaaacttgctcctgagtctaccaagcatgctatgctagattgctccagattccaaaaagcttggcgatcttccaggtttgctatatattatgagaataataaacacttagatattaatgagttttttattggtcttgttcaagatttaaataaagattgtattggtcttttgtattgttttttgtgggctttttggaatcaaatgaataatctttttcataatcgatttgcccttcctaaggaagtgtatgattggagccttaacttcatttttaagtatttagatgtgtagcagaatcatgcaacagatcacaattcggctactcccaaggcatcaacacaaccaacagtatcgtgcaacttcagaattttcacagatgcagccactgattcccagcgtaaaaacacagtattggagtggcagttgtggatgcttgtaatcgggttaaagcaagattttctacccctttttcagggcttgttccacctactgttgctgaagccaagctatttatcaggccatctaatgggctcaactgattcatcttcctttggatgtgcttatgactgattgtaaatcaatagttgataaacttaactcttgtaattggaacaatagtgttttggatgatgttctgtgtaatgttaagaacttgttatccttcagtccaaggctagcaatttgtcatgttcatagagaatataatgtgattgctcataaagtaggtaagctaggtcttagactaaataatgagttagtttggaataattctctacctttcttgtaacttgttgctttgtactccttcctttcatcttaataaagcacaagtttctttcaaaaaaaaagtatgaattaatttttatattaactttttaagattaatgtattaatattatttaacaaaatattattattgttattattattattgaaaatagaccgtgagagtactaaacttttctaatacatattttataaaatcttaaacattaaatataatatttattttatgaaagcttctattaaaataattgagagaaaattaagacataaaaaatatgtttttttagtgaaatatatatggaacacaaacaatttaactataaatattggttataagaatattaaaccattagattttggttcgatagcgaataataaaagagaaatttaaattctatgcttaatttagctacttaattaaaaaaaatatcaaaaaatacctct

SEQ ID NO: 221528 - DNA, 1721 bp, Cannabis indica
atggtcaacaagagttgcatttgttggaagtctcaataacaacaagtggtggcactttcaataacagaattagaattcatggccaccactgaagctttcaaagaagctatctggctacagggaaccctacaagaattgcaactgctcaaggataaaggaatagtctaatttgatagtctttcatcaattcacttgtgtaaaaaatcctctgtatcatgagaaaagcaaacacattgacatcaaactatactggattcaagaaaagatagaagacaaggttttagagctggaaaaaggtgtacacaagtgacaaccctgcagacatgggaacaaaggttctcactttcagcaaattgatgcattgtgtcagtttgctgaacattagtacttgctgaaacctttgagaattcaacatcatcaaggcttatgtgaaaaggaagctagtagtttgctttagagaatcaaggtggaatttatggttatttctcctctaaatcaacctacaactaactcacctaactttaattaactttgacaattaagttagttagttcggttatgaggtgctgttatttgcacctggttttctggtggagagatataaatttaaatagcttctccttttcatttctgaggaggagaatagagtgagagctaatgagtatgagagcctaggttcagagctgtgtattcaagttcttggagggtcaagaattgagggtgtactcaaggtaaaagggtgagaactgtgattgttgtctaggagttctcgagtgcaaaagagcttagtcctctatcattggtgtttgtaaactctcttattctttattagtgaaagtaagatggtatttcttagctggattattgctaggcttcattcttcatctctaggaccaaaattaggataaaaattggtgttttctcttttgttaatttatgttcttgttcattgtgttgttcaaatatttgtgatttgccactgtttatattaacagttttattgcaggtttgactatagaatcttggtgttgtttatgccaaatttacaaaaatatagaaagcagtattcaaacagtctctttcacaaacgtataaattaaaatagtcactagtgcaacatgctgtttgaaccctatctgttaatttttttttagattgtcttaaataattataacgtacatgagtatgagagaaaatttaactaaaaaattatttcaaatagcaaagctgatagaaatacagtagtgtatcccttttaagagagtgtactataaattttttcataaatttatacccttgctataaattgtacgggaaatggggtcgaatccgcgctttaattggatatcaatgattcaattacatatggtcattaaaatctaatcagcagcaattattgttgttggccccatctaaaataaagtgacggtgcaccaaatttttttgttcattggagcaaaagaagggatcaagggagatgcccaatttgcttttaggtcaagtgagagattgttagggtttatgccctgaaaagtcgatagagatatttttgattattattaaagagttgaacatttagatatatacatgaatgttagattattagtatttattattgaataatttatataaatatcaaaaaattccttattcttattcgtatatgatgttgtgacttatagttgtacacagaactagcatcacttagctatgaataaaac

SEQ ID NO: 221529 - DNA, 2498 bp, Cannabis indica
aaactttcaatgaatttcatgtcgtagtatctacgctgtttgtcatcatgttattcaggacagataggagtcatccactggataggtggatcaggtcatcctatcattcgattatatatcgtaaagttaaatagcatatataaatttataaatgtagaacacgcttacatattggaatgtttgatatagaacttacatgaataggatgaagttcatatcattcagtatgtcgctcttgcctcagtccaagtatgctatcgtctgcgtacttggttggatgagtacaagcatctaatgaaacatcttcttgcacaaaaaaatatgtgtgaaactattaatatatacataataataaattttctaaagagttatcaatactaaaattatttatattaaatctacatataccgattattatatagaataataagccatttgtctaaattagtcatactagtcattcgagtgagtagtgcttgacaacgattacatcagcccctgcatcagtgggaatcgcacctgaattcaaaaattcatatagtcgattgagcccaccaatgtccaccagtctttctttcatgtacctgataaaaagtcataattaataattgtccatgtcaaaagaaaattatctagtttattatttagagttagaaattatacttgcacaaaactcctattggttgggctcccaagtattgcatggtgcacaatttgtgaatgtcacttttaagaagccaaatagagtaatcttcgaccccgaaaagttcataagcaacctggaattggattatggacggcttgggcgaccttttgatggagttgcagaaggtaatgactgaggatgtttggcgtggtttgacaaaacgaccatgaacttttgccttactcggcctcctaggttgttttggaggctgtgttggaggatcgagtaagtgttcagaggtttttttgcttcttttcacgggttgcttctgaagtttctttgttggtggttgtgtctctatatatggaaaaaaaacagtaaagttagcaatgtcatgaatgaataaacataataagttaagtaaacaaatttaaacacacaaaatgctttccaaaaggcgtaagatagtctttcaaccatgctacataacattttatagcttgacctactattgtcaatgaatcatcggctatcagacatgggagaagtgcattctctgcattcacttcttcaataaatacccgacgataatctttttgtaggtattcatccatgttaatggaaaactttcaatctttcaaatatttctcgttgacaatgtaaggtctgtaaatccaaaacaaacaagccacaatccaatttgtaagttaaccatatttataatttcgcattagattagttcgtaaaaaaaacattaagattacctcttctgaactaccaccagtaggtggcggtgctgcttctggatcgatttcctctctaaaacgtgatggcgatggagtagagacattgacagcacctgacggttgtgctatggaataaggtggagagaagactttagcaggatccaatggttgtggtactagatcggaggcaaggtcaacatggggttgttcatttgatgctcttccaacatcgaaactagacaacgctgctatgctggtggagagaagacattggcaggacccagtggttttgctactttatcctgcagctttctgttgcttccctctttctcatgcacgcgtctctccaaattagatgaggcctggttcgaccaatcggtgtttttccttttaaggcatggtgtgttgaaatattttgttcgggtaacgtcgaaactcatggctcgaacctagccaccatgctcatctgtccccagtgccatggtcaacgcgtcctttttaccttccacttgtacaacaccctcttccacttgcttacaaaatttgtcctataaaaaaaatagagttagaaataaattatgaaacataacaattaatacaaatgaaattaatctttaaacttacaatccgtttaatgatttctgcatgttgggccctccacctcgcctttggtgttcgcgtaaagtcttttctagattttagatctatcaaatttagtaatttggcggcctgcctctttctccatttgttcttgaaccattattacacaacctcgtccgctgcgatggttataaatattataagccctactcttttgggccttcttcctcttctcgttcaatcctggacttaatctcgaagccacaaactctatccattgttgcaaattaattattttttcataaagtttcggtggcttctcgagaagatggggagccacatctttgattgtaaaatatcttctattagggtaattttccaatcattccacctctatcagcctttagaaattgttaatttcctatctgtgttcggttcatcgaacgcggcctgccaaattgacaatcgtaattataagtacaaattataatcaatagtaaagaact

SEQ ID NO: 221530 - DNA, 2348 bp, Cannabis indica
tttttttttttgaaaaattattttgtcttttgcttttatgattttctttttcttttctacaaatagtacgtgcctttttgggttgtcttaacttaaaagtgaaagcaaatatataagagaatgtgttaggttacattattgattaacatgttactatgttagatatggaacgttaagtatatgtcgaggaatgttttgatgttttctatctttttcctaattgatactatcatgtttttctattcttttcttttctttggtatttagtatttacttttatgtggcattaatttaattttattgaagttcctaattaatatgtgattgcctccctcaaatttatggtcatgttctttgattacttagaagagaaacaactccattcataaacaagctctaaaattaatgttttttctcttaaattttattggtctaaagtatgcattcttttaatataaattttatccttttataaacatctttatttcaacttaaatttaatgtagctaaagcctgttattttatatcttattcaattatattcacaaactcatgccttaaacatcaacaaaaaatattaagaatatgatcaaatttgtaaaagtaatggaaaatattaaaatttgtgtaaactaaacagattttcaaaaaatatatgtacatttatatgaattaagttcatttatatttatatactcatatcttaaagaatagtaaaaattactaaaaattaaaaaaatatatatttaaaatcctttttttcaacttaactaaaaaaaaaaattatagattactcaaagtttagattttctaaaaagaaaaagaaaaaaaaagaaaggaattaagtttagttctctttatatttaaaaaatcaaattttcctttttaaatagcttaattaattttaaaatgttgaatttcttttttaattttcttagacattcaaaatattttttttttaagatttaaattaatttcaaaagatttaccaaaaaaaatattcaatttttctcatttttattttgaggggatacaatttgatagttgtcagaatttaggggacaaaattactaatttataaagataggtcaacattcaaacagaataatgaaacgaaacctaactgcatgactaaatttttataaatatgaaaattcatgagcaattttcaacaagccgtatattttagagaaaaaaattaaatagtgtcaaaaatttcaggggcaaaattactaataattttaatttttttatcaaataaaattaattatataaaaataaataatattttacaaaataaatattgattttagacaatttttatattttatatgattttaacaagacattaaatatgtattcttttgacaaaaatacttattaatttagcaaatacacattataaattaacaaatttccatacccaaccaaacacataaaactaatattgctagaaatacaaagcataaccaatcatattaccccttcaactttccttgtaaaacgaaaaattttgaactcctcataccaaatagaaagttaattgtattggattttcaatctatattaaattggcatataattctaacactttttttttaatttgaattaaaaaataatcataaattatttattgataataaatgtaatcatattataaattagttattattgtaaataatataaaatataaaataatttaaccaaaatatatttatttgatatcagtgtgaattattaaaattattgtactaaaactgataaattagtgtaaaaattattgtataaattataaactaaacaaagaaaaaacatttgtcaattattaaaatgaccactagagaccagattacctttactagttataaacttataccaaaatagcatagcataggaggatgttgtacttacccagtaactactttttccctattattgtaaagtaataaatacgtgacatttgctaaaggaccactagagtgagtgagtgacaccctgagacgtgttatattatataaatgaacacatcgactatttgaatgaggcttcaaatgtatataatataatagtcaaacaagttgtatacattatgaaattaacttattgccatataattgaaaaagatcaagataccaactctgaattaggcgtcacagactcaccattccatccaatcactaacaattcaagtggctcttgtcacttcatcgtatataatgtccttctaattaatatatttaacattattaatataataattagtaataatgtatattagttagtcgtataagataacaacattttatagattacttatttcactccaactcaaattaaaatattcatac

SEQ ID NO: 221531 - DNA, 1569 bp, Cannabis indica
ctttgccagcgctttttattttatgctggcaaaagttctaataccaacattgatttgccaacccccttttgccaacgcatcacaagtaaattctattttgccaacgcaatactaacttttgccagcacaaaaatgtgctggcaaaagtgatatttcttgtaatctgtatattataattataacatgcaagattttgaataatttatgttcatgaaaataagattcaaaacaatcaactccaagtccacgcgtgttagttttgaaatttgttttcattgttgaagtaatttttttgtaagctaatcgaagaaaatcgtaaaaaaagctattcaataatgatttattttcaattaaaatatttggaggaagcgaaacaaacatcgacagttaacttaggactagaagatggagatttccagtatttcaaacatattgtctgaaaacataagtagtgttggataggtgttattccttcaaatttgttgtactgctggttgattctaaccctttaactattgtgtctacttttgctatgagacattcttttttaatgatctaggatcattgttagaggatgtaacaagtatgttattcagttttttaggagtgtggccctgatccatgtatattggtcggccaatgtggctacacatagaatagcttgggaaacccttcggatagataaacaacttgtttggctaaatatctacctattattttattctttgagatgtatagctctttagcctgcatgacactatttagttattaatgatattggttattactttgaaaaaaaattaaaataactatttatggttatcaaataaactggtttacaagttgttcgcttaaagtaaagacatataaattttataatattagtggacatgaaaaataaccctagtgtggatattatgtctagcagcaaagagatatgaaagattttttatgtctaactttaatggccacatcaaagagttttttgtagtagtctaatgaactggcggttcagattactattttatgtatgtttgagtttgagtctaagcaaaacttacctctgaaccaggtcaaatacatatatattataatttttttacatacctgataccctaaaaaagtaaaaacacaaaacaaacttaaaactaaaaaaaatcaaaatcgtgtcttcgaagcttatagcctcccctctttgtctctctcttctctttccagtccccatggctcctccagtcctccttcaatgacagctatttttcttatgtatatatataaatatatatatatcttacagagagaagggtaagaagatggatagaagagaaggatataaggataatacatgtgcactacaattttttttacttttagtgacaataaaatttgtgactaaaagtaaaaagttgtgactaattaattataaatcattattttattattgtaattaaaatgtctgttgctaaatgtattagttgctaaaggtattagcaagacctctcgtatgaggaacaactggtataaatacttgataaaagaaagaaagtctttcgaagcaagacaatgaca

SEQ ID NO: 221532 - DNA, 2599 bp, Cannabis indica
cgtaatatttgcggtcgttgcgtgtattatgattattattattgtcttaattatgtatttttaatatttttttatgaactctaattctgtataatatatataaataagaaaaataaaaataaaaaagttttagcttgtgagagatttgcatgtaaatatcagcattggtcttttgtcgttgtgtgagctttttctaaaccttggattttgcttatgatgtcggttcatgtatctgcattgattgtactgctctacttttctataataaaatactccactctttttcacatctgtataattattcttttttcgtttataaaatccttaatttaattcaattcaactcaatttgtagagtgtagatatttgaaattatataaatttaattggattgaaaaatttaaaatttatatttatacaaattaaatgttgtttatatttaaaaaatattaatttaaaaatttaatacatacgatataaatatattttaaaatatagtagatcaaatagatataaatatatttcaaaatatagtagatcaaatgtatattcccttcttatttatcaaaaaaaaatataatttaaaatgaaattttatattttttatacataattttattctttgtgctttaaattttttatttttcgttttatttgttttagtttgttgttgagatgtaaaacaacaataatttattttattttgttgttaataatgtgaaaatacatatttttttttaataaatgttaaataatttaatattaaaaagtaatcaatctaaaataattaattcaatccgcacttttgaagattaggttagattagattagaggggatatgcggattggattagatccaaaatatgaaattcgcacttaattagtgcggatcagatgcactatgagcaaaattatgtgaatcggaccggatggacacccttactttttaatagagaaaatatcttttattatctgaaaaataaaattaattaatgttacgataaaagtgactttatataaggggagatatccaaccttagaacactcaccaaactcaactaggaatatctcaatctctataccccaagcattaaacataattatttaatacctaatatgtcccctcaagatgaagtgtacaaatttgtgatattcatcttagaaaataaatccttgaaatgggatagaaaaagaagcttggtacggagatcggtaaggttgtgtttggtgttgacgtgaaggagcttcaactgaccgctttgcacccgttcacgaacgatatgacaatcaatgtcgatatgtttggtaccgttaaaaaaaactgagttttaagaaatatgaatggcaactttgtggtcacaatacataaggactgggtgtgaatgattgaccctaaagtctttcagtatggcaagtaaccatagcaattcacaagttgtgttggccataacacggtattctgcttttacagaagaccaaaagacagtgttttgcttcttggacttccaagaaattaaggagtaatagtaacttgcgaaaaagcgtcgagtatcatggcatgtacaccagtcggcattaaaaaagactttaaattgtacctcattgacggacagattactctcagtgtaggccttgagttgggtagaagaagtggagtgaaagatcagtccttggcctagagagcccttcaggtattgacttaacctgttaacaacataagaaatatcaagtctattatggttaagtaattaatgatctttccaatcaaacttctatagcttgggtcagaaagtaactcccatgtgtccttgcttaggtgagtgttgggttccattgcagtggaagcgggtttggcaccaatataacctatgttagttaaaagttgtaaaataaagagtctttcagagaccgaaatagcatcggtggacctaccaacttctagtccaaagaagagcctcaaaggaccaagatctttgagtttaaatttggagtcaagttgtcttttaaacaattcaacatcattagagttattgttagcaattaacatgtcatcaacataacctaaaacaggaaggaaaatgttattagaagatcgaataaacaaggagtgatccgaagaggattgtttgaacccttcagttaccaaggtagaacttagttaagcataccactattgggatgcatgtttaaggccatagatgttcttatgtagtttacatacagcattagaagggagttttccttgatgtttgtagcctaggggaagcaccatgtaaccttcctcagtgagatctccatggaagaaagcattgttaatgtccatttgatataatggccaattgctaatggcagcaagtgcaagaagaatttttagggtattaagctttgctaccggagtaaaagtttctaggtgatctatcctaagttgttgggagtaccctttagcaactaagaaaactttatatctttcaattttaccttgggcattatattttattttaaatatccatttgcaaccaatgaaatggtggccaccgagaagagagacaacagtccatgttttattggttgtaactgtaagtgcaatagtttcagtatc

SEQ ID NO: 221533 - DNA, 1713 bp, Cannabis indica
ttacacttgagacttgtactttgatgatacccaaccttgtacagtgacattgtctagtaagtatccttgggtacagttgtctagagttttgtctatggcttaaaacctgcaaggaactctaccttttatcttggaacctaccaggaactctgccttagccttagcttagtacgtggttcctatagtaactctatatggtacttctctggctatatggttcttgtagggccttggccctattcatttgaaccgatttcatattcggccctatggctttcaagttcatgttttaggcctataggccctctattttttgagcactactattatttagccttaaagccttttatcatagacatatgatcatcttgactatcttcttatggccttgacatgtaagtatccaaatttacttttctttatgttaagtcgaagtatgcctgcacttgacttagaggccggtttcgtagcttattctaagcgttaaaatttctatgaattttacgtgctagtttgatacattgtacagtgtgggttccccccaagtgagtgtgcagacttacggtctcttggtcacttgcaattcaccaagtttcatagaccttgcttgggaattttcttggggtgctaccaggtgtatgcatgtcgaacttccaaagaatacctttaagaagttatcattgttagaaaatggattagacacagttggtcttacgtgtaacaaaagcttacagcttagtgtttgcttttgaaatcacgtagtggctacccttagacggcttaccccgcaacaaccatcactgaagtttgatggaaggccgtgctgaaaagtaatggatactagctcttttataggtccctgcacggtgaaacgttagaggaactaattgataagttgtctagtgagagtacttactgagatgttctctattttagtgtttgggtagaagtaccaactctaagttctagttgtaatcactagacatgtatgcacctttattgtcatcatgtaccatggtgcagaccttttcaatttggcccaaacatgcttgttgtaggatctttgttgtcaaggaatactcttcagggagtaagtctcttgaagaatttttttccttattctgtttgttgaagggcctggtaactctttatgagccgacatgctgctttgagttagcttggtctcttctcctttccctttcttcaagggatcttgctagcaagatttggttttacctcttggtcactgtagactagaagtatgagagcagacaactagtggattggtctagccaaggtacataccaggtggctagccacattaaagcattgcttggccacttggaggaggctatggtcgaccaagttattgaatttatgttcgactaacttgtcaaggtggtggccagcgagaatgatgattctatcgttggccagcctactgaggccaaggtcagccagcctttcggaggctaggccgatgctgtagtttgatcccaactacactaggttggctttgctcctcggcatgattatctcagagcctttgtgcactcctgtcaatagctattcaacttctttcttggtatacttcatagaggtagttttgggataccacgtctgtgtgttatgttatgcaggattggacaccctgcaaccatcctgctgtccctactttctagcaagatttttttttggaggtatgttgctgta

SEQ ID NO: 221534 - DNA, 3337 bp, Cannabis indica
gttctcgatttctttttacttttatttttgcacatttactttctaaatgcggtcttaacttgctgtaaaagatatgttgacaaccctaggtttaaaaactctacgatttttctttgtaacgcttcatacgacttcgccattcataatccttgctctttgaactgcataattcctgtttttcatctggcttattcaaagcttcatgaaatttttgccctaactcacgaaaatttctaacttttgagttttgacttttcgtcgaatattttcattctttaatctgttgagtactcctggtcggggtatttgcctgtttaatgttcgatatcccaaccaaacactcatatcgcgtgttttcttttgtagaggaacccaattgagttttggggaagcgaacaccaaatcgaccaggacctacttcaactcttgcatgaggatcatcctcgtctttgctctagtctgccttcttcaaacgacggacatttagattcaaatttcacgtctagccacaggatgatggcttgttctaaacagacaatgcgtaaagtcgacgcgtctgaccctcacgtggcgcagcacgccaccttgcccagcatcgaacaagttccaccggtgcaggatgagggggatcatgaaggggacgctgaggtgcaggagatagaggagcagggcgatgtctgtcctagtagtccttccgaggaggaggaagaggaggctacagtcccaaactttggaagatacaatgaggttggggacccaattcacggggacggtgacgtcctggttgagggcgtggattacttcacagaggaacttactgctgcggtccctcagaggagacagggtgctttgggagcatggtgggtgagccctgcgtccaaggtcactgaggcgcgtttacgggatctcaaccaaggtggctacctaggcgagatggactattatgttcccacctataataatggagccaccaaccctctgagggggatgtgtgcctggtcgggtgctcatgctaaaccacgggcactgctgcctttacacccgtactttatgaaggtggcagacttcttctgtctctgtccgacccaattcactcccaagggcatcaagtatctgtctgccctgctcattctctacgcctcccaaaagtgggatatgccctctccccatgaggtcagctagttttttgatttgaagtctactctcaagcaaggcaggtcgggatactactacttctctcagccaaacttcaagttgttgaagggcaccggggacaaggccgttagcaaaattgggaattttgttgacgagtattacatggtggatggcatgggcaccacctacactcggttccaacagatccctatatatcaccgcccacccttcacacttgctctcaaggatagagtttagttgccgggtgctgcccggaatatcactttttcagaggacaactttgtggagtaccggctttacccgaaggatttcattccctaacctgtgaaggagaaaaagtggaaatccaatgctggtcgggctgagggagctcctgaggagaatgaactcattcaacttaagcgtgaggctaagttgaagggaggtgcgggggcaaaataatgctcaggagcattctgaggaggacgacgaggttgaggaggagcaggtgactccgcacaaaagaaagaagaaacttccaaccgaggacatgcccgttgaacatgcaatttgaatcagggagccatgtccacctggtctgccatccactcctatagtaggaaagggaaaagccgtcctagaggaaataagagacttttcaggtgatgatgagccttcaagtcatgctcagcctaacacttctcccgcaagataatccgcttgtttttaaccttcttaattaatatgctttcatacttctcgtgcttttctctaatcatgtttcttttatttcgtgtagcatgtctcagaagatgatcgaagctctgaagaagagagtgggaggaagctcgggctcatctcctctgggcaagagatctaggggcagtgagacaacaacgtccagagaaaaggcatcggccgaggcagttatcgatctttccgaggagctaaccgttgtggacccttcttcagcgaaagctattaagtccaaagtttctcgaggaggaagctcgggcaggctcgtcagtccaagggcagatccgagttggccaaaagtggatatgagtaaatttgggctctcacccaacctccatcactgcatcccgagaccaagagaggcaaggatatgctaacccactacatgaatcgatcggtccctgaggtgaatgagcaactagccagagctgacaacaagccttccttggagttgttgatgggaggagtcttgaaggagtttatgagggtgagtctttcctgacagttccctttaatccttctttacttggctcagattctaacattttttctctatgcagactggtcagaagatggcttacactttttctcgggctaagtctgctgcctcaaagaacaccgccatgtccaagaccatgagggcggaagtggacttggccagaaaggacggtgatgaatccagggtttaacttggagccatccaaatggaattgggtgaagttaaaaaaagttcttgctgccgagaagaaggtgactgagctgaccaaggatttagaggcttttgacaaacgtgaagctgccatgacctccttgtcccgagaagtgaacaactttcaggaggaaagggaggttcatcgaactgtctaccgcatgttgcaagcagagaagaattccaaggaggaggagcttagagaggctcaaagggaaggtaaattccttagagagagctggtctcgagagtttttacgacttttgtaatgctaatcctcaggcgaattttgattacctcgtcgatgccaaagacatgtatctcaagtactatgcttcccaggtggcctgtggagagtccgaggcaaccacttctacttcttgtcagaatattgacatgcccttcgcccagacaacagatcctctagcacctaccagcccaggagacccaacaaagagcctaggactccaaccgtctgaacacttctctttttatctttctattttttatctgtccggccataaggccttctttttaagacaaagtgaccggccaaacgatctttaaacttggaattatttttcattttttaaacaataggctgaccgggcagcctttaatcctgattttacgtgcttttgttatctttaatgaatttcatcctctgtttataatcatcgtgtaactatgtttgttttatttttaccaaatgctttg

SEQ ID NO: 221535 - DNA, 4715 bp, Cannabis indica
aggggaaggatgattgttgggaggggaatttgagcttgtggttattcaatcctagctctagctagtgaatcgatttgaactccatgaccatttccattgtcgcaattgttgcaattgtcaccttgattggacatggctctaatactaagacaatactctaaaaaaatagagtttgaggagaagaaaaaggagagtagaaaatatagaacgaatgctcaatcttgaatgattgagaagctctttatttatattgtttcggatacaataacatttgaagagaaaagaccttaacagacactaacaacctctaaccgtttctaattgattttcatttttaaacagtaacaaatttaactgttatacattctaaaaggtatatatttacaaccaaaagttaaacttaaatatttaggtcataaattattttagtttatatgtatacatattgagtataatatctcacacattttaattaattttaagtagaaattacatcacttttaattttaatgatatagtcgagattaattacacattaatattatttataaaaatatatctataacttaaatgtgccacaattattattcttatttgaaatggtagattcttttttaatatatgatcgacttaagaatactattacatcattgaatatataatatttttgcgtgcacttattataaatatacaatgtaaaatgttaaaggacaccaatgattcatctttaatattaccacaaactattagactatctttaacagataatgtaaattttgtactaaatttagattaaaaatgactcaatattatatttggcctaaattttacatttgtactccaatatataaataaaaatataaaaagttattgattatattgatgagtggttaaaatagtaaatataaaagtaatatttattgtggtgtaaaatttgactcatgttatgtgctaaatttagcataacttttatgtgctaaatttagcataacttttagcatatatcaaatttagaccacattatacactaattttggagttcaatgttataaaaattagctaaaaaaatgtatataaaccacatttatagtactctattagagatatttaatataattatgtatcaaatctcatatatatttttattttagtaagtatgattgaatgttccttgtatacaatccccaaatatatattcattttttttattttcaaattttataatttttgataaaataaatagagtaagtctacaatacattattaggtgtttcaatagactttctatttgttttggcaactaatagaaccttttagttcaattttttttttttttattcacgtgtatgttatagtaaaattttagaaaatttcaaataatttacaatactgaaaataagatttaaatattttattagattgtttttccttatacgcatagtaaataatagtttgaaccttattttttaatattgtaaactatttagaattttctaaaaatttaaaaataatcttaaagagctacaaggtatagaatcataaaataataaaaatatatatatatactaaaataatttattaaataccataaatttattaaataccatatttactacatacacactattgttactatgagtagtaagtagtagtaatagtagtactataggtctagaccaaagactacacaaatttattattataaatacgagaacactctcactttctagtgctcactttccacgaacctacttatcttacaaaactcaaaaccaaaccttttctttctctctctctctccccctaacaaaacttaaaaaagaaagaaaacccagaaattgtttccttaaaatcaagagctacatatacatatatatagtaataataataatagtaataataaaaagaaaagtatatatagaaagaaaaatggaaacaaaagtgttgtcttcgggtatccggttctcaaatttaccagaaagctatatccgacccgaatccgaacgcccaaggctctctgaagtctcagcttgtgaaaatgttcctgtaattgatttgggctctaaccacagagcccaagttgtcaatcaagttggccttgcttgcaaacactatggattttttcaggtaaattaaattaaattaaattcaattaatttctttctatttttttttatttatatatatatctattacaaatttaatttatatatatatgtatgtataggttaccaatcatggggtgtctagtgaattagtggagaagatgcagagtgtagcacatgagttttttgatcttccattagaggaaaaattgaagctttattcagatgatccatctaagactatgagattatcaacaagttttaatgttaacaaagagaaaattcataattggagagactatttaagactccattgttaccctcttcacaaatatgttcctgaatggccttctattccttcttctttcaagtaagtattattattattattattattattatttaaaaaaaattaaaaaaaaattagttcatccatgtttattattggaactccatactaattgtaccatgttttttttaaaatagtattgttcgtaccattttttttaaaatagtattattattcgtgacatgtcagttatctatttaatttacgatttgacacgtcatttaaaagatgagtctgacagattctgacaaattaacacgtattataagacgatcgatatgtcagatgacacgtagatttataactttttaaaaagcgtgccacgtcggattcactttatttaatatatgattgtaactgtaatagatattgtgttaactgaaatcctaacttacactttcttttttcttctttattttgaaaaaaatatatatttattttagtcaaatttgattagtaaagtgtaaactaaaaagtggagaaaaatcgtaaatttatttaataaaattgatttttgttttatgagtttgatatcatataattttgttgtattaattaatgaaattggcttttccagcttaagaaggacaaagtaaaaggatatttttagtgagatttatttttttattatttttatttttttggtcaataattttttggtgagatttagaagacactttctgactaagcttccatgtgcacttatatgcttcacatgcattagtacagatagacaaatatataattaaatttatttattaatttataaattaaattattatttattttaaaatacaaaagtatattttctttcaaaaataataataattaatacccacacgcaaacaaaaaaaaaatgcagagtcataattataaatagggtaccctgcatatatatgaaaatccaagtaaatctagcttttgatatttttgtttttttgttttttttaaaagggaaatattttggatccatgtagttgtacttattagatctagaaaaattaattaacattttcacttttttagattgagacatttttattagacaaccattttggtaattattagtttaatgttaattttttaataattacaaattaaagtgactttgttttcaaaatttacaaacaagcccttttttaattccaaaaagttaaaagaatttaataaatggataaagtagggggacataattgaaaacaattattgatcgaggtcccatagttgactttgtcaaaattctaaaaagaaacaaaaataattaaaaaagtttggaatattgtgtaattttctgtctacaccatttgtcataaattattttatttatgtattttttaaaaaatatattaattattttataattttactatcttgatattttatgaattttattggtgtggtgggaaccatgcatgtggatgtggtatagatttttatatattaattatcgacgtcatataattaaaattattatattcgaataaaaaaatattcgaattttctggaaaatatgacgtcatatcattattccgtgttgacgtcatcagcttgaatcatgtggttgatgttgatgatttcattttttagtggcccaataaatacttcattaatattattattccaatttaattatttatttatttttacacaaataattatatattaatattatcatttattaacaataaaaaaagagagaagagttttggcattattaaggtagaatagtcatagtgattagtgccaagatagatcaatttgtctttttataatttattattatttatttttatttttgtttttgtttttttacctaaaattactataaacgtaacacttctttctataatgataatctgactattgaatgttatcaaatctcattaaaaaaataccgttttatttgaattggacattcacaaattatgcctaaattttctatttttatatatattttttatttaacaaatggttgtctattcatccatttcagaataaaataaaataaaatggttgtctattcattaatttcctattaaatagggatatgttcctatatacattaaatatatatatatttatatataaaaatattttatttgaaaataaatatatattatttttttacttggatagcatggcattgacgatactaacatgaatcacgaggtttaacactagtgggctcattgtggtccaattgtttaatataatgggcctcattttcataaaatcacttgggcctacataaatgtttccat

SEQ ID NO: 221536 - DNA, 2209 bp, Cannabis indica
tattcagatattttctatgcaggaggatacaaatggtaactaaatctttgttatgccttacttttggtattattattattattgagtcagttttaattaaaatgtgcaggagaatagcaatttttccaaaagggaacgaagtggatcatttgtccatttatctagactttgctgattcgaaaactcccggttggactgtaaatgtccccttttttagcatgtcgattatcaatcaaaatcctatattaacagttacaaaaggtaggctagctacttattccttgagtttataaactattagaattctcattttagccaaggttgtcaaaacatgttgattcaatgtttcatgttttgcaatatgtatttattatatcattttttggaccagcagtaggaacttatgtgcccttatatgaaacatagtttataaactattcagtgtttaacggtttgatgggcatttattttataaatctatgaaccaaaaaaccattaatttttaactttatgttaccaaatggttgtagtactttaggggctaacattgtaaggagatgatgttcgtatgaagaagggaatatctgttgaataacacacaacaaaactgggtactggcttttaaatttctgttgtctgctattattgtgttcttttactatttacagaatcagaacatgttttcaacgccaccgagcaagattggggtttcacttcattcattcctcttagtaaattaaatgatcccagcgaaggttttcttgtgagagacgtttgcactatcaaagcagaggtttgtgtgtgtttaagtttaattattgcttaagaaactttggaactaagaacccatttagaaattcatcatgttaatgacaggaactaacttctgaactttttattttactagttcatagttaagaaactacttaactactctgttttctttggtcaagaaaattaaacatttatgtgcttttggaattacaatgcaggtaaagttgaatattgaagaagacgacaaagacaaacatgaactgtctgatcaggtgaacactgatatgcatattgcttattagcttcttggtggtatatttataactgtgtatattatatatatgtgtatattatatatatctacattagccatctaatcctttcgttacattgtttcagaattctgcatttgtaaaagcagatacaagtacatccctttctttttctgaatatgatgcattgtttatcggcattcaaaaactactcgaaggagagagttttaagtcagacaacattacaagcagtggctgccctccttcctggaccgtagaagagattgcctatgcaaaaaaaatcttaaaacaatgcttggatattgatcttgatagtgtcatccaattgggtagagatttcgagctcaagaaatcactttcaatcctactaagtagcaatgcctttccggagaagatgagataaccaagtatgtggctaactttgtccaaagttgtgagcaatatgaagttgccaaacaagacctaagggaggtccaagagaacgaaaaatcaatagaaattcttaaaactgatatgaagaatatatcttctgaatactttccattaagaaatcaagctgaagttgttgataatgaaatagccgagctcgaaatacagttgtccgaaaggaagatgaagaagaaacgacttagtaagatgcttgaagttttagctggtcgggcaaccacttctaaacaagcactggtcagtgctgaacatgatcatgagaagctttccgtgctaaagaaagtagaggcagagaaggtgattggtgacatgaaaaggtcatgggagtctctaaagcttggctattctaatatgcttgtgtaagtttttagatgatgttgttaagtcttttgaagtagtttactagtttttcttctttagcatctgcgcattcacacttttggagactagactgtggttgtacggaaggttcccaagtggataaacactttcttttcaatgcttgtgtacagtgcattccgaagcattacttggtttctgtaatggacaacttcttatacttcaacttctgtcttaccagttaccacaatttatttggatcagcacctctattggtataatttaacatgggattatacatatagagaaatgctaaagggtaccagtggtgtttaacactcttttatgtatcaata

SEQ ID NO: 221537 - DNA, 1993 bp, Cannabis indica
aaagtttataataaaaattttaatatacaaaaatgttaaactatataaaaattaaaatattacacattaaattaattattatccaaaatacaacttaaaattcataaaaaagatactaatatactaaaaaaatgcaaacataaattataaattataaaatattactaatataagataaattactaaacgggtccccgtcggggcagggagtgtgatccccgtcccagccccgtttaacattcagggacaaaaaataatccccgtccccgccccgttccccatttagacggggaatcccggccccattaggggcgggtccccgcactcaaaaagaggacatgctcagtgtgattgtaaaccaaagcccccatacctatttcctggtcttcataacgaatcccatcatccacaaaaatgttgaactcgccaagaaccagatcaatctcaatagaagacttttcattgcccacattgttagaagacggacccatagaagctaacccaccaatattagcatcttggtatttccaaagatagtccatggccccaagcactaaccatattgtcggagaggagtttatgatcacgtacaaaggtatttcacctgtgccaaatacgccagccaagggtaatgaactgctcaagttcctgtctactcaagatatccacacaacccaaaaacaattcataatagcaagaggcgtccttcaaggagtcaaggccacacaaaaaccaatccgaatggatagacttaagagaaggacagagccaaagagcatgaatagtagtcttattattctgaaaacaaattggacaaattatagatgccttcataccatggcgagttaaattggcataagacgggatgaagttcagacttgccttccacacaaaatttttaatctttggtggaagattaagctgccaaagtagcttccaccgccgagaagtccctgaggagcctgaagcttgaccccaccccaaactagacattgtgctccaataaccactcttcaccgaaaaagatctgttattagaaaagtggcaaataagcctatcttggaaatcaaacaaagagtcctgttaggttatttttagtattaattttagattaagtttagtatatttttaatttagttccactcttgtttggagtaattctacgttttttaccttttatatttgcagatttaaaatagaagaagattagaaaatatcaaaggaataagatgcaaaacagataaaaaaaaatctcacaaaaagatgatacatgaaatagagaaaattgtgcaagaaaacaaagcttaaacttaaagcctgaattcgactatcttttgattagatttcggaaaaagtcaaaacataaaagttctagatctctcttttgtttttccagaacatcttgaatcgtttaattccgagtaatattgaaagagttatggccaaaatactatcagtcaacgcagcaaaaaaatcactgactacttaaagaaacgaagccatctggtgaaactccaacatgggttgcggcccagcccttgtggggccgcaacacaccccctaaaactgcccaaaaatcgtctttttctctcacatgggttttggtggtttcccaattcaaataggcatttaacatgtgggtttttatatctttttagtccataaaagcctatataaagggtgaactagagttgatttcagtcaagcaattcagaggaaaaaaagagtacgaattttagagaccgaattcaatactggaggcattctgtagagggtttttagcattattttattctctatcttcttctctttcttaaagttaatacgtgtgattttgcttccataaacatgtgtagctaaacacttgattagggtctagatagatattgtttgatattattttatggttttaatatgatttatttcctcttaatttctgtgtattctatttcatttgtgcttaattacttttaattgcctgaccatcaattaa

SEQ ID NO: 221538 - DNA, 1575 bp, Cannabis indica
cttaaaacaaatgtaaataatagaaagatgactatacatagttaggttatgtaatagttttggttttgttgttggccagttggtccaggttggctttcctgagttaagttgtttgtatttgtctctgttgattaataatttttttcttaataaaaaaatataaattaatccaaataaggaaagacgatactttgtttctcattgctctgctaggattcccagactccgatctacagtcggtgccatggcaggtcatgggcgtcctcgaaaagggccatctcaggggcggggtaagtcaaggacgaaactggaagccaaaaaaccgaagaagagaggttcgtcgtcaactgcagatgtgaagaagacgaagaggatggacgaaattttgggagttgaacccatggagttttccgatgaagaagaccgagttggaagtgaggatttagatgatcctgggctaatatatgttcttcaagctcctgtgacacccagatcatcactgaaatccatcaaacaacaggaggtagtatgctcagattttgctttcttcttaaaagcaaatcaaaagtgtgctaaatcgataaaggaaggtaatgcatctatcccccctgttcttaagtctgaatcagtaaagaaaaacctagtgaattcttttgagaataaatgtcgaaccaagattaagatcaatatggaagatattgaagatgagattgctttttggaatccatctattgtttgctatatactaggagcaaatcccccactggctattcttgaaagttttgcaaggcaattattgcaagacaacgttgataaggtaggattactatcctacgacatttttctgattcaattcaatgatgttgcaattagggatgagatcctatctggtggatatatatttttcaataaaagacctgttataatgaaagaatgggatccgaatatgaacgtcaaaaaagaagacattagggcagtacctatttgggtgcaattggaagatttggagctaaaatattggggggagaaatctctcttcaaaataattagacaagtgggaaagccaattatggtggatgcaatcactaagcaaagagataaattggctttccgtcgagtcttaattgaggtactacttaaccaacctttgcctgatctgatttggtttgaggatgaatttggatccaatgtctctgttcaagtgaaatatgagtgaaaaccaagtgtttgtgggcactgttctggtttgggacatcgcacgggggagtgtcgcaagaaaatggcaaagaagcaacagtgggtggtcaaaccaatagggcagccgtgtgctgaagtgaaagttgcagaggaaaaagccactgcaattgatcctgatggtttccagctgttacaaaaaattgtaaaacagtacacaagtgcacgtaatcaagtagtaaactcacgcaagtgaggtcgaacaacatggaattggattaattaccactaaattatacttatgattctattcggcaaatcaataattttcaagatttaaataaagtaatagtaattcaagaaacttaaagaaacaagtga

SEQ ID NO: 221539 - DNA, 2109 bp, Cannabis indica
gtggtaaataactgtttgaactttattttcgacactgtaaactactatacatttttttttttgaaaatttacaattgatcatagatcgctacaacgtatgcgtccccatattgaaattacagatagtaaatgaattatgatgtataaaatggtttaccctttttcctcactatcttaattcataatatttgagagagaaagtgcttacggttttggcattgttgctcgagattccacgggccacattgttgatctccgagccatatactagggaggaaactacccagccgaggtggtcgaagctcttggtatcaaagaagctctaagttggttgaaggacaaaggatggaataaagttgacatggaaactgatagtatggtaacggtgcaagcaatttttagtaatcaaattatgtcctctacttttggtttggttattagagattgtaaaagtctattgtcagctttaaataatgttagtattcgttttgtaagacgatcagcaaatcgagttgcccactttgttgctaggcgctcccgatttttcactgatcgtagcattcataggattgattttcctgatgagcttcaagctcttttgtacgatgaatgctaaatttcaatgaagttgatatttcattttaaaaaaaaaatgaaaaaaattcttctaaataaccgaaactatcttattataagaagtgtacaatagatatttctaaaatattatagtcagtaatataataatatttgccaatcaaacaaaccttgtactatttcctatctaccttatatcctaatgacatgtgatgcaataaatatagtcataaattttatttatttattatatgaatatagtcataacttcttgtttatttcgattttatttatttataatcttaatattatatgttttaatttttatatatttaacctctttttattttttagcgaaactcttttaaatttaagacgtcatttaaatatcaccattaaatattaactgaataattactgtgtatacttgtatatacataaaaggaaaattttgaaattaatacaataataattcagttaatatttaaccgtaatatttgattgacacttcaaattcataaataaaaaaaaaacataagaaaaatttgccaaaaataaaaataaaaagataaatataaaaaattaaaacataaaaaaatattgccgcaaattacttttacaattaatatcacaacattttatttgactcaagtacaatttattattattatttaatatatttaattacaccaaatacaacattactaaaattctattattattattattattattattattattattattattattattagtaagaaaagacaatacatatttctttttttattatcaaacaaaattagaaagatgccaattattatgccacgtttattattctattaacataatatcttgacatttttaccatcacattaaacttgaaccgttctatttgggtcaaaaacccaacttacaccaattaaagaagaagaagaatccttttgggccttactcttcaccatttcttcaatcctcttaaccttttgggccagcccacaaagatagtcttgggcctgtcttccttcactagaaagcccaataagcttttcaacattccatttggccaccaaatgttccaatgtttctctatactcagtcacagtataaaccccaatatgtgaggcagtgttggtgaagtgatcaaagagatttgggttaattccatcatacattaggtgaccaggcattgtgatttttttcttcatgtttcgcgcaaattccaaaaccatgtcgtttggatcgagctcaaagagcttcgaagctattttggtgtaagcagtttcgtgtcgtttttcatcgctagctactacaccacatatttgggcgagctttgtgtcaccgtatttgtacgcgagtttacctgtgtttcggtgtgatatgaatgttgctcgttcttgaaacgatgtgtagattgtgaagagatagggattgtctccaacatcagtatccttactcacggctgtttcatgcttttgaggggccttaataaaaaaatatataaagttaaat

SEQ ID NO: 221540 - DNA, 1950 bp, Cannabis indica
tgtattcttgatgtttcatgtgatgatgcgaaattcacacttttcaaagtctgaaatctgaatttgtctttttggaagatgttgattactttttccagttgatgtttcattgggttcttaagtaatggtcaaagctaatttttgcaatacagatcagtcagttgtagaccgggcaatcaatgacatatgcatccttatgcagtgcagtagacacaatttaaatgtggtgggtacgcttcttacatttcatttacaaacatgagacaatttatcaagtttttgggttcaataatagaggattaatcaagatagtcaatcaaatgaagagacattgtcttttatcagtaattcaaaagtagtttcagcgacacttcttagtctgcatgcatgggctgctattttaatctacattcagtttctgagatgcttcactttccatcattattgcaggtttctgttggaaatgggtatgcacctgagctcacgtcatggcgtaaatttatgtcttcatttttaattatattcgaaatggaaaattttgaattttgtattcggatatgcaatttttggtctgtaatctgatggttccttctcatgttaattaccttcattgtagccattaaaatgcattgtgaccacatatctaatgttttgactttcttggagtgaagctaaatcgtagaagaaataatgttgtatcttttcctcagttaatttgccattactataggcatgcattaggggtagttacccatcagtctttaactagctaacattcttgttataggtttgtgatgggatggctaagattctcagaatctgaaaagatatttgattgcataaataggccaagcacggtaagaatggaggatatacttatgctctggaatgtatcttcttctttcctctgtatttgagttctatctctgcctttgggttacttacaggctcacccaattcctgttcacgttgaagaagttaaaggtagctagacctttgagaaacatgatttagataataacttagttcaatgtcttttgataaaatttgctcaaagagatagaaatttcctttactctgtcttgcagatgtagttagtgttgccaaatacattcttgttgtggagaaagaatcaggtaccttagttgtttggccagccaagttgcttgaattactagatgcatttctacctactaaacttgtattgttatattttggcttagtgttccaacgattgtcaaatgaccaattctgcaacaaaaaccgttgcattgttatcacggtaagagtaactttcatatgagtcttaaactgactttagatatgtgaccattacacctcttagttttcatttcagggacgaggttatcctgatattcctacgagaaggtaccaattccattattttctaaataagctaagatgaatatctttgtactttcagctatattgatttctcctaatctgtaaaaactttgaccaggtttttgcgtcttcttattgatactttgcatctccccgcatattgtttggtagattgtgatccttatggttttgacattttgtgtacatatcgatttggctctatggttaggcatcttgacactgaattatctactttccaagcttgcttgtacataattgttagttttctcatccaatctaaactcactcttctgttatttaagcaaatggcatacgattcaaaaaatttaagggtcccagagataaaatggattggagtttttccttcagattttgacaagtattgtattccaaaccagtgttttcttcctttgacaccagaaggtgagaaatggactggtctttaataaatcgtaatcttccagttgtgatcttaaccgatgaattatgtctttttagacaaaaggaaaactgaagccatgttactcagatgctacctaggaagagaggtgccacaatggaggt

SEQ ID NO: 221541 - DNA, 3872 bp, Cannabis indica
ctccatgagcaagccaaatcgcctgactacgttgtttccaaaacagttcatcttttgcaaggtatccattcagatctttctctctttcttttaggcgaataaatccttggtgtgtgtgatcccgagacaaagtttctaattcttttttttaactctttaattcgagattggctctctcttttttgttgtttgttccattgccccaacacgtctccacattgatccaatttgtttcttaactcagctgccgaagtaattaaatggccctcctcccaactgtccttgatgattttgtggcattcttccttgtcggcccaagcactttcgtaatgaaaacgatgaccccaaacctttttctggttgttgtctgttggaatagctttgaaggtcaccacaagaggacaatgatcagaacaccaacggcttaagtgtttaacttttgcaactacaaaatgattctaccattgattattagctagtacacggtcaagcctctcaaagaccatgtttttctgccttccattacaccaagtaaagttgttgccttcaaaatctaattcccttaaagcacacatgtctatagcattattgaagtttttcattaaataaccaggtttctcaccccctccttgtttctcattcatgtttctaatttcattaaagtcccctccacataaccaaggccccttgaatcttctttctatacgttgcattaatgtccaagagtgttttcgctatgatggatcgggatccccgtaaaatcctgtaaaccgcgttaaagtcatcttccatattgatccaagcatcaatatggaaatcattaaaagacacaatctgaaccgaataaggagccttccaaaggagggctaacccccacttttgccttttgcatcaacataaaaacagccctcaaaacccaagtgagcacgaaccgtttccatgtaagcacttctagaacgagtctctgacagaaaaaccaatcccgtatcaaaatctttgacatttgtggcaagagccgagatagtccaagggttgccaagcccttggacattccaaattagggaattcattgttctcggcgaccctgcgatgcagagttcgccgcttcagttttttgttccacgggtgaatcactttgctgtgaaacttccctggaaagtatgtcgtatcttgagcctgtgttcatgttcccttttgattgagtcttgctcccttttggcacaaacttccgtcgcttctctcgagctcctttattctgattagtaaatccagtttcaaagacaattggaacatctatgagtgtctctgtagtctcttttccaattggatccacttccataagtctagctcgacatgccctttcctcattcaggttcagtagactttctttatgtaggtcttcaccattcctttttctaacacccatctctatttcctccttctctgtatcaatgtttcttggcattgttgtctcagatgttgcagcacatggatggataatagaggtgattagttgaggtttcgtattgcataaatttaaatgttcattgttggtaatgataggatattcaggaatagtacctttaggtaatcttctttggtgaatggtggtctctcgatccatggtgtttaattccatggcatgtgcagattggatagaatgtcctctgcatctgttaaatggtgtgttttgtcagcctcctccctttcctttttttcacttcttcctgttaagtccacccttagccaagaaccgaatgctggataaagtttcccatcttccttggtcacggtagcccgattcatagaacattgtttcatttcgtgtccaattaatccacagttaaaacacatgtatgggagcctatcatattgaaattgcaaccaaatccgcctttttccatgtggaaaaagatacccaggaaaaatcttggattgaatggagctcctcactttgaatttgaagaatccattgatggtaattcggtttacatccggttcttggatatcgataatgtccccagccatccctaccaatctagccatattagatttagtgattgctctcactggtaaattataaacccttcctgagatggagaaatttgttagctctgtttcccaatcggatggaatccctttcattcgttccagaatcagaaaccctgcattaagcacccatggagatttgcctaagattcgttcgagtgtggtgttctccaagaaggaaagaaccataaagatggcttttgttgaagtcttctttacttttaaatcccattcattttcccccaaattccatagcctacagagtatgttctttaataaagaacgattgaaagttttcattgtgcatagtcggccaatgaggcaagattttccaatgtcttcagtccctgcttcattaatttcccacccctcttcatctgttaccgtgagtttgctggtgtgggccagcaaatcatccattggaggtaagctttggtagcacgtctttagagtaggctcttccgaagagagcatggaggaattgcagagttcaccagggaagacgagagttctcagaacaatatatacgaggcttttattaatagtattactcattaaaattaattatttttttatttaggtaacgattttttattgggctcttatacccgacggtttaaaaccgtcgcctatactataggagatagttttaaaccgtcgcctataagggcctaataaattttatgaattccaattaaaaccgtcacttattcatgtaattattgttataaaccgttgggaatactaattttttccgacgattttaaacagttacttaatttttttagcgatggtctcccaaaaaaagtatttttaggaccgttgcgaattctaacttttgtagtagtgttcgagtagtgatattgtttagtctttttctgtaaacattcaaccatgcctcctataggtgaaattcgtgttcatctcactgaaggtattcatgttaacctatgtcaaataaagaaatcaattcccaattggagtccaaaagatctagcttaatggttgaaaaaaactcatggtctcaaagtgatacaagcaataatatctaagacgcttaaacgctcaagggacctccttcaagaagatgtattggtaaatccaaatacaaaacattcaaagactatgaagtacccagccatagaatctgctctttatgaatggtttgtatgctaccaagagcatgtcaatatgagtgatgatttgttaagagagaaaggaatttttttttctaaaaaaactttatcctgaagctacctcatttgtattttcaaatggatagttgaaaagttcaagcagtggcatgcaatcaattcctttcgacaatttgggcagagtggttcagtagatatgaaaaaaattgaaactgttttgccacaaacaaaagaagaattagataaatggttcagtaaagtggttcagccatgttatgcgggtattattagaaatttcaaaggctatctatcgtcaacaatttaaccgccaaattttgaaatggatagagaagcatgttttggaaccatcaaaaataagtatccttgatataattataaatgtagttgtgtcatgattaattgatgtcaatccacaaacaattgccaataattttaagcattgtaaaattaggactactgatgctaatgaattgcaagttgtgaaagaaattgaagaggaaaataaagaagtcatggcaaatttaggggaacatattcaagaacttcactatactagtgtaatggatattaatgacttccttaattatccaagtgagcaacatgtcacgtacgctttaaatgagaaagaaataactgttggaaattatt

SEQ ID NO: 221542 - DNA, 2352 bp, Cannabis indica
acaagtgcattactttcttggtgttgagattcatagagattcaaagggtatgtatttatctcaaagtaaatacattactaatattctagttaaaggttctattagaaagagccaaaccatgttcctgtcctacaagtagtgctcacaaactttatctctatgaaggtactccttttgaagacaaaacactatatatgagtaccctgcaaatacttaaccctcacaagacctgatgttacattcatcataaataagatatctcaatttattcacgctcctactaatgtacactaggaagtttgtaaatggttgttgagatatctgaaagaaacactctctggaagacttttgattctgttagttcctagactattgattgaagcctatcctgttactgattgggtcagtttccttgatgacagacattcaacaggtggttatgcaatattttttttggccttaatctaatcttttattctgctaagaagtaagaagcaataggtagttactcgattctccacagagtcagaattcaaggccctaactaatgttgcaacagagatcaagtggcttctctcattacttactgaacttcaggtccaacttgttaacattcccatcatttgggttgataactaaggagcaactgctttagctgctaatcatatttttcatgccaaatgtaaacatattgagattgatctacattttgtgtatgatcaaattttaaataatgaaatctctgttcgatatgttctctttgttgatcaggttgcagatgttctcaccaagtctctgcttaaggaccgatttcattatcttaagactaaattcaaaattgttaacacccattttcatttaagggggatgataactaactaaacagttagttagaagtagttggtattaggctcaatttctattatttaattttgtattttcttgtaactaactttgttaacaaaagatactttcttgtatgagccttttctacataaatatttaacctaaaatgctatgattttctagcattagtgctaaggcttttcatcttttttctctctctctctctctcaaattctccttttgagattgttggttttaagaaattttatgacttttcatttaattttattaatataataattaagctcttaaattttgatatctatcaaattatatcatggaattttgatatatatcaaatcatacctcttaatttttttataaaaattccgttaataaaaaattagacaaatttttttaaatctatctaataatcttaataattaggaagtatttttaatagttaaaaagttgaaaacatgatttgataaatatttaccaatttgttaacatcaatttttttttgttaacattacatgcagccaaaatgaataaatatatttgaaagtgatatcaatttctttgtgatatgatattacaccaaataatttacatcgacaacaagaccaactccactactgcaaaccagcacatgttcgtcgtcagattctcccccaactcttctcctactcaaccaaaaatgctctctttagctctgtaaattgggtttcatgaaagtgttttaagtctttttgtgagataaaactggagaaagctccaaaatgtatctcaaagaaggacgttccttattactcaaactccacaaaccatcaataccctttgtcctaaccaccaacacaaacccaattccaaattcagttgataaaccccaatttcaatccatggaagaagcttttctcagcgagttcgatgtgttgaggaagttgaaacaggaacgagatatcttctcagcaatggagtacttcatgtccgtagccaattctcgagctttcaagcacacccctttaacgtactctgccatgatggaaaagctcgggtgggatacccaaatggatggagttcagtatcttttgcagcagatgaagttggaaggaattgggtgctctgaagatttgtttgttcaagtaataaactcttacaagcgagctggttcggcagagcaggctttgaagatgttttataggataagcgagttcgggtgtaaaccaacggtgaggatttacaatcatattttggatgctttgcttggtgagaacagatttcatatgattaatcctatatatattaatatgaagaaagatgggtttgaaccaaatttgtttacttataatattcttttgaaggctttgtgcaaaaaatgatagggtggataatgcatgtaagttgcttgaagaaatgtctaagaagggttgttccccagattctgttagctatacaactatagtttcttcattgtgtaagcttggtaaagttgaggaagcgaaa

SEQ ID NO: 221543 - DNA, 2780 bp, Cannabis indica
gagtttgaatatcttaaatttttatctttagtgaagtaggttctgtgaatacacgtactacggccgaatggatggatatttttttgtattgttcatattattttgtttcttaaatttgtattgttttatgtacgttttgtttctcattttttgcatgtttaaaattttcaagaacgtcctattacaattgctatattgtcaaattaattttgatagaattattataaatttcactaaaaatgcataaatattagaggaaaagtgagattgggataaaaatgtatacacatttttttctttcaaatttaaagtttatatatttgtgaatatttttatttcaatagaggtatatttgttagattaattaaatgtgctaagtattagaattttagtttgataaagttaggtattttttatatttttgaaaatataagctatgtctattttgattttttttgtgaaatttaatttattttcactactacaatatgggcctttagcttttcttttttcaacgcattttataaaaagggaagctaaagggtgtgaaaacactcacttaattcgaaattgacatttagatgcagtgtttggtaaaaattataggtgtatatattaataaaccctatgccgtcagttgaaaattgagaaattttaagagtttttgttaaaccctattccgtcggttcctagcaaagaaccaacgacataggtgcacactttattgaaagtgtgcacctatgccgttggttctttgctaggaaccgacggcagagtatttatataaacaacacttatattgtcttcatcttccccacttcatcttccccacgataaccagcagccacaccagacccctgaaaatccacaaaaccctcgccaaccaccacgaaaatccaccctatctccctcatttcttcacaattttatcctatttttgtcttaaaattttctattttcaatatctaatcccatacactaaaaagttttatttttcacccatttacactgtagccgaacctattttaaaaaaaaaggtcgtggtataactcctgccaacgattttagtggagaaaacgttgaatctcaacgtccattaaggtataaatatgctttctattcattttattaatgtacattggtacgtatattttgtttttgtaattttttttttttgaaaatttttcattttattaatattatcttgagtgtgtgctataggtggctggatttttattgcaatttatcgccagattgcgtttataaggtaaatatttattaacttgatatataatatatatatatgtacatagtttgtgttttattattgaatatgtgtttatatatattgtgtgtatatatattgtgtttatactatttgtgtattttgtgtaattgtattgtatatatatattttgtgaatcagaatgaggtagtagggatttaattaatttagaattaaagtttttaaaattatattagtgtgatatataattgattatatatgtatatatatatgttatttttaaaaaagttaactatagaatttagtaactagttacttgttacattttttattaactagtaagtaatttaataattaaaactctaatttagttgtatattacattatattataggttgtgagctaatatttaaggttcgacatatcttagtgtggatcagatttgcaataggtatatccattcgctaacttttattattataattaattctcaatgcatgcttagttgagcttgattatcttaaatattcatctgtagtgaagtaggttctgcgaatacatgtaccgcggtcggatgggtggagaaattgtgtattgtttatgttattttgtttgttctgtattgttatatttattttgttttttaatttaggcacttttaaaatttttaagaatgtccaattacaaccgttatgctgccaaaatttcagaagaattagtaacttgatatatagcttactttatattgtgtttgtttatgttgaatacataatttttgtttatgcatttaatatttcgtatagattacttgttatatatatagataactttaaattttatttgttaatggtgtagatatggtcaactcgagttcaggattagattcaaacctagagacagtgtcctaggccgatgcctacacgaggagctactcaaatgaatgaaatatccaagctaatggatcaagggaaaagagtggcccttaaggtgaatgacaaaggacaatactgtggcaaaagttactccaagctagtatcgactttaggagttagatgtcgttagacgatagggttgtcctataaaaattggaaagaagtcaaccctacactgaaaaataaagttgggacagatatacatgtaagcagttatttgttagaattttgatttgtttttgattaattcagatgttaactctaatcgagtttgttttccttcaaactagacgggttttataaggctggattccttcaaatatgattgtctgatccttgcagggaagctaatgaaagacttcaagaataggatgacaaaatactttataatgcccgcaattgaagagaaggatgtgcaacgactgacacatgtccctaaaaaccatcccgaaattgatcttactgattggttaaaatttattgatagtcgactaactccgtaattttaggtacgctaattatatttgtactaagataaactcttaaatacaactacatgtatctaatatatttttttggcattgtaggaattgagtaaggtg

SEQ ID NO: 221544 - DNA, 6427 bp, Cannabis indica
acaagagtgtacacataagctgtctatgttggctgttaattaaattaaatcgatgacacgttaaatttactagcagtaatgtggaagattttaatacttttagaattggagaattaagtgcaagtgtgatgatagtaaaaaatgtttaaccgctaaaaactttattctattttttttttttacattatttttttttactttttattctaataatattctaatagcaaatacttctaaaaattattaaaataatattatattattatttgatatattttaaataattaaatttatttactctataaaaaataataatgataaaatgaaagtaaagatagcaaagataacactttaaggcaattttacttacatttattttcgctctaatagtaaacatttattaaaaaatattgaatatgtccatatcctcaaacacttttaagccactaaggctagcttagtggtgagggagggatggaaaaaagggagaggtcatgggttctaagctattaagctaatatatgattgtaaaaaccattacgctacactaaaaaaataaaaatatcctcaaacactttttaagacatttaccaaaattatagcattccttggttaatcatttgacagcgactgaaaaacttggtttaattgatataaaaagtgttatacataatggaaagtctttttgtggttgtttgtagttgcttccattctccattattaaacaatatacaataaacaaatttataaatgtttatcttatcctatcataaagtatattagaaatagaatctatacccaatattcaagatgtcatgatttagagttttataactttgaaaatctttattttaaacaaaatcaaagcaattatcccccgaagagagaggaataaatcatcgttcaacatgttacttaacatgttacatgttacctaataaaatattttgatcggtttggaaaatatatatactatattttgatgataacttcgaaacaaataaacaaaaaaattattcttacataatttatatgcctggtttttatttttttataacaaaatattgtatctatgttctccaatatattttaggagaattactccatatattttacgaattttaatgcccaatcaataattgcaatgccaatgtggaacatctccaattttatcattaattgtccccaccaattcaaatttcgattacatattaccagaaccaaaactaccttttcccccttgaagaaaaatcaaaattttttacagaaaaagaaaggaaaacaattcaaaagccatgtttagaaaatattatcacaccacaaaaaaaaccaaaaactatgattagtatataaatctcattgcatatgccacaatttaggacttatcagttatcacatttatattttatttctgtcctcacatggcaactggattcctcatattcatctcattattcacatcctcatatacagacaattattaatttatttaattatagataaatacacatatagatatacaaatgaagatgctaaaaggcatcacagaggtgaagacttcatagtttttagtcagaccaacttttcagaaatatctttttgttttggagccaaagttagtctttgatgggcagtaagcttcttctcgtggttcatccatggagaatactctcactcccttcactgttttgactctttacaggctaccaattacaggacttcacctcctcctcatcttcctccacactctcttatagttctcgattaccgttattttgatttgatcttaaatattttattccttttctgcgtgtttttgttttttcttgagaaattaaaatcaaaacaaaccaacccattcccccaaaaaattcctttatttctcttgggattgtttattgggtctggaaaggtgagaaaacacatatcccgttttctttacttttgaatcgagaattactgggaaaacgatggcgtcggtgttcctataccatgtggtgggcgatctgacggtggggaagccggagatggtcgagttttgtgagacggagacggtggaggcggcgatacaggcgatcggagagtcgacggaggccggaatagctgtttggaagaaaagatcagtggtgggtgtgatcgagaataatgaaatgaggcagcagaggtttgtgggtattctaaattctcttgacgttgttgctttcttggctagaaatgagtgtttggaggatcaagagaaagctatgaagacacctgtttctgaagttgttgtgcctagtaattcttgcttgagacaagttgatcccgccacaaggttggttgactctttcttcattctgttgattcattttactattcaagtttcaattttctatggcttgttatacttgcttaattgctttggatgcctataattgagtgttttcttgtttgtatgaggaaagctgagattatgttcattctgctctgtttctctaaaatgaaaaaaagcttttgctctcttttatgttctttgtttgtttggtttgtatttggattcagttcttgctcgagttgaaattacagcctaaccttcaagcagagcaggggttgggggcaatgatatgtttcattgatatttatggtgatttcaagttttgagccaagacataatacatggtttttactttgattttgttttctacattgtaaaatacaattgatttaccgtagtactatcaccagtgctcagttttcatactcatacgtgaaatgatatcttgataaatgagggtctcttctattttgtgtattttttttactacaatatctttccagcactattcagtgtaagccactaatgatggcaatttccttgtttaaaggataccttaattttatctcgggtttggggtttcctccaaatttggaggtcagatatttttatgtcctcaatgatggactaatttaatgttggatgttaagctaacatacatactggaagataatttctggctaaggtatagtgtttaaaattaagcattttgtgccttactcatgctttatttgcttatctggaatgtggtcaatttggagtggggctaaatcggttcctttttgtatatatattgcagttgtatataagttcgaatttcttctgtttctgaatataacagatataatggatcattgtatgattcactgtaggcttttcatctttgtaagatccacattggaacaggatcaagtgatagattttcaccaatgactgatctcattctaatgtttttttgtcttgtacaagattgattgatgcacttgagatgatgaagcaaggagtgaagcgtcttctggttcgaaagagtgtggtgtggaaaggcatgagcaaacgattctcgattctttataatggtaagtggctcaagaacgttgacaccactggtggcagtaataacaacctttatcacaatccaaattggccctcatcttctacaacgacatcccgtgacaaattctgctgtctgtctagagaagatgttattcgttttgtcatcggttgtcttggggccttagcaccacttcctctctcgtccatctcgtcccttggaatcatcaacccaaactaccactcaattgaagcctcctctccagccatagaaaccaccgagaatattccaagagacccctgcgcaattgctgttgtggaacgtatgtatggcgatcaatgtaagatcattggtgagatctctgcctctaaactatggaaatgcgatcatttagctgctgcttgggctttagccaacttttcagctgggcagtttgttatgggagttgaggataatgtatcatcaaggtcacaagatttctgtttgaacccaaatgttggcaacaatggccaaactaatggaggtggatcgacaagggccaggaagtttagtagcagaagtatggggtttaatcctggaaactccagttttggcattagtaggagcatgtacaggggaagaagtgcacccttaacttgcaaggtcaccagctcattagctgccgtcatggctcaaatgctgtcccacagagcaacccatgtgtgggtgattgaggatgaaagtgaggacgttttggtaggcgtggtgggttatgcagacatcatggcagctgtgacaaaacaacctgctgcttttgctgcggcaagtcgacattgtgaggggggaattgttaatgaaattcaaacttgatttgtttgtttgattggtattatttgatttgttagcctagtaaaagtgcccaagtctgttaaacttttccaaccaaacatttttgtttgagaactcagtactttgaattgaactttcttttgtacttctagcccccctgcaacttctactggttgtggctgtatgaattgattttgggcttgtctggcgtggtatttataagatcttcacaatctgtatgataattgtaatgaatgatgatgttataaataatggatgtgtttcttatgatactgattatttaagagctcatgttggaagaggggaaatgatggtgagatttttcttctggtttggtaaacatcccaactgaattttagtattgtagtaagaccaatgtccaatggagcttgaagcttaagctttagacagcaataccattacataatataattatatatatatatatatattgcttttttatatcccagtatatttattgttattaactattaagtggtggagtctataagatttgagctaagttgtgctcattcaaaacaaagaaaaaatacccagaacgtatatatacatatatattgtccagatcttagtttgaaagtcaagtacacatggcttgcactgcagtagtagtgggtggtaatttggtatatttgaatcctccaactcagaaagttcacagcatcaaaccaatattcattctatcatgataggtagaacattttcaagaaattagatgcctcattccttggtcataatacttttccatcttcagcaatttgtcactgcaactacacccacttatattttgtcttcttccaaattataatgtctttggattttaataaccaaagggtttctctctattttttttttggcaaaagaaagttaaattatggaagaatatttctcgtacaagaaagtctgtataccattgcatagtagctctttgaatggactaaaatttggtccttgaactaaaattgaccaaattgttatataactcagaatcagatagatgaaaaataatatgctatacccttctacgtgtctatattgctattggtctaattaagtattggacatatagtttaatacaataatttttaaggaatatcactagccaattgtaagacgacacatctaaaaggtactaggcactactactaggttgaagttacgtgcacatatgcttaattttttttttttgaataatgtattattaactttttattattataatagacgatgtcatatataatttaactaataaacatgtcaataagaaaaatgtttaatataaattataaacataaaatataattgttgtgatgcttctaatctttgttacacctcaatttgaattcttaaatttgtaagagtttagctaatttataaataaaattctcacgtcattgtgtagcatgcaaaagtaataaaaatgtgtttgaagtagtcctgaacctcatctcacttgctcgcacgagccttctctagttacaaccaatctccttgcattcaaagaaaccttgaagaactgttgctatgaactctttttcgtcttcctatcgagccacatagaagtgaaagtcctaaacaaacttatagataacaattattccatagtagtgcaagttttatcatattttctaagtaggaatctggggacaatacaaaggggattatattatcttagtttaaaacccataagaaacatctcatgcacatataaaagaatgaaggactttttaatttatttaactaatacaatttattcttggaccgatactgaaaatatattcaaatctcctaaactaaatttctttatctcaggccatgataaaattgtaaatattgtcagtatcatctaatagatatagaagcatgccttctgtatgaatcattaattgctgatacaatcattcatgcacccttggtataaaaaaacaggcatgataaacaaagatattttcatggtaaaatttatcttttccagcaatttaatttttttttatactattactattataattagtcatgaataaaacagtcaataacatattaaagttatgaaatctctaattaacagttgctagtatgatttactgattctcgttatttagtgcaagcaatcttgattcgaattactgatgtaatatgacatctaagtgaaggtgttgtatataatagagattatatatgacatggaccga

SEQ ID NO: 221545 - DNA, 2474 bp, Cannabis indica
atatctgatcatcgatgaatgatcaaatatcatatactagcggtaccctatcacaactgttccctaaaatatataaataaaccataataaatatatatatttacactagttgagaattgagagagtattatgttcttattggagttacgtgtcttgttgtagggaatttaaatgattacttttttgtgaccaacttcttcccaaggcataaaaaactccaatcataaaggtaaatcatacaaaatacataatcctttgtcttgcataacatgaattaccttaaatgaagcacatcgataaatacacaagatcatagtattaagaccacagcagattcagtttaatcataacatagagaattattagttcttccttccttcagacaagataatgtggtatccatggctgcatttcaaaacaaaataaacgttagctggtacgagaagtatggagccaggagcctgcaacttaataagtaattacatttaaacaaaaaaatgaaaaaaagagttagaaaaaaaaattatgggaattcaaaatcgtacgtggatttgaatggcgcacttgtaactccaactggtgtgttgaaggcgacctcctgaaaaggccctgccatcttacctcgtgggaaccacccaagatctccacccttttttcctgatggacattctgaatattcttgagctacctacaaaagaaaatcatattacagttcaacaagtttgtcttgaaaattattctgattgatgtatgaagctagcaacaacaatatcagaccgattttccaagctaaaccatcactaagtttaacaaaaaatacgaactagatgatattatcagggttgaaaaaatgtatctaatataagttgtggcaacactaaacatcaaataattgacttcaagaccaaaaggtaagactattgacatagcaacaaaactaataatagcactaaactttaaacaagattacaggctagcaagatgaagaaacataacatgggcaaaagtagaacatgaatatgattgaagaatgagtaccaaatcaaaatggataaattcctaaagagtagttacctttgcaaactccgcaggcgggaccttatctccattgctaagccagccatcttggagcttcttgtacgcttcattgatctttccttgtttctcacataagatatgccttgctaaaaccaattaaagaaaaatgcacacccgcaacataccagaaaaaaaaaaagaaaaacagcaatgatgagaaacacaatagattacattcaaacttatctactgaaacaaattgaaaaaagaagaaacctttaacataagtgcaggtgccaagcccatctgcactcttcccacccttccctttacccttagaagcattctcatcactccctcccgcggcttgtttcccctttccttttcctgactccttcgattttgcatccttccccatgtctctacctaatcatcaaaatatgcaacacttatgctaatgagcgaagaaggaaaaaccaaactagaaaacgttcttgtaattttttgaatcaagcctggaaatatcaatatctgaaatctaaataaattcaagataatcacacacccaactgaaataacagaaaaattctgggtataaaccagttcttttcagacacagcaataaaaaatgaggtaattataatcccaaaatctggaaaaacttgtataaatactagaaaaaacaagaaatagattataataaaatttatgtaaggccgctgagaaaaaagtatttattttcaatcacatattgtaaacttaacgacctcaaaatccctgaaacaattgtgaaaatctaacatctataaacaaaatcaaagcccttccccccttattatagctaataaccctaataaatcctaaacaagtctaaatgatactatacactgttgagttaatacaaataaaagtgcgacgtcattcatacagattcaagtgaagaaagaaaaatcacttcttctacaaaactatacaaaagtaataatacccagataccgaaaaaccagtcaaagaagcatatagtagatttagattatacgcaaaacccagaaacaatattataaacaaagataaacggatacataaacgactgagtaatcaaaatcaaacaatagcatttgggatgtataagatagggatatttaattctacgagaaatctaaagttggattgtaaaccttaaagattcgattaaagagttgcaccagcaatgagtactcgcttgtaaaggtgaaaaaagaggttgaggtcgacaacttatatacagtcagttgaggtctcacgctctgagtcttttctccgagccctgtaaatacgtgcgtgctagcccgtattattttttggaaatttgaaaaactatactttaaaaactctaatactttatacctaaatcaatatatttcaaaataaaaaaaatatgacacttttatgaaaaa

SEQ ID NO: 221546 - DNA, 1582 bp, Cannabis indica
gtgtatgtggtatttgtgtaatttttttatttgagctgtatatttgtttatttgaccagctgatttgttatttttttggctaaaacttaaaaagacccttaagattttattcctattatatatatacattgattttcctatatctcccctcaagttggtgtgaaaatatcttccatagccagcttgctattaagaaaatcaaattttattttgcacatcccctttgcgaagatatttgctacttcttcatcagtttgaatataagacatgcacaccaagacttgtttaattttttctttaatgaagtgtttgtccacttcaacatgcttagtctggtcatgcatgaagcatccaattatgagcaattataaatttacaatcatagctttattattgcagtataaatttataggtgatacttttaatgattttagttcttcaagtaatcttcttatccacaaaatttcacacatgccatgagttactactctaaactcaacttcaacactacttcttgctacaatattttgcttcttgttcagccatgtgactaaattaccacctataaacgtgtagtagcctgaggtagaccttcgacctattatgcttccatcccaattagcatcaatataggctcagttttcaaatgtccttggtcgtgcctttaataataggcctcttcttggtgttcctttgggatatcttagaattttgtagacagcaaaaagtgttctaaacctggtgaatgcataaattgactaaccatacccacaaaaaatgctatattaggacgagtgtgggataaatagataagtcttccaaccaatctttgataacgctctcgatccttcacattaactaattttgtaggttgtaatttgaagttgggttcaatagaagtttcaaggggttttcaacctagcatacctgtctcgcttaataaatctagaagatacttacgttgacttacaaatatacaagccttggatcgagcgaagttcattccaagaaagtattttagagcacccaaatctttgatttcaaattctttacaagcttctcttttagtctctctaattcacgagaatcattatcagttagtacaattttatcaacatatactataataatggttacctttcctttgattgagtgtttgcaaaacatagtatgatcgacttgactttgtatgtaaccatgaagctttagtaccttaccaaatcggtcaaaccaagctctacgagactgcttgagactgtacaatgattttttcagcttactaacattatcagttagtacaattttatcaacatatactataataatggctacctttccttcaattgagtgtttgcaaaacatagtatgatctgcttgactttgtatgtaaccatgaagctttagtactttaccaaatcgttcaaaccaagctctacgagactgcttgagattgtacaatgattttttcaacttacagacattgccaaagccaaagtattttttgaaacctggtggaggacatatatatacttcttctttaagatctccattgaatgcattcttcacatcaagctgatgtaat

SEQ ID NO: 221547 - DNA, 2509 bp, Cannabis indica
acaataaattaataatgtaatatttaatataataaaaattattattttctaataaatatttaaaataaattttatctatttataatatttaaaataaataaaatattttcataaaataaataatatttcattttatttggtgtatgataattaaaattaaagtaaataaataatatattaattaaataattaaaattattttggagtttttttattttatattttaaagaattttttttttttgtatttttacaaaaatctacatagcatttcacataacaactagtatagcaacctaaatcgtagttaaaatccacatagcaacccacataaaaacaactggtgcaatcaccagagcaactcaaattgtcaattttaaaaaaaagttaaaaatagtatatgggataatttctcaattttttttagtaaataattacaccgcatgagaattagagagagtaattgatgtctcccagttactttaaattacacattcattgtgtaattaattgtgtaattacgtgactagaattacctcaaattacatcaaatttcaattctaaagtggctttccaaacgctccctaaaagagattattttactcccctctaaaagaaaaaaccctaaaccaaaccaagcataacctaaaaaacctaaagccctcgcccttcgaccctctattgctttccttctctcggtggcaaccacaaaccagaaaccccaagcccatatccagtggcagaactaaagcatcaaagtaggagggaccattatcaacaaatctaaaaaggaggggccaaacaacaaatttacaaagaattatatataatttcttttagggtgtgtttggaagtaactctgtaattactagggcggtaattacactattttaaaatataagatgtgtttggatatgagatggtaattaccaatgaattcttaatatcttgtttggcaaaatagttagtaattacacaaaaaaataatatttttttaatagttaatacttaaaatagaaaattttagtaatcacacagtctaattataatcaattctcaagaagactataaaaacaagtgtgattagaatccatcaattacctccaattactttgttaaaatgttattacatggtcagacagacatactaaatcgtataatttctttcaattatacacaaatttaattacacattggctttccaaatacgcccttatttatatatacacatattttataaaaatttcatttttagggggttatggccacctcttgggtgcacatggttttgcccctgcccatatcctcccatgaccgcactacatacgcacgaccgatgaccgtgcagcgcaggacgggcaacgaggacaaccccctttccctcttcctttctctctcccgatagcaactgccacccacccaaaccaacaacaacaaccgatgatagaccgaccaccacacacaggacgggtaacagatcagtccccagcccctagtgcgacccccttcccccttttttttctccgtgtctctctctaatttcctttttctcctctttcctttttttgtcttaaatcaatggtccatcacctcctccggtctcacaatcacaaatataaatatattttattctatagatatatatattatattatgtttgtgaaatgtgattgtaaggactgatttcgcatgttttgtttttgttcgtatttgtaaggactgttatatttcaatcatatagcaacaactgtacttatgtctctgttctactctttatttttttgtaatgataaatcgaaactatatatagcgtaattatgttgtgtggccttaattgaaccaatattttatcatctctttttctatttgtttgaaaataaaaaatatttgttaattgtttaatcagtctgctatgttaataaatttttatggtgcatataagagttataaaaatagaagtgaaatttaataaaaatagtttttatctaatatgaaccataagcctaagaatcttaacataatgtatatagattaattctaaactactgaaaagaatacaatacctcttgaagaatattagagtatcttctttttttcgtataagcaacgatcatccaatccaataacttttgttgaagaatccacacattgatcttttaagctagctacaacactcaagaatagagtgagctattagatcttatttggatgaatagatttaagtattacagtgtgtacttaactcatgagatattgtaattgagacaggattgttcaatcttgtgtgttgtcgtgtgagacctagagagaatggtgtgtgagagagagagtaaggagtgagaaaatcaatttctattttctctctaacttatctgcatttttttgttaatttttaattattaatttatgatataatatcctatatatagtgttataaataaaaattttaatcctttatttataataaaaagaaactatttaatttagtttgaatcagaattcaaatttaa

SEQ ID NO: 221548 - DNA, 2626 bp, Cannabis indica
tagctttattctttgcataacatgttatgtttaataataatagatataagagaatattgcatgaggtgtaaaatcccactttgtttggttctcaattttcatactcacatcttctctactttgaataataagctaatttcgaaataaaataaaattaaaggattttatattggtggtgtagaaaagctacatacaaaaataatatttctataggaaataatgataataatttcaatggaaatataggtaattttgtcaaatttacactagagattaagtttgtaacatcatccccaagccgggtaaaaaccccaaatcatacgtacaaaaccaccactgaccaccttaagtaggacctttgccaaaacgagatcttaacaccattaagagcaccaccaagcgcgattgttgtcaatgggtcaaaatacaaagactaagggagaattataaaacaagctaagtgaacgcctttagaaaaacaccatcataaaaatacacaagcacatcaatcagaactgactccctagtacatgaacgaaacaaattctataggctatacatatccacaatgcacgtgcaaaaagcgatgccacatatgagaagagaagaattcgaagatcaagtcaaattggttcatcctcttcaaattactctgttggtcgtagttcttcatcgaacatcctagttgctcaaaatgcttctttaactcttggctctcgacctatatgtcagctccgataccatgttgagagaaacgaaaagagaaaaaagaaaaacaaaaagtgtgattctcattagagctcgaaaggagagaattagctcttatatacatagtttagttaactaaaagtagttaaagtacaactagaaactaaaatagattctaactaactataagaacaaacatgctaactatcacaatgacatattatttaacaaagagaaattttagattttttttttctgttaaatcgagaattctattcaaacacaaattctttatttttttataaaatatatttgttactaaaactagagttagcatatatatcatttcattatcctcacaattatttattactaaatcttattcacactaaataaatatttatctaattatcaaaactaatggggttatagtttgatagttactataatataaatttcacaaattactcacacataaatttcacaaattactacacataagcaatgtaagaaacacgtacataagtttttatatatacagatttaatcacaccaaaataaatttaatatacgcaacaaattgtgagatagaaattaaacaaaataaaaaattgagtccaatttcattattttgtgagcttattttcacgtaaatgaaatgatttttttcacttaaataaaaaaattgatatttttttatcataatggagaaaaaattgtcaatctaatgtgcaaggggtgtgcagaaaattatccaatccaattacaaccgactgatctaatcccaatcgatccaatagttacggatatccatcataattagattagatcggatgtaaattttgaaaatccaaatggataaccgaccaaaccgatccaattatcatccagtgattatctaaaatattaattctcatcttcctaaaacgctaataaaattatcaatgtgtattaaataaattttattttttagcagttttattatgagatcatgagaattgagttaaactaaactaatgtttattatgtatgttggactattaagtttgaaattatgttgctttatacatatttttctttttaataaaatcaactttaatgatagctaaaatagattggatgaatcaaatccaatctaataaaaaatcaatcaattcatccaatggttggaatcgatccaatccaatacatccattggatcagatcggatgacttaatttaattggattggattggatggcgaaattcaatattcaataaataattagattgaatcaattgggtccaaatccattggatgtgatccaatgaacacttgcaatatgtatattttttttatatttgcatcaaattttatttttcatttaattaatttaggttaactaagattttttttccatgaacttttcaggtcgttaaaaattctctttgaactattgaggttgttggatttaaaaacttttatctaattttatttgattttactaatatggtaattgtccatatactaaatcgtaccccttaaactttgatattttcaaaataatatccccgaacttaatatgtacagaattacgtctcctaaatttttattcacgttagaatttttttagtaaaattggataaaagtctttaaactcaagaatcttaatattttgagaaaaattttaacgtcaaaaaaattcaaagatataatttagtacatgttaaattaattcaaggtcaaaaatctaaattaacttataatttatatacctattttcaccttaataatacataatgatgataaggtataaggtatagtattttagataatattaaacttcttaaaatatatattaaaaataattaataatttttatttttattacacttttgtagtttgagacaaccttggtagctcaaacgtttttttttt

SEQ ID NO: 221549 - DNA, 1579 bp, Cannabis indica
tatagtagtgttagcacatcaagtatttttttttttttggttgcaaaataatctatattttagcaatgtatcaataatttgatctccataaatgcttaaagaaaatatagtaataatagtagaatagtaatctactaatctctataaataatgttggtattattaccttattagaatatggtaattaagtaatagaattaatgaatgaacctgtgtcgagaagaccgatgatgactccttctcccaagttggcgtcatgcaataggttagacttagaggatgactgaggagacagtcccaggtaatcccagctccttgttgtttgcaccgaatgtaacttgtttggtatcaccctaatcactccaggtaatcctttaaaatattataataataataataataaagattatattaatttactattattattgtataaatgatgtgattaatttggtcaatataatttaatatgtttacctgcaatcttctcaacttgagattctgtaagtttagctgcaaatccagaaaacccatgtctataactatacaccattgatttcttggcctcttctttgctgcatgcaccatatttatatatatatatatatatatatgtgtgtgtgtaacaacaattaaataattacttgttcaacttttattaatatagtaataacttcacttatttgaattattaatttacctctcaaggattgaagaaagcatatcatggtgcatattggtcacgtgctcaggatcatggtgttgtttttcacccatgtaaactatgtgaacctatacacacatgaacacaacaaaactattaaaaaattagtcttattatgaaatacatgatcagttcttacatatatttatttttgcttagaattaatacttacttcactcttggcatgaacctgcctatagaggaagactaagaaaatataggctatcaaaagcaaagaaccactggtgctcttcattatgtaatgtggtgagactttattattagaattctaggtagtaccacctatatatagttgtttagagcttgcatagtggtaatttggtgcattgccttatatagctagctagagattatcaatgagtaaattccgaaataagaataatgaaaataggttctttttttttttcaattaatgagatttgatttgaatgcatttgtataatttatccagatttaagaaaaatattatgatgttataagctgttcaatgtattatatatatatatatattaatgtgatgactaatgtaccttaaaatatacaaaatatctttaaattaagaaaaaaaaaagaaaagaagaaagaaagaagataattttgattaaaaaatataagtgagtaacttaaaaattaaagtcaaatgtagagaatgttaacgtacaaatatgtataaaggattcgggtctaagaaattaattgaccaactatttagcatagaataattgaaaagataagcttcagaaagaaagcatggaaagttaattaagcaaaaaattatctcctaaaataaaagccttctccccttcttatcatgctttgaatttctatacaaca

SEQ ID NO: 221550 - DNA, 1368 bp, Cannabis indica
actattgtgttctatgttatatacaaatagatcttggtatattagtaattttctaacaaaatacacaattaaaattgtatactatgtgtaaactatttaccttggctttaaatattatatatgtaaactattttttttcttaggaaaatttatatgtacaagctgtgtattttatttagtaatttttttcgttctttgtgataaaagaatttaatactttgaatgtaaaaatatgatttatttaaagtcctattatatttattcttctatttataatatatatatgattaattacatattatataatttttgagtgtaaattgaaagtgagataatcataactcaatttttaattagttgtctttgtcctgctctatctcaattccaagccatgtacatagcatgcacaatgagactggacaggtggttgtaagcagtgacaaactcagaatttttattttgtggaggcttatttatcaatgaaaaatatttatacctatattataatcactcttattatatttatttaattttgtgggagcttttctactattttaacctataattattaaattaaaaaaaaattacatttaaatttttaaaagataatattgttagtggggactatatagcccccacattaatacatgtgcatccatcactggttgtaagagtctcatccaattcagtccttattcagtgtgaattttataagttgaattcaatctaattcagaaaaaatagcgttaaaattaaattcaattcaattcgtgtaaattaaatcagttaattcagtcctcatttcgtagtcgcctctgtcttcttcattacgccaagccattccgagagtctcgttcgatctttgcgagagtatggttccatcgtcaccgcatcctcatcaatcttttcttcctcagaattagaaaattccatcgtatcgatctccaagatcgctgtcatagatctcgtctttctcaccagtcttcgacgacggtcccctctgtttttgaatcgatgccttcgttccattttttcggcctttggtgctctcgcagaagtaatttgaaaaatctccaaaaccctagcggagcactatttggtacttagtcttttttctttttgaaaattaactccccacaaaatgtttaaaaattttatactttaaaatatatatttatgtctaaacaaactcaacaggtttattgatttaattaatataagataataacgtttttttaaaaatgttatccgcaaatgtaattatatggtgaaattcttgtagtggttattttttaatattaaattatttaatattgattaaaatagattttttttctacatcaccaaagttattacttaaatatgtac

SEQ ID NO: 221551 - DNA, 1828 bp, Cannabis indica
aaaaaaatcaattctcataacaatttttacatgatattggcacttcaattcgataatcatttttcatatattgtactagttcacttaactatagtaatttagtattgtatctctcttatttttttttttaaacaagtagcatttagtttttaatattaaaaatattaaattttaaaataaattaaataaatgtaatgcatttgggctcttcacgtattcatatttatgagttagaggaagtggtagtaagacaatcgtaacattaggtatttttgccgcaaaaaataaacattaaatattgaagtgtataaaatttaaaatattaggtatttatgccacaatttatcatgtaaataaatatatattatatgcaatttctagtatattggctgaaaagcttgcggtttcatatgttttggtcaacatattattcttgtggttttgttactctttaaatatgaatagatttatctcaattgtgaatagttactttttttttatggacaaatgcttatatatcaatagatgcaactctattgtgaatgattgtctaagaagatgcaaatgttacatttatgttaaaattaacactttttgctaaaaataaacacaaaattctgttaaaactcaacaaaaacggttaagacataacattaagtattaaataaacatttatataataagtaagatatatgtatcattcacttttagtgtaattttttttttgtattgtcttagatgtgattgcacttactttaactaaatattttcttttggcttctaataatcctgtttggtggtctgattatcatttgtgtatcaaaaacattattatagttgatgtaatttgattaatgaagttttcttagtcatggacctttaagagtgctcatctaatttaatttgtactatttttcttatggtgtacctgatctgcactaagtgcggatttcatattttggatttaatccaatttgcacaataactcaaatctaatccaattcaatccgcaaaagtactaatttgatcggttattttaaattgattacttttcaataaaataaaacaaattattgttgttttatgtctccaacaataaattaaaataaataaaatataacaaacaataaattcaaaggaataaaaaaattataagtacgtaaaaagaaatgttcaattttattttaaattgtatgtaaaaaaaaattatacataagaatataatatacatttgataaattaagttttaaaatatatttgtattatatgaattagatttttaaattattattttcttacattaaaatgttaattgtataaataatttttcaaaatttatataactatgtgtggattgaattagaatttatatatgtcaattaacatctaatctgtataatgcaaattttaaatttttctaatcttatgtaatccgcacaagtgtaaatatttacacttttcaaattacattaaattatatggattagagtgtgttgcccttaattttgtccaaaatacgtggaccaatgcgaccccgacacgtgaatttgaggaatatggttttgagataatttggctaagtcttgttaaataaaggagatcagcaagaaacatacctccggagagggcataaggggtccacgtactcccgaagggcaaagctatagcaaagcacctccgggaggtatcaaaccccatctgaacagtcacctcgcatttaatgctgcatgggagaaggcgtattggaattgccataagtattaagtctgacagcgtaaccccccttctgcagttattacgctatgaataagtctagtgacggctactt

SEQ ID NO: 221552 - DNA, 5686 bp, Cannabis indica
agataaaaatatcaaaaattaagttcatagtcatatttgtattattttagataatatagaatatattttattatttaacaaaataaaaatagtaatttgtacaaaatacatgatctaaaataatattaataatattaatgagtaatatattaatattaattctcttacttagtcatctctcaagtcttaacctttgcaagttttaggttaataaattaggtaaaatcaaaatagttattccaataaactcattttcactcaaaatttgcaattttccaatccacaccactacccatgtgatctttatcaatattattattatgacacgtaattggacataatactcatatattatatattgataatttagattgattggtaatctaattatatattgtttatatataatataatacaattaagagtgcacatggcattaaaatcacaataattttacgtatcatgttgacccatgatccaatccaagtgtatcttttgagccattaagcatataatatatactatttccctttttatatataaatcaaattataaaatatatatttatatatataaggtcatacagcaaagagtgagctgtttgagtatgaaatatgaacatcctcaactggtaaaagatctatactaataaagctgtgtttgtctctttctcaaaaaatatgtttaaaaatcaaaactttttattttatacaatcaattaaattaataataataataataaaaaaaagacaattatccaaaattccaacattattaaaaacttcaaacccaccaaatactaaaagatatttctactgtatcttctaaaaagaccattttagtacatctattacttattttttattcttcaaacttattagtgaaaattattagttatgattgtaaatgttatagttatttatgaattaaatgtaattttttttttttttttgctaaatttacaatattaaaaataaaatataaatatacgttgtgtaactatttaaaaactaattaagatttttatttcttgaattttaatatgtattaaatcttactcacagaattaatataatcgttataaatcctctcaaaattattgaaatcgataaatttaaatttttttatctaatattactaatgtaagcctggaagtttaaatgatacgatttgatacgtcaaagttggaggtacgaatttttagatattaaaattcgggtcgtatgatttggtacatgaaaaatcactatattaataaaattaaacaaaattagacacattaaatttaacaattcgaaaaaaaaaaaataacctatttaaaatttcaagaataaaaatcttaattaaagtaagctactaagctaacctaaaccttgtaataaaattttaataattaaataaatattatatatatgaattaaaatttatataaaaacacaaaacagttaattgaacaatatttccaatacaataaattatttaattttttttgaaaaaaattataaataaatacaagatacccaatttgaactatgcaatatatattgccaatactaaatacccacaataaaccaattacgtgtatcatcatcaataccatagctactacgaatggtcataacttttttgtccaaaagccaaaccaattttctttttgatttttttctttctttttaaattttctttcttaactttcctttttagaattccccaccactaaacctgccaactataatatttctacaattttctctgtatccaaacacagtccttaatagtcatagaaacccacgcctttgggaccctttcactttctttccctccatcaccgccgcttcttctccaatttttctctcccaccattttcgtgatgatcagaactcaataatgtccgaccccaactcttaagacaatcataaagcctttcagaagaaaataaaaatctcacctttatctttctgggtaattttttttttttttggattgaaaagagtagaaagaaaaagttgagaattatgagaaaaccccatctgggtttctgggattctgtcgttttgagtcttttttatgtcgttttgttcttctcttttggagttgagtctcagtccaatgtcgacggaaaagccatggaagctcttaagaagagtataggtaagaacagtcttgcttggggtgactctgattactgtaaatgggaaaaggtttcttgttcaaacgctggtcgagttcagaagatccaactcgggaatcagaacttgggtggaactctcccgccggaactttctcagttgacggagttacagcattttgaggtccaaactaaccaacttaccggtgagtttccgaacttttctgggttgggttcgttacagattttacttgctcataacaacaatttcagttccattcccgaagatttcttcaacggcttaacctctcttgatactataaacatcgattacatacccttttcaccatggtcgattccagagggtattcaaaacgcttctttgcttagagatttctctgccaacagtgctaatatcgctggaaagattccacctttctttggtggaaccacttttcctggcttgactaatctccgtttggcttttaacaatcttgaaggagaattacccgagagtttctctggttcgagtattcagtcactttggttaaatgggcaaatgagtactaataagcttaatggaactattgatgttttacaaggcatggctaatttaaacgatgtttggcttcatgggaatcatttcactggtcctataccagacctttctaatttgacacagttaacagctttgagtttgagagataatcaatttacaggtattgttcctttgactttgataaatcataagagccttaaagttgttaactttacaaataatttgcttcaaggaccaactcctaagtttcctagtggggttactgttgatttgagagctgggagtaatagtttctgtactgatgttcctggtggttcttgtgatccccaagttaatactatcctctcaatcttggaaccatttggttaccctgcaatttttgctcagagttggactggtaatgatccttgtcataattggaaaggggttacatgtgtggaaggaaatattactgttgttaattttcataatatgggtcttactggtacaatttcaccagacttttctaagcttgtatctttgaaaaaacttatactgtcagataatcatttgggtggtactataccaaatgagttgactactctttccaatcttgaacaattggatttgtctaataatcaactttttggtaaagtaccaagctttaaacaaaatgtgattctgagcattaatgggaatcctgatattgggaaggatcaaagcagtgtccctccttctgggaaaactccaggtggttcatctgaatcgccagatgggtctggagggaatggcggttcgggaagtggtggtaagaaatccaatactggggtggttgttggagctgtagttggaggtgttggtgggttggctgttgttggggctgtggcgttttgtttagtgtctagaaagcctaagcattctggtagagtacaaagcccgaacacattagtattacatccccgacactctggagatgatgacactgttaagattgctgttacaaacgccggggctaatggcagtgggagccaaatctatagtccgtcgagcagtggatgccatgatgttcatattgttgagactggaagtatgatcatttcaattcaagtcttgagaaatgtgaccaacaatttcagtgaagataatagacttggacagggtggatttggaactgtttacaagggagaattacacgacgggacaaagatcgcagtgaagaggatgaaccctggtgtagtagctgataaaggtttgactgagtttaagtctgaaattgctgttcttaccaaagttcgacatcgccatttggttgctcttctcggttattgtttggatggaaatgagaggcttcttgtttatgaatacatgcctcaaggaactcttagtaggtacattttcaatcgcgaggaggaagatttgaaaccgctcgattggaagagaagactaaccattgccttggatgtggccagaggtgttgagtatctacatggtttagcccaccagagttttattcacagggatcttaaaccatccaacattcttcttggagatgatcttcgggcgaaagttgcagactttggacttgttcgtctagccccagaaggaaaagcatcgtttgagactagacttgctggaacttttggttaccttgctcctgaatatgctggtatgtgtttctaaatgcttttggttttgaactaaaaattacatttttttaacataatgttagcttaagattaacataaacttaagaacagaacacccaattgctttgattttcttgtctttaataaagttgttctgttctcaagttgacatcttaaactaaagtcaacccatcaatgagaaagtgaaatttgaaaatgatttatgctagtgagtttaaagaggaattgtctcaaaattttgtgaatgtgatttatgatagtgactttttatgtaatgaacagtgactggaaagattactacaaaggtggacgtatatagctttggagtgatcctaatggagctaatcacgggacgaagagcgatcgatgaaagccagcctgaagaaagcctgcatcttgtcacttggttccgcagaatgcatatgaacaaggatatgtttcagaagctcatcgaccctgcaatagatcagcaagacgaaattgttgatagtgttagaaccgttgcagagctagccatccactgcaccgcaagagagccttaccagaggcctgatatgggtcatgccgtgaatgtgctttcatctcttgttgagctctggaaaccatcagagcaagaagaattcgacgatggatttggcatcaactacgacatgccattaccacaagtgctcaagaaatggcaagcgttcgaggaaaacagcaccaacgactactcatcttcgtcgctcttctccagcggtgacaacacacagaccagcatacctaacaggccacccgggtttgcagattccttcgcatcacaagatgcacggtgaaagctttaggaagaaagaaacgattcgatcttcgaaaatcttcaaagttagcttctttttctttctttgtgttttgtgttgttgttgttgttaactttggccttacttgtctattcattttgcaaggcttgtgcttgtttttctattattattacttagttgaagtaaatttagttgtgagtttttttctggtaatttagaagtggtgaagttagaaaaagacattgatgagtaaaaacaaagatgtgtcttttcaactcttaatccttgtggagcttggataaggattaagtcaagtcttctgtgtgtatctattttcccaagcttttggaacaaaatctatctttttgcaacagcttcttaaaataatcatagcaacaacactggacttgtggagtgtaatgaactattatatggcccaaatattttccaaatattatcaatttttttttggtcgaaaataagtgttttataaagatagattctatttggttaagcttctagatttatttttataatttagataattagtatatga

SEQ ID NO: 221553 - DNA, 1432 bp, Cannabis indica
tcagtatgttcaagatccttgttagctattcaaaacagatacacaagctcacaatttttaactcacaaaatctacgagtacactactagttatttttcttaaaaaaaggattcatacctcgcgcaggaactgcttatctttgcagctctcattagagctaagaactttcactgcagcagttgtttgatgaaatttgcacttgtagacagttccataccctccaaaaccaatcttaagaacctcagaaaattacaagtggctgactgaatttcttcccatgtaaattgctggtattgttgtaaattacccgtgagagcaatctcaagcttctcaatctctttagcatcatgcatagctttcatctcagcatccttcttcagagaggcttctctttcaacacattgcctcacatacatagcttttcttttggcagcctcatgcttctctttctcttcttttgctagtgcttttgttttgtcctcctccgcgataatttcttcaagccttttggaattatccaacaggtttttgtttagatctttcagctgaacaaaaataatcactatgttagcaacatgtgcctatggtgtaatataggaggatcagatgacattcctataaagatgtcaaccattgtattcaaaagtttgggagaatgctgtaagaacttgaaaaagaaaaatgaatgcaagtttgaaaaggataagggaatcctaagcagaaatgacattgaatgagtttagaacaagaataaataagtattcaatgaccaaaatacatttgacaaagatttggttttggctatttgttcatcaaatctagtcagctaaaaccgaaagaaagatgttaacagtagtacttgcctttcgagaagcagcatttgtctcactttgagccattgcatacattcctttgacatgtctgagttctgttctcaacttttcaagctcaaagttgaggtcggcctgccatacgaacaaatatcagtacacaccatacacaatgtctatgatacaatggattcataatgcaacaggtaaaggccaacaaaatttaagagaaagaattgagaagactataccgggctctcagacattgaactttctgtgcacacatcaaaggtggaagcttgatcagaagaagtaaaggaatggttatcgtttgcaaagctcccactactagagatgtgactcactgtgtgttcagcatcagaaatactagaacaagaatctgcattatcctttccttcctcaagatccgtcaactgatatttgaaatagtagctatcacatgaaagttttcttggtttgagaagtgtctgattcatagatttaagagcttgaaatcgctgcaatgtcagcgaagaagattggtaactacaagatgaagtaaccgaaccaacttctgccaattcaagaaacagaacaggtat

SEQ ID NO: 221554 - DNA, 1816 bp, Cannabis indica
ttgatccacgtgtcccttcctgattggtccacgtacattgggcgattttaggagcaacactatacactacgatataatattttaagtcgtgaagtcaaaggcatgtaccacaatagtttttggttgataagttttctattctcccttatttattttatggcgggacaaactccaagtagggaaattatccatgtctgcatattccttacgatataaaatacaatcattcgaacattcatggatcttttcacatttcaatcctatggaatttaaagttttattcacttcatatgtagattccaggaaaaaaatttcaaatagaaaaatatctttaaaagcatcaaaaaattgagtaaaatatttatctctcactctattttttattttgatgttgtaaaactttatcattgttggtaatcttagtttttttcaacatcgaacaagagtttatctgcattacttagcaaattcatcaagaaattcctcatgtgcttcatcaagcaagtccattggatggtcatcgaaattattaccctcaatgtcatctacccctgctttcataatggatatggatcatttgttaaatgttacctatgtcaataccatgtagtataacttctattgaaatctcttaaatacacatgatccttaatcattgtaatatttccttttgatccattacaacaatctatgcatggacaatgaatacattttgggtttctagaattctttaggataaactttataaatgctttgaatcctaattgaaattatggtgtgtctctctcctcacgcatcaatgatttatccataataaaaattaacaaaaaaaaaaaatcctaacaagcaagtttgagagaaacttaaatcaaataattttatcttaattctaccgaaattttgacagcataacaactataattgaatgttctaaaaaaatttaaaagctactaataataacaaaaaccaacccaaaacaagataaaccaatcacaacaacactaatctcaatatttagtactaaattactaattagcggttcaatctcaatgtagcttaaatttacaaacaagataaaaaattttaagagatgaccactaatctcaaactctagatatttttttatgtctttattgattgagatgcataacttaagattttgaaaaatagtagcaattaagacaagagtttctttcatattactaactagtaactaatcaaaactagttactagttatatactttgtaactaactggtttctcacaaccgattactatttttttaatttgtaactaactagtaacttgcaatgccctatcccacagggacgccacgtgtgtgcttttaaaaattttattaatttaagaaaagtgtaatttaattgaaaatttttaatcaaacaaaaacataatttctttaaatagcaaaaccactgttaagtacggggatcctctgtttaaaacttttacattctgttccaaaaattatgttacaaaataagattccattcaaaatattatcaaaaggattgatcttgtccactgaaaaccgaggcaccgcgtttcatatgaacactgctgaaaaacctctaactcatggttggtccactttacccttccctttacctgcaccacaaagcacccgtgagtcagagagaatcaacaagaaaaactattaaaattcaaatagtgttcaatacaaaaaattacaacatgacatattacacaaattcattaatctaaagcataatcaagcattgcataaacaattatacgttttataagacgtaccaatcttgatgcctcataaagcacc

SEQ ID NO: 221555 - DNA, 2136 bp, Cannabis indica
atcttctcttctgctaaactgtgtttgaatctttttcaatgttgagaacatggcagattacattgggactaatcccaatcatgtcagaatgactccatgccaatttatattgattcttttttaccctggacacaatttgttctttgattgtcaaaggtaaattttgtcctactttgatgactttataggatctgctctgttgatgcatatttctttgacttcctccattggcacgatcattcttctacccctacttgggggtctaattcacattcttcttagattacattctgtgctagttgattaagtgctccgagaccttcttcttcaatttcttctcttaccataaaaactaacttgccaagacattgattaagtgctccaccactatgaaagtgcggtatttgattgcagaagctatattacttctggctacactctaattcaatgtaactggaaactgagtcttccccatggtagtagggaatatccattaaaaccttgaatctacataaggcatggcatcaaattagcttcaactaacctaatatcttgaaaggtaattttgaacagtatgttaaaaaactttcgttatccactagcactatagacactcttttgttggaaatcttggtattaatcataaatggatcattgagagaaaaatgtacatgcttaatgtcctattccataaaggtaattggtagattcgtcattcgtggacgttgggcaggtgtttgtacaagtgcatatgtttccccttcatggtctagtttgttgaggtaccttttttggacatttcttgtgcttctggtaatgtgtggaccttcagaaatggttgcaacatggccatccactaggggtagagtgagccttggcagatatagattacctggtcagggtgccggagtagccttgggtgcctaggcatttagtaccccttgaggatcctaaatgcctagagtttttattctcggggcttgtattcctagagcttaagggtaacccactatctaaggaagatttatagctccctactatctaagaatggctagctactcatgtgctactccttgtgccaaatagataataaaaatctggacccactaagaaagatggccatttcggattaggccttccatctcacccttcaagtattcatatcatttgtgttgtgcccaacatcaccatgatattcacattttttattctcgtccctcttacgtcttccttctttatacattagtggtggcttcttgtagtgaaccatattacaagtagccttattcaaattctcctgcgtatttatcaagctcgtgtactcgaagtatcttggttcttgttaacttcttcatttttcagagctttattccagctttgagttttaccactcctcttggccttggagcaactcacatttgagtttggtgtctctttttgttggcttgcttgtctggggtcggcactacatccagattgtgccaccccagagaaattagttcgtgtgggcatatactctaaggtagtgggctcgtaaactgtaggattcatggactggcttccaggaggagttatagttggagatgagaactgtggattgtgagttgagttgttcactgttattgatgttgctagaaggactccaaaagcttggatgtatgcttcctctgaattcatgaaaccccaggccttggataaaagtttggacaaggtcttggacctcttcctttgaagctttccccagaacaaggatccaatagatattttggacattagagccactaacttcatatcatcatcaactttattctaacaacttattccatcatccttgaatgtatctcttaaggctttctccttcctgctccttgatgttggttaaataactaacctctatattataatcttttgttgctccaaactatttcttaaacatgtattgcaagtcttttggaatttgaattgatctaagtggtatctttttccaccaatcttcagtggacttcgttaaagtcaacaaaaacgtagagacatttcacatcatcatttgccttttccatttgcacgagtctgatatatttagacaaatgggtcctagggtccgtcatgccttcatataattccatttgtggcatt

SEQ ID NO: 221556 - DNA, 1819 bp, Cannabis indica
tttttttaccgacaataactatatcttttagaaaactgaagaagggaggcgagtcatgtgatgaaacttttgaaagtctttaagaaagcttcatgtcagaagataaattttgataagtcctctattttttatagttacaatactagagttgaagttaatgacgaaatatgtggattgttaagtatccatgaagctaatgaccatagtacttatttgggactgtccaacatcattggaagaaaaaagacagtgatcttaagctatcttaaagataaggtacaacaacgtgtttaaagttgggaaggaaagctcttatcaaatgcaggaaatgagttcttgataaaaattgtggcaaaagttcttcctaattatatcatgaatgtgttattacttccaatagaatcttgtaaggatttaaaaagaatgatgttaaaattttggcggcatatattcttcttaaaaaaaagataaggttatccagtggatgagttgggaaaggatgtgttagccaaaaacaaaaggtggtttgggttttcgtaacttccataattttaatgtggctctcttgggtaaataaggatggagaatattgttgaaacttgatgctctagtgagcaagtgtataaagcaaggtactatccaaatggctctttcctaaatattgtcctcgggctggggtaatccaaactttatttggagaagtattttcaaatcccatcaactaatcaagaagggtgttttggtacgaattggtcttggtaatactatccaacttcatgatctttggttaccaagtgagaggaagaccctttcgtccatacagtaagtaattctttcatgggtgtaacaatttcatgttttatggttctagaccaagctcaatgggatattgagttaataaataatattttcattaaaagcgatgcacatttaattttgagcattcctttacccaatagagaaggtgactcttggtacatgaggaaggaaaagttgggctaatattcactgaagagaacttacgatttactgcaagatgattaagaggataggcataccaacgacaacttaggcttctagagaaagctttggaatttgaaagttccctccaaggtcaagaatctattatggtgtgcatccacatgttgtttaccaactaaacatgttcattctcgaaagcttgctagaataggcttgattttggtgtttcaacaaaggttcaagggatatttttggactggttacaagatgaatataccagatatggtggctatgaacgtaggttgatctcaatggtatcatgggctttatggatgtgtcgaaatgatctctttaggaataaaaaaaataagcatggaggtgaagttgtggtgttggcaaagactatccttaatcaatggcaaagcgcttaagataaaacataagatacatccttaggattgttgaattctgacaaaagtgatgagcaatggtgaactccaaatgaagaaatgatttaaggtgaatactgacactgcagtctttgaccaatctaactgttttagctattcttttgtggcctgaaactatagaggaactttagaataagctagactggtctacactagaggtaatgttcaacctgaagtttctgaagtaattgaggttcgtgaagctctaagctggatcaaaggtcataagcagtggcacagagttaaaatcgaaactggctgtcttgtagttgtccaagctattaattaaaagtttatttgatctgttgtcttattttgggagaataattgttgattgtaagagtttattaactagttttgagaataga

SEQ ID NO: 221557 - DNA, 6990 bp, Cannabis indica
attaagaggatttatatatatgtatatatttatatgtctattatatatatttatatattgtataatttatattactatttaaaaaaatattatgttgaaactaatatgttttttttatggtggttgatttgaattttgaatttaatctatatatatttgtcacattattataattaattaaaatataaaatcgaatgtaaaaataaaaaaaattaaaaaatattagtggtcggtttgaacaggttaacccaaccaaactgaccaatatgttactattctattttttcttaattggatggcttgcacttagatttttgtaacccggtctttacattaggttgaataataaaatgtagcataaagcaaccaaatcgactgacgtacacccctaatttgcactcgatcttctttttttccggctttggtacaactacccaagttttgttcttccggagtgaatctattttctcatccatggtctgaagccattttgacttgtttccacctaaaattgcctcttcgtagcttctagattcttcaattttagtttgttgtattgctgcaaatgttattaagttcgcttctgcgaacctcgctggagggtgaatcattctccgggttttatcacgcgccaactaataacctttcagacttgtctacatgaatccttctaaaacttttatttggtctttgttatctttcaactctacatcaacttctgtctgagcattgtctttcggttccatactagcttccgtttgtgaaccttcttccaagagtttcattctgtaatccacttccatgcatgtagtgttcttgtttcttgttttttctacattacatggagacacactatctttcccggaggtcaagtgaggatattcttgctcattgaaaataatatttctagcaatcataatgtttggcttacccttcttggaaatgtagatattatatccctcagtttttaatgcataacttaggaaaaatctcttcacggatctaaatgtgttaggttgggagttctgttgtaccacattttataaggtgtttttaagtctatcactttatttgggcttctatttgtaaggtaggttgttgttgctagagcttcccccgaaaaggtttttctaatttggaattgaacagtaaatatctaactttgtttaacagggttcggttcatcttttcagcaataccattttgtttcgggatcttcactacggttttatgcctagtgattccaaattcttgacacaacttgtcaaatcctgagttaataaattccaacctattatccgtcttaaccattctcctttgagcgaggtctccaagtcagcctaagtaagagtgcatttgtgagctagtatgagggcttccgaagttatgacggttcaaggcactcgctaaaggactttctcggataggaaagagccagctaaaatcgacccgagactataccttccaggagaaacaactagccatccagaattcttttccaaagaagggctagctttcctgaagatccttcccgaaaggacaaggaagtcttccaagaccaacttccgcaagtccacaactttccaataataataagtaactcttgaatactttcttcaaaaaaaaaaaaaaacttagaattttacgaataaaagctcgtgattttccttattttagaatagtaaaaataacattgtttatcaaacattattttcccatttattatagaaatgatattaataattttgtgtaatatttgtaaattatgtagaccttacaataattttagaaattagtgacaaaaagtttgtgattaattatgctcctcaaatattgtaaaccatataaatataaatatatctttaatttaaaagaaaaaatcaggtgagaaataaagcaataaataaagagagagggcctactaaggaatataccgactcagtctaataattttgggtgaagtatattccagatttctccaaattaataaactttctgctaaagctattattatatattattattataattaatttcaatttccaattcaaaatatgatattttatttatcactgatgtgacaaatctttatttgtataaaatatattattgttgctttcttttgcaaataaatatatataaggcttcgttcattttcatttttatttcaagtagaaaaagtgtgtgtgaagagctgaagactaaggagaagagtgttctcagtagtggaaaagagataataaagattaattgtaagtttgagtagtagctagagtactactgcatggataataataataataatagtcttgaagagagagtttctgtgtttctcaacgaagaatttgatcatcatcgttgtaataatttggaatatgatcatcatcatcatcaatccaacgatacaaatgattggtcagaagagagaaccatctactgggaatctcagtacttacttcttcaggtatattttttatatatataaatatatttattcaaatttctgagagatattagatatatataaatatgaatccatttttattgccctcgattcttttcctataaagggttacaaaagctaaagctgaaaatcattatatatgaattattgatatctaattagttattataaattggtttgaatagtaatataaacgactgttttttactagtattaaatattaagaaaaatatattattcagtcctcttgtatttattttaatttttttttttttttttgtaatgggtcctcttgatttatttaattaattaagcacttcttaatttttttttaatggtgatttcctctctctatctgtgatccaggtattaagatatttgtacaattaatggtcaatagtcattcagacacattaatcatcaaacaaatataataaattgaagagatatgttattttttttagcatacgtgtcaaaatatacactacgtgtttggttgtgtaatggtccatgtatatattattggtccatatatcattaagctagtggacatacttttcctgtctttttttcaaaataaaataaattattaattaataatatatatatatttttaaatcttgattgtatgtaataataactataattataagttgatgatccaacactacacaattgtttaagtcaattaaattttgaataattaaattgcaaaaacaggaggttttggagagatataacttaacaggatcaaagttgagaagagagattggtcgaactacagatatggctaaagacacagagtattgtcattgtgccaagactaaaaccgttcatggccatggctgcaaccactgcttgagacgaatagtcattaaaaatcttcgtgaaaagggtattaatgcctctctttgctcatcaaaatggagacacaccaagaaacatccccaaggtacattatcattatatatatataactatatatatcgactatatagtatgtagtttagtgcaaatttaccatttttattttttacaattctcctctaataaaatgtttaggttgccacgaatatatcgaagtgattggaaacaagacaatatcgagtcaatcaaagcaaatatcatacgagttgaggtggaattccgtgaccaattcgagattgcgaagccatgtgaggagtataagaagcttctgagtctactgccggagtactacattggcaagatcgattgcctaaacgcagtggttcgaatcatctgtgactcagccaagaggtcgatgaaggagaagaagatccacatgggaccttggcgacagaccagcttcatgcttatgaaatggtccaaagttcccctcaataactcttctgatgacacttttcagcctcctatttcaccaccgccgtcgccaattaagaaacaatcgcagttttccgtggctcctccagctgtcgtagttacatgaagatacatggtattaaaaaagaaagaaaaataaatgaatatttcacattatcgccgtttttgtcatgacaattgtagtagccaatatacgtagtttattctaggtaattaagttaactccatggaagagaagagtctgggattttgatttgtgttaacatgcattttaattattgaactatttctaaaattaatctatatgtttacaagtgatttaactttatttatcatttaaagagaaggaaaataatagtatccagatcagaaaagtccagacttataattcatgaaaaagattagacttactgaaaagaggacagagagatgaaatgagtataacaaagaacgtcggtgcacgtgtctgtcatgaccaataagaaaccacacaaaaagactgtacagtagagagtaatgagagatattttcgggcaatatggtcaatcaatatcaatctcaatctcaatcgcatacatttatgtaacatgtgaacctgtaactgtcacttacagctcgtttatatttcctaggataaacgactttaaaaatagagctccaaacttccacaaaatattttgatattttccatttctacgccccatccataaggacaaataacccttcattccttcataagataaaatcaaagtcacttgttggaagagtcaaaactagcctggctttaaatggtttaaaggatacacatggctagtccagaaataaaaaccataggaaaggacatacatagaactagagcctttgaagaggtcaattattaaattaattagtaattataacttaaaatgttgcctaattttttggaataaatctcataatatatgtattaagtaaggtacatagatacaatacaaccagagaggtgtgattccaacgacctcctacatttttctttcagttgtgagaaccctaataactttgattaaacatctcatatattgaattacactaatacacgtgtataagacaaaaataaatatacttaactatacaaaaatttctcatgaaatttatttttggcagggcacataattatatgctagaatctcactcaggttttctctcattggaaagaagacgaaagaatcctaaagagcccatctggattgtcagcgtgtacctgttaaattttagaatgaggaatagtagtagtaatcttttgagactaaaagggaaatttgactgcattacatatttataaaatatatcaaccttaaagattataagcaaaatatgcatttccatataattttagacaaaatcacctctttccctctctgatctccccaatctttctcactaaacatacattgtttctcagctacccttacaaattcgatttatactaacgatgccaccacctccaatgaaacactattgaagcacccatgattttttattttaatgatatgtgcacagagaaaatatgcaataaacattaatgacgttaaattcttttaaaaaataatattacatcattaatatttggatgcatatcatttcttttttttatttttattgttttcagacatagactgccttttatttttatattttaatcattgaaaatcctattcaaaccttaaacccaagaaaaaaaatcacaaaaaaaataaaaacactagattatgaatttcaaacacttctatacagaaaaaatttagttatttccacgtttctttacagacttcaaaatctgcagaacttacaaagaaaagaaaggatatgctcctatatatatttaatttatttttagatcaaaacaatccacctgcaatgctcaggtaatggtacagcgatggactcttgaaaacttgatttttcagtccgaaaacaatgtccctgcattgtttccatgacaacttgattttcaagatcaaaatgataaacctgacactacaacaatagtgccatgaaaatttaattttatcatttttaatctctaaaattaagttttagctcaaaactaatgttttcaaaagattgctttttcagtccaaaaacaatgtaccctgcattgttcccatgaagacttgattttcaagatcaaaatgataaacctaacgctacaacaatagtgtcatgaaaacttaattttatcgtttttaacctctaaaatcaagttttcatgggaccatcgttgtaacatcgcaagaatatcatttttagctcaaaaataaagttttcaaaagacattgttttctcagtcaataacaatctccctgcattgtttccatgaagacttgatttgcaagatcaaaatgataaacctgacgctacaacaatagtgccataaaaacttgattttatcgttttaacctttaaaatcaaattttcataggaccatcgttgtaacatcgcaagaatatcatttttagctcaaaaataaagtttcaaaagacattgtttttcaatccaaaaacaatgtccctgacatgattttcaagatcaaaatgataatcctgacgctacaacaatagtgtcatgaaaacttgattttattgtttttaatctctaaaataaagttttcatgagaccatcattgtaacatcgcaagaatatcatttttagctcaaaaataaaattttcaaaagactatcatacaccatcattgaaaatgcatcgttttgacctcaaaaatcatatttccgtaggagcatcattgtagcatgctttgttcaaagttctacacattttcaaatcttaaagaggtaaaacaaaactaaaaagaattggtactttcttgggtatatgttttggaatggattaaaaaaagaaaaaaaaatggcgggtgcttcaatagtgatgagaagtgaaagaattgttaggatagataagaaacaatgatgtgtgtgtatgtatacaatttcatgtagggacaggcaactttgtttaacattgtcgggaaggcatatttttcctatagttttaagatgggcatattttatatatcattaacatacccaatggccaagcaatcctacaagtacatgcatttcaacgccactccctcttcagaagcaacctcctcagcagcatgtatc

SEQ ID NO: 221558 - DNA, 1793 bp, Cannabis indica
gatgatttggtgattcatgaagaaattaggcattgtcaaatttaactataaatgctagaatcatgtcaaacattgaaattctttatttatgttagagataatttgaacaatgaaattactaaaatattacaacactcatattaaggtacacatatttttctttaattaccttttcaatatatatatttatatcataattattagatttgcatcgataataatcttacatattagtttttttttttaaaaaaaaaggacatattagtcattgaagaagatgtaaaatgtagtgatgaaatttcaaattacaaactataaatattttattataattgtagccatacatattttctagaccatttctcatttattatcttctaatatggttccataattgacccattttatttgggcttgggcttgggcttgggcctgatttaacggttataacaaaaaaatgaaatcatttctatgtatatacatatacaacaaaaagattttttcaaaaaaaaaaaaaaaaacaaaaagatgttgatttcttttttacaaaaaaaaaaaaaaacaaaaaaagaaaagaaaaagaagttgaaaacaatttgaactaaatcccttgatcaccaattaatttgacgtagaaatttatacatatgatttcatggtttttctctaaaacaatagtaaaacaaaaaaaaatggttatacactcattttaaaactagtaaattaaaagtgtaaaacaaatggttatatattcatagagtaaatactatttcaaatcaatgtttattataaaaatcttttattttgttcaatgataaattagttataagtaagttattatcacaaaaagattaaaagaatataatctagttataatatctgattagattattattaaattttaatttaaacaaaaattaaactgtactattttatactattatgaaaaatacaaaatctcaattattatttaacaaaataaaaaacacattgtatttacctaaaactatatacatatatgttaacttacttttttttttatttcttttttttaaattctaccttaattagttttgaatttagaatctatccacttaacaatttttaactctaaatttgacttttgagaaaagctaataattattattatttggctgcttggaaaattacttgcatgtgggataagactttattttccttttatctatttgttattaagtacatcgtacttggatcattaatttaacttaatctaaatcactatcattaccaaaataaatatatatgaattttcaatacctatatttcacaatatatagatattggatctaattgtaatattaaattgtcataattaattgattaaatcttctttatatttatatggatatatcctatatagcatgctagagttcatagtaatccctaaaatgtctatagataatgccaaatttcatgtcattattagtataagtaagaatcaagaaagtaattattatcattatataggtattaataatactctcaatcaactaaatcaaatataggtatctacaattttagtggaaggaataagaaatgtgtaatttatatatgtatggattacaaagaagcagcctcctagaaggaacccaaaataatgttcataaagtattattattagatatcagtgtgtattatcgttttgtaaataattagcaatagttcataataatttttaaggtaaataagagtataagtatctaaagttttaagtttgtaagcggtataaattttttttagtggcataagta

SEQ ID NO: 221559 - DNA, 1986 bp, Cannabis indica
tcaaagattattgggacttcattgatatactctaagcctgaattgtctattgtatgaatgatgtaaaagattgaaggatgctaaggtcatctccaatggtaaaagttaaatataatgttgaaccaacactaaaaaagtataatttcaacattaaatttttttcaatttcaatcacaacactaaatattacactaaaatatatattcttcattattttattaatataataaaagcatatgaaacaccgaaaagatatattataaataatatataatatttataaactaaaataaaaattatatagtggtctacaatgcaccactaatattagtggaacactgtaaataaactcattaatatgatgccttttaccatatggttggaagaattttgtgctgaaatctcactatttttaagtttataaaggtctattggagttgcccttgagtattggccttttgtgagtatttttgtaaaaaaaaaaacccacattgatggtaaataaccatttaacatacttaactttataaatgtgatcgtttgattttatatgtcctccaatatttgttattattctaaaagagtaattttaattatcttttttactacaccaaaatttgacttttagtgacatttgaaaatgttacaatttctaaccttaagtgacatttattaaattagtgacatttgtcacaaatgtaacttatttcagtgtcactatatgccaagaaggaagaacatcaattagttaaaggaacaatttaattagaagcaaatatctagcttcccttgaattgtaagatcactaaagaaaatctatatgaacttcaaaaacttctatatctatagaagtatatgagataatgatatgttctacccaacaacttaatatccaagcttattcttcttattctcttctctcctcatcactagtatttcattattcatatcaaccgaatagctaggaaaaacaaaaattaagcatgtagactcaacttttccaataatatttcataataattacaagggaatcaataatagattaacacatcaaaaaaaaactaaatacaaccccaatactaaaaaagaaaacaaaagaccacttgttggaaaagctgaaaggaattgctttgtctttgttaggatcttgagctaagtaagtctttcacaccgtcacagagcttatcaggatgttcctccttcactgatttaacatgaaaaattcattctcccaagctgcaacttagataaagaaaaagtcagagtgttactttagagctacacaatgaaacatcatgtctataattcaagattaaaataattatgaaattgacataagaaccccaatattgaaaatactataacaagtctttttaatactaaagaagtcagaagtgaaacaaagcataaataaatgttataatacaaaattagagacaaccaagagaaaattcaaacaccattaaaattttatcgttctaaaaaaaaagaaaagtcaaatgctatgtaatatcccgaaaacttaattataaataattaagatttattatatattatgggttaattaagtagtaataagtaagattatgatcttgctaacttagtttagcataaattataaattttgctataagtggataaataatcgtaatttattaattacagagatttaattgaaatatgtagatataatataaattattcgtgaaataaaaatattttcaagttcgacaaccatataaactcgattggaggccaaaatgtcataatagttttagttagtaatattgatgggattattgagataaattaattttagaaatattagagtattttgaggtactcagagttgaccaaatacccttaaaattagagatttttagtggctaaaaaatgataagataactattaataataaaaattttattattatgtattatattttaaaaaacgtatatatcatttaagtaatatatatatatatat

SEQ ID NO: 221560 - DNA, 2940 bp, Cannabis indica
atgcctgttaagataccaaagaggcaatctgttccatgtctttctcgaccaatatcgaaaaaatcgttctataaaacaaacttcattagttaatgttatatataattaatgaggatccctttaactaaaataatccatctctactctagaaaatattctcctcttcacagagtctggtaattgtgctcaatttttgtagtttgaatttgtgtactgtcatacgaccaattttaaatttctcaaaaaaattgaactgtacgaacctacctccttgtatgttttatctttgatgtcccactcgataggcagtggacatttgagtatttttttgtttttctcgtgtgcttaatcccttatggagtccacgtttctttaaaagagttactgtcatgtttaaatattcataagttagtatattcacaaagatattaataacatatgttaaatattttaaattatataacctcacacacagtcagtcaatatttgtcgcactaagaggaggatcacttcctctatcacccccttgagaaccagcaacatctgttatatttgagaaatataagtagtaaaaattttgtaataatattaatgtcacaatgtaataaaataccaattaatgatatatatatacaataaattactacttattcatcactataataatcatcatcattatacttctaaattatcaattttagcgctgtgcccattgtcatcttcatcttcctcctacgcttcttctttgtcttcctccactactttttccatctcgtcatcctctacttcatctatgtcttcctcctccacttcatccatgtcctcttcattaggtggattgttatctatatctacaaactctattggatctcctatacattgaaagttaatttttggtaatggaccaagatcaacaaacatttggaaatcagttgtatcatgcataacatctacttcaatatcctctaaatgttcttcaatttgtggaatatctcatacatttcgatgatgaactttttggatgactttccagacaaatttatttttgagatcatcaatgaagaaaatttggttagcttgagatgccaaaatatatttattatctttgaatccttcaaaactagtattgatactaattatgttttgttcagacatcaagctctctaagggtcaactagtgcaaaccatttacacttaaataatacaacagaacatccactaagatatgacatcacggtaacttcttctaattggccataatcagttttatcttcaactccaactacagaaacaccactattttgagttttcttattctcttccctattaagacacaaaaatctaactccatttacaacacactcaaggtacgaggtgacaagattagaggaccccgatgctaaagagaataactctctgatgcctctggagatcctaatcttcaaagatcataaagcttattataaaaccaagaaagaaatttattccattgtacttgttctaagtgttcaacccctctagaaagaagaatgttcatatgttttctacatcaaaaataataaagtaattaattattttaaaaatattaactatttgaatggtttgaattaaattggttgttaatatttaaaatacttactgaatatatggtgcaatctcagcacagttatttagaacataccactcagttgttttcttctcttcttcatctaggggtctcaattgtttctaccgattagatgaccttgagaccaaaaaactaataatttcaaaaataatggagcaacatctacattttgatctggacggttaaatcgggtctccactcctcaagtacattgaacaaaatgttaatgcctcatccatcacatatccttctaacattgacccttctggatgtgctttattacaaacataattctttaactttttcatgtatctctacacccatctcatgtgaagtgagccttcaagtactacttcttatgataaatgtatgactagatgaatcataatatcgaaaaaagtcgaaaggaaaatattttctagcttacaaacaatcttaagtattaatgtttttgcttattctaaatctgagactagtaaatttctagcagatataagtttgaagaaagtgcataactcaataattgaggtgctgatcgatttatctaaaaatgcattcacaccaactagcaaaaggtgttgcatgatggtatgacaatcatgtgtttttaaaccattgatcttgttgtcattatcaatcacatttttctttaggttggatccaaaactatctagaaacttgactaatttaaaaaattgacaggtgtgaaggtgtattttgcagtagacttttgtgactgacatttactcttttcagttacaaccctggtcttatattcatctttttgaggtttaatctatcattaattgtatatgtggtcttattctccaacctaattattgtgcatactaagctatcacacattttcaacatgcataacatctagattgtgacgtagcttcatgttggcctaatatgggagctcgaagaatatattctttttttgccaaccaatttgttcttttgtacgctttctatttttcctgccataaatttcatgtttaccaaaaagagattctagtattaaactcatttgtgtgaacatatcttccatacttagttcctctgggggtggtctcttttcaacagtgccacttgttttcttgtttcttttaaaacgatgtttaattggttaaaaatgtctatagccataataagtaatctttttgtgcaaacaaatagaaggtgttgccacattgcatgtaggataagcataatagcattgaccactccatccaaaaaaactattccttgttggatattcgtttatagttcacaacaaggtcgcccaaagattgaaggaactaccatca

SEQ ID NO: 221561 - DNA, 2113 bp, Cannabis indica
taaacatacatggtagcatattagatcctagtaaagtaaatttaaacaattataataatgtgttgtaggcttggttatcatgcagtgatcattgaatctaattgtgccaatgtagttcgtgctatcaacaattatattatcgatcaatcttatctaggttatattattaggaatattcttgcttattgtagttcttttagtagtatctcttttagtttttgtcctaagatagtcaactgattatgtttgtggcatggctaatgtattcacgatgtaatccaggaggacatttgttaatcaatttatcatgagcactcttttccctcataaagtgtatcccaatgagtttactcttggtgagtgtttgttatgtgagtttaatttggaaaggatagaattaaagagagcttagattaaaggattggcatcattttaatttaaaaagtgggacacacttgggaacacaatccccttagtcattaaaatttaatttaccaaacatgagttaaatttaacgttcccatcaaatttaaccttcataccaaacgtccattgaggtataaaaaaaaatccctagaggcaaacattttttcttttccaaaaggaaacacagagtgttttcatctcaattctcaagatttacaaagcaagataacataaattagtttttttaactctacctagcaaatcagtggagcagcatgaatatagactaggggcagggattagggaatcttttatgagttttgtttatgtcatcaattatttcatttgtgagctcaacctggcatgcatttagaatctcttcaagctgccatgacttagtagctccaaaaatgacactagcaacaagagggtgtcttaagacaaaagctgcaacatcaaaaataaagtcgcgagaaatattgtttagtgaatgattttctgtaataaaatttatcagttacaattaaaagaaaaatgccaaaaacagtgtattgagtatagagagaaatcgaaccaattgcaagagatactggattaagaccaaatcttttagcagtaccaaggtactcctgtgaaacacagtcagaatacaaatattagtggaaataatacgaaaagagagcatttgaaacgattgggacatgatatcaacaaggaaaccacatttttcgaatgaaagatttcgtctgaacaacactctggatcttttcattgccagttttttgtagtcatctgttgatttggtatcaaagttcatttatacctttagaaagatactagaattaaaaagaagctagttaaagaaatgaatgtgtagttgttaaaatctgcaaccaccttaaactgtcacttgtctagggtatatactaacaatacaatgtgcaagccaaccaccttaaagaaactccactggacttctaaaagcactccgttactagaaaacattagaaaggtaacaaaacgatacttaatggagcggaaaccaaaaacttataaatagatgtcttccacaccaaaatggacaattcagaagagatacacaaaaatcagaccatacacgtataccccacaatttttcttggggtcattatattttttcttttcattcaattgttctggtttttcttaaaatattactgcaaccatattctccttcattttctttacttctgttatcattacaaagtttaaaaattatacatattcccaactcatacgtagtcatcacctcattaacaattcaagactctgctcatacagaacgaaatacaaaagcaactttgtaatttctttttcacccaaaaattttcatgcaagtacaataaatagctttgaccatctttaatattcacaagtactatcacatcttgaaattagaatcttccacatccaattaaactatcaatctcacagcacatcattgtttctacaatccaagtattaatctttcttctcttctaggtgcattaattctaaatgttatcccttgtactctatgttatgatcaagattggtttagcaagtatagagctataaagccccttcttatttttatgttctcagaaatttaaaacctaaaattgtagtaagaactgcattaatgaaatcttctaatacctatttctta

SEQ ID NO: 221562 - DNA, 3522 bp, Cannabis indica
tagaatgttaataaacatacttgttagtaaatctagatcccaataaaatatattccaatagagacaaccaataatatcctcaaagggggtaggccggagggtcaaggtagtgataagtggatctagactaaagaaccaactggttgttttattataaaatctgcctatcttgctcaggccttgactagagagccccctaccactgttgctctcactctttggaacaaactttggaatttttgtatcttggaatgccacaaagtcctttggggaagtattctctcaaacaccttacacatcaggtcagctcttgctagaaggatgaagattgaggatgtgtcctgccccttttgcggtgagggagaggaaactatggaacatctcttcctctgctaactttgcttttcacctttggaggtcctccccttggagtgtgatgccagtgacgaagtttgaggcccaaatgtgggattggattaaattcttatggagcttgaagaaaaaaggcgtggaggtccaagaattatttttgtatgcttcgattgtagtggacacgatatgaaaaatccaaaacgataaggttcataaaaataattatatttgtaacattagtcactctaccgactacatatctacttgttacgcatattttggctcttgtttgtttcttacgacgatgatgtttacacctcccgtttggttccccctcccgccaaatgattgggtttaaatcaactgtgacattaaggttggtggagactcaatgtgtgtggtggccttggcgagagatcataaggagtcgattttatgggtggctagcaatattcttatcttttttgatcctttcataggagatgttgtagcctgtttgttagtcctggagtcagcgacccgtgggaagcattcgtttgtgatcattgagagcgattctgagacagatcaacacgctaaagcgaactagttctgttttgggtattgataattatgtccttcaatgtaaaatgctctcaaaccttttcagtagctgtaattttttgtttatttcaagattatataactttgctgcccataatgtggctaaatgggcttttgccggtaatatgactagtatggtaaatccttcttccataccggatagcttaatttgtattgaacatgaggtctaactcctttgtttgttgtaatgtaattacacacttttttttttttaaaaaaaaactctcaattttatataaatatttaaatttaattttttacagtaataacacatattatacttgtagaacttctgtaggtgcttggtcgttaagtgacaagttattatccacgtgttattttcttattggtatatttatattattttttaaataaaaataatgacatggaccaattaggaactgtcatatggtcattggctttacacttaacgtctaggtatttacgaaaattctaaaaatattattcagatattattactgatagaaattaaattttgatatttattactacaaaaaactgttacgtttagtgataattttttactcataacataatttttttgtgactaaatatgacttttaatcacaacaaaatgttagttatgactaaaatatagtagtcacaacaagtattgtgattaaaaatataattagtcaaaataaattgtaatttttgtgactaatacctttagtcatggaccttttagtcacaacatcagaataataatttataattagtcacaattttgtaacttttaatcacgagttttactgtgactaaaagtaagaaaaatttgtaatgataagccgatgttaaaattaaatatttatatcacatatttttatttttttttatatatttacacaattcatatccaaaaatataagaataatatcatagatgaaatctttatttatagatgactcatttttactttttatgaaaaaatgtagatggaatattaaaatgatctattttgggataatagagaaacttaacttcactacaaaattgagaattttgattctctaactagtattatccttaccaaaggtaacaataatgtagtatacatggctaataaaatccatatgcaactgttaaataagatttgctcgaactttacgttagtcgtaccgcagtacactttagttttaaattgtttagcattagagaattaattctaaattcttatttaattaattggataatgctctaagcactgtaattctctttgctttatttattagttagattgcaatgatttaatatataatgtcagttgcaaatcatttatattaaaaactaaatacagagaattttttgcattaccattatacatatatatatattttgaaaacactattatacatatattaaaatatatataaggcattttataaggtcaaaaaaaaaaagtgatatgtccattcagtgcgtacttaagtgggcagttttgttccacatccatataaaagtggcaaacgtgcaaaagtagatatgaaatttaattaaacctaaaaaaatctataactaaagccatccagtgactccacattactcaaatagtacttctcacactattattattattattattattattattattattattattattattattattattattattattattattattattattatgaatattattacccctatttatgattcttcttcactcttccttttgttcgttatctttaaccatttctttttgtataaaatatgaatgtataaaggggaagtgaaatgatttgtgattattaactttgttttttcttctgtatatgcctttattaagaaaaacatgaatggatatttctcaatgaataaatttattaatttataatttgattatatttatcattataatctattaatggaggggtaataactttggccaaggcaacagaaatgattatatttttgaacaatgcaaactatgatcatggcaccgaaagtatcccatagtagaatcatataattccaccccctatacaaaaaagagagaaagaagaaaagaaaaaacacttttactgcttgggcatttggcgctcttaattattaatcaagctttacttttaccttttatcatttcaatccaactttatctttgtataccaaggtttatgagataccaaggaagaaatagaagatgatcataaataaaactaagagacatttacaattacaactttatcaaaaacttacaaggataaaaaaaaattaaataaattaagtattataactcaaaacataaaatacaagtaaataaaagaaatagaaaattatagttacaactcaaagaacatacacataaatataaaaataatgtaaaaatatctatgatatatagctataatataataaatatatatgagtgactattcaattgttacatttttattataccaatcatggttacaatttttttgacgtgtaatagcatgttactaataggtaaacattcccttttttagaattaattatttaaatatttaaaaa

SEQ ID NO: 221563 - DNA, 1803 bp, Cannabis indica
taaatctgaattatattagaaataagttttatttagggcataaaaccctaacattaagatgggaaaaagaagctcagtttctaaggccatggtgagtagtatggttgttaatgtttctaaggctaaagtttaggatatatctctcggtccggttgagtttatgttgacttcttcctctattaaattagctaaaagattggcttgtgagagtggtgtttctcaggaacagatggatttctttttggggtttttggtggacaaggtcagtgatgtgacggctactgtatgtgatgcagaagtttttgaaagtttttttatggcacctatcaagaacttggacagtgggatggtctctgatagcttggtggtgcctgctttggagggcagtcaattaatataaatgtgatggcatgaaatgtacaaggtgtgggcaataataggacgtttcgagttctcaacgccaatgtttgaaaggttaatcctgatattctatttttttctgaaactcttggtactgtggcataaatggaacttttgcggatcaaattatgttttgttggaaagttgatggttgataaggtgggttgtagtgtgggattgtgtttgttttggaaagataatattgattttatgctacttggattttcacgtggccatattggtgttcttattttcaaggaaagggtggtgtcgtggcatttttgggtatctatggtcaaccagagccttctcttcgtatggttttttagaatctcttaagatgtattggttataacaactcttacccttaggtgtgcgggggagattggaacgaaattttggcaaattttgaaaaagatgggggtcctccaaggcctaactatttgatgaataattttaggaaagctttggaggactgtcacttggtaaatatgggttttgtcaggcccaagtttacttggcttaacaaacatcgggttgctatgtttgttcaagagcatcttgataagttcgtttgtaattcctcttggcttaattttttttggactctctcatttctcatcagactttcaaagggttgaagcatatgcctatttctcttttgacttgtggtcattccttggttggtaagggaaatatttttgttctcgttttcactttgaaaatgcttggccagatgaggaaaattgtatgaagattattgattcttattggttttcaaaagatgttatcccacttcataatgtttaacttaattgggaagtagtgggtttggaactgaataagtagaataaagagattcacaagaagcataaaattgttattaaataaaagcttcaagctttcttcctcgtggatgctaatcttgattctttagttgtcatgagcttcgtaagattgaaaagaacttgatgtgcttcatgagaaggaagaaaaatatcaggcttctcgaggcaagaacgattggattaaattggggatcaaaattctgctttttttcagaaatgtgcatcttggagatgtacaaaaaattttatatccaaacttttgaatgaggtaagagaagaggttttgggtcaaaccaatattggtgaggtgtttgtgcattatttttccactttatttacctcagatgatccctctgaggaggcctttgtaaggttgttagatttcagttcctttaaagatttcttcataaatgaatcaacgtttgacttgtgaatattttggggatgatatcagagatgctctttgtcaaatggattcatctaaaagcctgggggtggacaggtctactacgagtttttattaaaagaattggca

SEQ ID NO: 221564 - DNA, 1778 bp, Cannabis indica
gcggatcggattggatccaaaatatgaaatccgtacttagtgcggattggatgtgtttgaccaaaaaagtgcggattggatcggatgaacatccctagtcctaggaattaatgaattaggcttgtacttaaagcccacctaattcagaaatcaaaaggaaatttttttcttttttaaaatttttataatttttttactaattttgaaaaaatttacattttttaaaataaaagcctaaaattaatttttttcttattacctactaaattttaaggtgagttcctatggtcatgtcatatatattttgtttttagaaaaaaattatttgtattaaaaaaatttattaatttaatatttaaaatttgatatgtaaaataaattttagagttgtcaattattaaaaaatattgaaatgaaaaataaaaaaaattaatattttaaaatgatatattaattttaacaactataaattttgatttttttgaaaaactaacaataattaattacagtaaaatggtaaaagcgacacgcgggtttgaggagcgtgacaaacaattgagaaaaatagttgtggtgctttaggcactgattaggatatcttacatacgtggctctctttcaattggttcgtgatcagcacctaatgacgacatctttgtcataatgcttttcaactaccaagtaggtccactatttgtgagtcgtgatcgtttttgcagttgttcttttctcttgtttttttttttcctttattacttttcaataatatgttttcttacttatatcttatacttagctttggaatataatgtaaagtgacaaaatcaaaatttatcctgggttagattcccttgaaagtaactcagtttattctcatgtccatatccaaacatgtagaattttagcattgttgccacgtcccaatgtatagaccatcttgacttcacagttcacacacatgtctttcaattttccatgactcataatttttgttggcagagttgttgtttttaagtgtaggtgctatttttctttttttggtagataataattgcttgactgaagttgaatcggtcgatgagattcttcaagaaattgaaagattctacaccgacctattcattttgcagcaaccacatggcaatgcaattgacactattttccagggaatcacctcccaacttactcctgagcagagccatcttttagagaaaagtttcacccatgctgaggtaaagcgtgctctcttctaaatgcccctgataaggcttctagaattgatagctttaacaaccaattctaccaaaagaattggcgcatgtggtgggtaacatggttatactgatgcttgtgctaagcttccttaacaacgaggcagatatattccacttcaacaccactttcattaccctcattgcaaaagtgagagagccatccacgcttgaagatgtccgccctatcagccttcgcaccacaatatacaaaattatttctaagaccctggccaacagaattaaataggttctcaaccttcttacatctctcaaccaaagtgctttttttaaaggtcgccttatctctgataacatcctgatggcataagagctccttcatgccattaaagggaggaagaaaggctcttagagttggtgttgaattttctgtcctaaataaaactcattttaatataatcagatttacttattaataaaagatcagaaatcgcttttatgttgcatagttcacttaatttatttcatgattatgtttaatgtata

SEQ ID NO: 221565 - DNA, 3977 bp, Cannabis indica
gtatgtttcaaataaatataaaattagaggtaaatttgattaattgattaataaaaggggtatttttcaacttaccccgcaaaaatattagagaggatatataaaatttctttttctaccttaaaaatgctattttttcaaataacgtaatattattaattcattattattttgtaaatccccataattgctttgctggacaagcacttcaaaagaagcttgagaactttaattacggcacaaaacacttttcatacaaaagatataattgtgttgtgatgaatgttcttccacctaagttttatgaaagttactaaaaattgtaaaatggaaaacaacatataaaagaagaaaaaacctaaaaaacttgaaatacaattttcatgaagttactgaccaagaagatatggtgttgtacaagccattgaaaaggccaccaagaaaacccggcggaggtccaagcccaggcccagatccaggcctaggcccatcaggacgaggtggtctcatctagaaaatattcatacagaaaagagagaaacccaactcaagtcaactcaagtcaactcaactcaactcaactcaactttgaagagcttaaggttgagtgtgtgtatatatatatatatgtatgtatatgtatatgtatagtactgatcttctctctattcccctttttatatatatatgtaagtagtgattgaacaacactagagagccaataataatgtttcttatgccttttagtactttgaagtctgtgcttttacacagatttggcagggtttgtatatttatagaactaggatgaaccaaacaaaacaaaaggaaaaaatagtaaagctatataataaccaattttttttggggttttttttttttaaaaaaaagaaattattattattgttgctacaggtgatctcatgatctttacttgttggtctcaaactgttgttgccgttggggggtgtttagacatgtctatatatgatgatgatgatgatgaaattgatgacaccttacatggtacatcatcatcatcatatcaagctcatgatatatgttattaattaacctttttatcttaagtgatgagtataagaaaatctcaaatgtcaaaaatagtaaagctaggtatacccaataactactagacaatttaatgaataataacaagaaaagatgttaatttaccctaatgataaaatggacaaaaaagctttgaagaatcattataaaaagtaaaaatgcttctttgtaataagaaaaggaagacactagtatatataagtaggtccattaattctatgtattgatcattataatccttactttctttactgaaaggttatatgtattgttattggtgtaattcaatatcagatcgtgtgatgattataatgtttgtgtagatgcatatgtgggggcatggatctcaatacagaaaagggccagaatcactaagagggacacaaccaacagggatgttaaggctgccatgctactgttgctcaccgggttgtcgaaacaatatcgaccacccgagagcgaagccattgaaggacttcagaacccttcaaactcactacaagagaaaacatgggatcaagcctttcatgtgtagaaaatgtggtaaggcatttgctgttagaggtgattggagaacacatgagaagaattgtgggaagctttggtattgcatttgtgggtctgattttaagcacaagagatctcttaaggatcacatcaaggcctttggtaatggccatgctgcttatggtattgatggatttgatcaagaggaagatgaacctgcttctgaagtagaacaagacaatgattcatccatgcactagttatatatatatatatcctctcacatgcatatatatatattttatataattggggtacgtagtagtattagtagtagtagtagtactgatcttgatagattttaagattattattattacttattattagttaaaatattctgatctttaattttgtgggattatatatttctttaagtaatgagagctatacatatatatatataagaaatatcttatcattttacttaaagatcagtcaccttttttccatctcttagctatatagatttctctttttctactttttgtattgctttttattagttctttaattttccccttttgatcatcgaggtgtagaaaaatcatcatcaatatttaattaagaatatcaattgtgatgatgatggtgaagataattaattagctacatttcttgtatattatcattttctttaagatcaattatgtgatcattagatattatatgttctatatatatatatatatatgaatatctatctctctctcctttcttttattgtatgttttttttaatgtcctttatttgatgattaactacaatagatgcttagttatgaaacaaacctatatattatactttaaataaatattaatattaagaaaatatattaatatttattatgttagctaaacattaaacatgttttcctaatttcatgcataattttgcagctttttttccatacacctatagaaaacattttccctttatttgaaaatagttgaatatcatattgtaaaagtttcattacataacagtataccaattattaaagaaaatgattactttcaagaaataaggggatataaagtggtagctagtactatacataaagacaaattttccccaagagtgattttcaacctcaatctctatatattgatcaagttcatcaaaaatctcataacatatatatatatatatatgtatatattcttctgcataacacaatcttttgtgggcgcgtaaaaatatattggatattgactcattcgacccaccatgatcatataaaatataaattaattataaaggagaatgaaagatataataataataatagtatagcatatatacaaagactgaaatatttgaatttgattgagaagaaatatataataataatgatcataagaatctttgaaaaaataagaaagagcaaagaccagatttagttttcaacctttttaataagggctgcatatgataatatactcacggataaatctatatctatctatctatctatctatatcagtgaaggagagttagattttccaggctttttggctttaataataataattcatcatgtagttcctttttataagatcctctctctcaaccagttgtacgtatatatatatatatttatatatgctcactatattattattattattattattgatcctcataaaatgtcacaaaatgggtagtgatgacagatttgtacatataaaggcaaaaaactaaagaatatatagagataagcttttttgatggatatatcatcttctgtcaaacacattatatatatgtttgatcagctttttaatgtgtagctttttttttctttttaattaattcaaaataaaaagaaaaagaaaaaatagttttattatgtgtgcatatgatgcttttcctttttttttttttgttttttggtagtggagagagagaagtaacagtgtttattgatggatggaacatataccattttagattcactatacatatctatatataattttattttatttttttttttcatttttaagaaatttcaaagcatcaaatgattattaacttttagatataattagctagtaaatttttatttatatatacaaatatagtagtactactaaactatacgtatatacaaaaagagaaacaaaacaatgtttttacattaattaaacatataggatatatatatatatacctctctagctatgtacattgttaattaacattaataatacaattacatatacatacatatagtatataaaaattatcagatggcctatagcactacactatacatatagctatagtacatatatatatatatagtatgtatatat

SEQ ID NO: 221566 - DNA, 3032 bp, Cannabis indica
ccggaaaaaaaaaatgaaattatgaaccctaattaacaagatttcataaaatcatttgattgaaaacaacacaaaattgaaaagagaaaatgagaaaattgattagagaaaatggcgtacggaataattgaaaggaagagaaattggattggttttgagagttagagattgtttagagaagaaagcttagcaatgcggctgggattgggaatcagactagtgttgagttttttctggaatcaaattgggcttcttattgggcttttggaatagtgggccaggcccatcattgtgggataatgtgattgttttagggatgagcattgctaccggagactatatacctctagacatcattagttagtgatactctaaaaattattacattaaattaaatgatacttgatacttaattggatcaatgacgatattgacacataaaatggtgctaaatattacttatactttttaacatctctctttagaaattatttagaaatacccaaaaactacaaaaagtttaagtttttacaattttatagatttttttttcttacagattgttgtttttgagttattctaaaaaggactgttgtttataagttgtaaaaatatagtataatattatggtaatatgaacacaacattgttttctctttaaaaattacaaatctgtaaaaatgtaaaaaaaaatgaatttttaagtactttgtgtaaatttcccattattaagagacgataagtttatacacaatattaagagaggataaatttattaacaattacatcattcactaaagtaagactattcgtttctaaaattatatttattcactctttacttttgatccaactcgaaacttctttgagtcttatacttttcgctataataacattaattgttccacacgaactcccttgcaaagcttcaagaacaataccatttgaatctctaacaccacactaaaaccatgccaatacttttttattattaattcatcatccaaatctcctaagatttcattcttttcttttttgtttcttaaaattgaagtaaaaaagaagtcaaaattcaaaagtcaactattcttttttttttttctctctttaaataaataaagaaaatgtcaaccgttttggccttgtaggaccatcagacatggcacaatactgccacgtaatcaactgtaactattgacgtggcactccagaattggctcgctttatgtggcaccatatagtgtacaacagtcatctgtgctaacatgcgcttggcacttgttactccctctaatctacacacccctcattttccccatctctgtttgtttcccgagaaaagcagcaccaagggaaaaaagaaaatttactactgacagactcgagtccatggcggtgagagctactgtgtctagattccctatcgactcagacgcccaggagaattcgggtcttccatggggcgtgacggtgacgccattcgcaactaaggacgaggaagataggccgccagcgtatggaaccgatggcgatctcttgcctcggtgtgagaattgctgggcttatttcaatatctactgtagtctggatcaatggagctggacttgttgcctctgttcgcaactcaatgggttaacaactaaaagcattgctcgctattctcttcctgagtcatgccctgaattgaagtcttcttttgtagatctcgagttgcctggttagtgtggaatgttattcggcatttatgtttggatttgaagaaagagaatttgataaatcaccaaaatttaatttttcttgtttcattttttttttcagctgaagatgaaggattgcagccacagccggtatatgttgctgccattgatctgtcttgtaagatttgattgactggttttagcttttcttgactaatctacggttttgaaatgagtgatcatagtgaacttttgtgtttcattttcataatcaatattttcaaattagagataatcttgaaaattcatttcttttttgttattttcatattaaatattagtaatttggtagttttattttgaattttctattcaagttagtattatttctttgataattggcattatgattagtgtaagaagagatgaactgggaataaattagaaattttcgaactttcgattatattgattgtcaaggatttgctaggaatgaaaatgaaaatatttgtataaaggattttgattacaagagatagttttcatattattgattaatcattggaaatacttaatcttgtaacagttccaaaacttcaagtgcactttgttgtaatcataagaacttttttttggagatccactgtaattacaagtctgcaataagaattttaggcagatactttaattagatttggttttggggtttacttttgggtcacgactcacgagtctcgtttgtgagaagtttgttgggtttggaatcagaaagcattgagcaatatgtattgttgcagtattttgcagaaggtagttgtgtttttgtttaagcttgttgataattgttcaaaaatgatagaaaatttgtttccttagggtaattatggaattgtttcctaagcgttgtgtatagaagcaataacacttaattggagtgttgtgcctaggtgccggctttcttcattggctatgctcattacagtttcttcaaagtttcaaggcctaaaagattcagtgaaggtggatagatatatatgggaagaacttttgtgcataacttttggcctggtttaggtggctcgataagagaggggaaccactcaacgcgtatcaaattgaaccacttagaacttatgaaacctaaatatttggcttttaagtcaaagattttctattacatagtagcatatgtgacatggcatcacatgggtagctttggaattatataatcatgctaacataataaaaatgtatgtagctttggttcatatggtctttccttatttgttcttttccagtcaaacttacttgtaaacattattttcataatttgga

SEQ ID NO: 221567 - DNA, 1400 bp, Cannabis indica
tcttaattttttttttatttaataaaacagatagtccaatcaataactttacataacataacttttacaaaacacaagtcatattaacccattttttttatacatatatatataatttagtgaatggtttaaatttatatttatatgttttgatcatattataataaataattatgacatgtggaaatttattaattttttggagttacaaaattaataattctaataatctatcaaatcaaaactatgaaactcgttatcatggtccacacagaccaaattatatataaatatatggctaaatatcctttaaattttgaaaactgttacaatttattcttgaactattgagattgttggatttaaagacttttatataattttagtaagaaaagtgtaatatggatatgaaagtttaagggcatgatttaacacatagttagagttcaagaggcataatttgttagatatcaaaatatgagaagcatggtttagtacatagataatcaccgaattagtaaaattgaatgaaattggacaaaaaattttaaattcaacaatcttaatagtttaggataaattttaacgactaaaaaagttcagaattaataatttagtatatatcgaagttcagccagcatgaaatcgcattatagtaatatataactattatataattatgatttaatatatttttttgaaaatgaagtatcattgattcaatcttctgtgatgatttatatatgtaagcatataatataatatatatacatatataataacttaattaatcccatgtcaaaaattaaaacgtacgtgttgaattgaataatgtgtactcgtgagtaaagagaacgtagctcaaaatattatttgtcctattattattactatatatatactaattattttcactttcattttctttacactaaattatataatataatatacctatagtttcgagcacatcaaaatgaagataatatatataaaaaaaaaattaaattgctctaatatataacattttttgtaaaagaaaaattactattatacatattcatataaattttttttaaggataattattatatattaaagaaaaaaatatccaaagataaaagtaaagaaattccattcatctaaacaaatttattagcatgctaaatttatttatgagctttggtaaaaaagaggtgctcccaaaaatctaaacaataaaacttgaataataaaaaaaaatgttagatatataattttgataatattgtataattaatgaaaactaatattgtagaaaaactagataataataacttagaaagagagttttcattgcaaaaacaagaactaacatttacattctctaatcataaaaactcttcttttttttttttttt

SEQ ID NO: 221568 - DNA, 1633 bp, Cannabis indica
ggagttatgggattcttctttgactcagaggatgactgtacctatggttatggaaaaaaggcccatggttggtcaatggggttctccttaacctcagaccatggcctgtagagggagaagtttccgtagctgactttgaaatagcaagattgtgggttcaattccatggccttcctacaagattcctctctgatgaaaacacctctaaaatagcgaagaaggtgggaacctttgtcgaaaatgatggaaagcagaaagtaaagatagtcagacggggtttcttgagagcttgggtggatgtgtggatcactaacccttttagtgcaggtttttttctaactatgccagggaaggaagatgcatggattcagttcaagtatgagaagctcccattcctttgtttcaactgtgggaaacttgcacatcttgacaaagtatgcaacactccgatggcaatggtcattcctaagattgggaacgctgtccctatgtatggtccttggatcaaaacgaaatcagggaggagcaactattttatagctactgggaagggaataactcggctcagaatcccacgatggagtttggccggaaaagcaaagagaaaggaagggtacctggaagagaagagaaccaatcaatggcaatgctgtcggaggagacaaagctctgatcaacagtacacaggacagcaaagatggtggtggaatgttggttgcaggcgagtcgtcaggtacgaatgagaggcgtgttggggaaaatagtacacagtgtggcagagtaccaatggatcgagtggcgggaagctctaacgttccaattccttttgggccaaacttcctaaatctaccaacacctgacttttctttgggccaagaaaatgatatccctgatattgggccttccttagctcagtcattagaaataccacatgcctgggtatgcaaatctcaaaggccccataactttcctgaagacaccccaattgtttggcccacgaataacctagaacttcaggaaatgtttcttaagctctatgggttgaacttgaccgataaattcaaagcccaacaatcattaatctccaacccccctgatctctctgagttaataacccatttattgggtacccgaaagaggaaggcccacacttggtataacccggttccatcgtcctctcaatgtaaaatatcagagatttcaacggaagttattccaggagaagaggcattattatctctggatactaatgtaaaattctcaagcggctgtgcaatagaaggagagaattcacaggcccaaaagaagagtaaacaaaggaggagtatcaaagacaaggaagcattgcaaagtgcaaattcaggagtcaaaacaagaagcaagaggaaatcggcacaatattcggctgggaacttaagtgatactctagaaaactattttgaacttcaaatcagttatgttcagaattttggtcaaggcaaggaggcggccggaagcatgcccccacctcaccaatgaggtgcttatcttggaactgccggggtcttcgaagacccacggcagaaaggtccctccggggactcaatcgagagaatgatgcagatttcttatttctctcagaaactaaggtgag

SEQ ID NO: 221569 - DNA, 3351 bp, Cannabis indica
ggcctatattgtcccgccgttattggtaaaataaggcccaatcaagtattttaagggaccaatctcagcgagcctatattggcccgtcgttattggtaaaacacggtccaatcaagcattttaagggaccaatctcgacgagcatatattggcccgtcgagattggtaaaatttttagctttcaaaatatctataatcgcggaacatacgatgcctgtcgagattgctacgctcaggatttttctaaaaaaaattcagttctatctcggcacgcacacgtgggctcaccgagatagggctaccgagataggcctttgttgtagtgttaatattatttaagaataatattatttttaactaaataatatagttttatcagataaaactatataattaaatactgattacataattcataattaatgtaactatttaaaataataatttttacaaaataactattttgctcttaagaattatttctcaaaaaaattaattcttactcaaatttcttcatcaaattaaacttttccctatacagtgttgtatagatgtgacttggggaacatgaacctatatttcgaaggtccaataaaaacatgattatgactgaactcatcaattgaataattcagtttattaatactattcttactccactatatatatggaattacactctttgacaatatatataaaattatatttttagaattattactagttatctattaatataatcaatataagtagtttgccctctaattattatttcataattagagttggtcaaaattaccgttttacccttctaattatctcttgattctttatgtaccattaattcaatgtgaatagttattctataatctaattatagatttagatccaactattatcactcccaaaattaaaactataagggaactaatattcgatcatttctaaaagtttggattccattattagataacatattcattgccacttattttattaagctcccaaaatagaaattgtaacaatcatcttctctgagaaactttaacgagtgaatcaaagaatttaatgcacacaaataagagttcatgtatactcaagatttagagtaatctactaatgatcatcattgtaatatgaacaaactctttcatggtaaatgatatgtgaatgaaagatgttattacatatcggtccaataatgtataatcaaattatacagagcacatttactacatatctatccacatgtaatccgaatacaaaatacactagagtatagtgtatgataaactacacttggtaattctatattaaagatctcttactttaatacgctatcgacttgttttattcatattgtatattttttattgtcttgtatgaatttacaagattataccatcttcatatgaataaggaatttttaaatatttattaattatatttctatgattagtgtatttattttatcttataattgcattttatatattttataatatattatccattaaatacttgattttatggcataaatcccaacaaccaactcctccaaaattgttatcgaatgtcgggttcaaactcttcgttttgacgttagtaggcgtggtgttggtagccccttcattgacgacagtttcgtttatgctaatattgaagctcaaaattttgattctccaaaatcacaaaaaatgttactagaaatctccttcttgtagcgcaaaatgttcttggagaaacttatacaacacaaaaaatacgagtattcgagtcgataagaatacccacaaacagaactgcaagtattcaccttgagtggggagtaatcaaagtaaaacaatgatcatcaaaatataaacagaaaatatataaaagacacggaagaattacagtggttcaactagagctcggtctggttagtgtactttgaaaaatagattgtgattagacttatttatctcggatcatctcctttatctaaaaaagaagtgattacaaaaatgattatataagactgttacatcattaaatatacttaaatcagatgaaaaacctttgtacaataaatgaaagaatattattttgaccattctgatttaatattcgaaggggtgcgattatataatcacacattgaccgttcatattcctgtaactatgtactcccaagttcattcgagttactcgtatagtgggtcttcaaactttttgggagcatatgaacctctcaaggttttgggtgcataaatctatcgaggtcataaaatattatgcatgatgatattgattgcgcatcatcagtcatccatgtactgacaatatagaacttgcgagttattgtgtacactagtcattcagaccaactattgtaaagacgcaatatttacataaggtgcgggagaaaaacactgggtcatctcatataatcaatatatattgtcactgtgctaacctttttttatggttaattagcttttatcctcttttactatgtacgacatagtatgcgattagaccctgtctcaataatactttctcgcatattttttattaggcgatcggataccctgtcaagattcatattcttaacatgtcatccattttctatatgaaactgggtccatatattagttttttgaacaagggtccatatattagttaaatacacaagactacacgctgttaaaaattcatgatattgagtgttatatcgatctatattcgtcaataaacataaaatcaacattttccacggcttacgacttttgtataaattcgtataattggtcacccaagtatatatagggaatagaactctacataattaattaattattttttctttacaataattaattaaataacttttcctaaataataggcttaagattataataatttcaaatttcatgatgttacacaatctttttccacattatttcaaggtacgtctttctataattgaaagtcttcctcaatataattgatgaagtttgacttgatattttctgttggtgatattggttaatcatgagacagaaatagaggacgagaaatgaatagttctagctacttccactgtttaactggtggctggatattgaagtcaaacaataatatgttagggatgactgaatttcgaaatatattaattaacaaatttaagttattaagactgtcccccaatatgatcagtttccgaccacaaatctcatcatttagaaaaaaaaaatattaattaacaatgacatagttaaattcgtaataattgactacacttaagagagcttcgaaatgtcctactatttgactttttctaccaaattattaaatgacgttgctttct

SEQ ID NO: 221570 - DNA, 1995 bp, Cannabis indica
cttgctgttttagacctaagttttaacaacttcaactcaaaaatcctgattggttggctaatatcagcagccttgtgactttggatctaagtcttgcctctttgcatggaagaataccactcggtttcgcagaactaccaaatttggagaccttacgtctgcaaaacaatgagaatcttgctgcaaactgttctcaatttttcgggggaagatggagaagtataaaatttgttgatttgagtgttaataagctgcatgggaatcttcctacttcagttgggaacatgacatctctcacttactatgatcttagcttcaacaaagttggaggtgagattccaagctccattggtaagctttgttatcttattcggttttacatatcaagtaacaaattgaatggaactttacctgaattccttgaaagaacacatgataattgtcattctaagagtccacttcctagtctagagtacttgcatttgaacaataatgaattgattggtgtattaccacaatggttggatcaacttaggaatcttactgagcttgatttgagctataacttgctacatggtccaattccaaaatctttggagtcattgcaaaacctttcatatttaactcttgctggaaatagattaaacgggtctctccctaaaaggttaggccagctatctgagttgtctacctttgatgtttcttccaaccaattgactggtaacatcactgaaacacattttttaaagttgcacaagttagacaatttacgtctctcttccaattcttttacactaactgtaagttcaaattggacccctcctttcaagctaaatactcttcttttgggctcatgccacttaggtccttcattcccaacttggctaagatcacaaaataaggtccagtccttggatttgtcaaatgctggcatttcaagttccatacctgattggttctgggaaagtttccctaatcttttgtggttaaatgtttccttcaatcatttgaaaaggtcagattcccaaaacattcaacatagttccatttttagatattgattttgagctcaaaccagtttgaagggcccattcctattccaaatgttgagataaatttacttgatctatccaacaataaattttctggtcctattccagaaaacataggagattccctacataacatgatattcttctctctttctaccaaccagatagatggacaaatcccgaattcaattggcaacttccaatcttccatgagtgtccttgatctctcaaataataagttaataggaaaaattcccctaagctttggaaatttgtcaaacctagttgcattggacctcagtaagaataatttgtctggtacaattcctaactctttgggtcaactaagttctctccaaacattgcacttaagtgacaacaagctttctggaagcatcccatcatgttttcgaaaattgtcaagtttggagacacttgatcttggtaacaacagattagcgggaaacataccacattggcttgggaaaaggttgaagaatttaaggattctaaaattaagatccaatgcttttcatggagagcttccatccttgctatcaaatttaagctcattacaagtgctagacttggctgataatgggctcaatgggagcattcctactagctatggatatttcaaaggcatgattcacgttcaattggataactttcatctatcctatggccctacttacaagagcaagtattatgaagaaagcatggttttgaatgtaaaaggccaagaactaaagtacacaaggattctttctcttgttgttagcttagacctttctgccaataatttgagtggagaacttccttcaagtttgacaacaaatttgttgggtttggtgaatctgaatttgtctaacaatcacatccacggttccattccagaggatatttcaaagttggagcagttgctatctcttgatctttcaag

SEQ ID NO: 221571 - DNA, 1017 bp, Cannabis indica
aattactaattagcctttaaatttattaattaacccaaaaacaaatccggtgggacagccctattagtgtgggtgcctatcactgtgtcaagacatagtgatagtggcaccacctatgtcttaacgagacactggtggtgtctattgtctagacaacttttatctttatcccaatttatttaatgttacttgaaaaaatgctaatgttcttctctttctacttctatagattttaatgccgagaaaatagcttgcttctcccaaatccttcatttagaattgttcggctaaccactttttatgtctgataacctttctacattgtttccaataagtagaatattatcaacctaaagaacaagcaataccatgttggttttatcggtactaaatcatgtacgcattggaagagtttcatattattaattattgaagccgactttcgttaattaataaatataagttttttttgtaataaatatactttggaattaaatgaacactaataaataataataataataacaaatgacaagaggatttttaacttgggtttgaagttaattctttatagtccacgagtccatcttattctgagattaataaattgtatacagaatacaatgaaagactagtatatctctctttttctcagattggtcgtctcttgttctctagattattatatctctatttataggagtttagagtgacaactattcccttagaatcttatcacttgtaaccattcgtaaaatgtggacaatccccacagttcacatttacgtcacatgggataatgacaaataacttcttataactattcttttaactttatctataagcagttatgctgactatgacttattcttcttgtaatgcaatcaatctctttaagacgctttatcataaaaattagaacttaagtatacttcaagtattacttcttgcgttcttctattaatgatgagtgaggcatacgtgagatgcttatcacaattgttgggttttgtgccc

SEQ ID NO: 221572 - DNA, 1742 bp, Cannabis indica
attattcatcttgccaatctagtgagctggaattgaccactttttagcgtgaatattttgatactttcactaaagccataactcaagttctcaaacacagttaaaattctctacttggaactctgttttcgaaagaaattcataagtttaagcgagtaatcatccatgaacattaaaaagcctcactacaactcctcattgccatgccactacttagcaagcaacaggcagtgagattccccataacaaagcgaactacaagcaagcgtctgaaaagactcaaacttggaacacagatctatgggatctctgcctgatttggagcggtcgcctgttagagaaacgagctacgtaagtatctgaaaggattcaaactcaagattgtaggcctacaggtccacctcatgtagttgataggaccaaccacaattctgtttgaagcaattcaaacatttagggaatcaatctcctctatgtgattctcttcacaagtctaatgactctagaccaccccatgaccctacaaaaggtaaaaggacctgcagtcagaccaaggggaagaccccgtaagctttaccacaaaaatgaagagtatgagattcagagggtgaaggtcaatgaattactccacagtcgaaaatactttcgtgatgaacaaggtgcttgatgtagatacttcgcctgaggtcctgacggccaaaagtaggaatacttcccgtgggtgcatggagacatattgaacttaagaaattagtccaacttcctccacacatgtcactctgaggaagactattttgaagagaataaatggtatagtaatgtaggcaattactcatgaagcaaacaatcaagagacaactctatcgttatacgggataaatccctgtagttgctaccaaggccacacaaccaggaaaaaactccaacacctaggtcgaccgatgcttttaatcaactaagacgacaaaagcgcatgcataacaacatcaacaagaagcggctagttgatacacacatcaccacagtgtgtagggtcaaatttgacaccattgcccctctggttaagggtatcacttctcttaagccaacatggtacaagttagatcgagagtaattttctcatctctcggatcaaattaaggctttagaggtcccctcaaagtttaaaaatccattgtggcatccatacacaggcaaagaagaccctctctctcacatccacaactttgaagtacaaactgacctgcaaggcattagagacgattctcattgtcaagtctttctagctacactatcaaaatctgtacagtagtggtatctcaagctctctctgagatctatcaattcttgggagacactcaagaaatcattctatgaccaattcgatctccatcaaagaacagaccaatcgagcccaataatttggtctgcatcaagcaataaaaagaagaacttgtaaaggattacttacaacgattcttagaggtaaccacgcagacaaagatactcagtgaagatgccaaggtcattgcattgacagttggactaacagtaatgagtccattatggaaagacttgaagctcaaatcagtatacaccgttcaagagtttctagacagagctgtcagtttcatcaagctcgaagaagccttcaagaaagtcagaggagttgcttaaccataagcaactaatgacactgcttatttatttcgaagaagccaagggaaattggccagaggaac

SEQ ID NO: 221573 - DNA, 2444 bp, Cannabis indica
ggtgtcaatagttgcgttttcttcccttgaaatttgtgtgatggcatatcctttgaattgtggcaagaggtcttagattttgcttaggtataccatcatcttttctcctcaaaccatgtattttccctaaacattattaacgactcatcccgagtcactacaaatgtccaggtattcaacatgtacttcttgagcaagtttgagtctaactatgagtgtctcatactcgacttcattattagatgctgtgaatataaatttaactgctccgtgcaaatgttgctctcgaggtgtaatgagagcaattcctatcccagacagttgattagtggatgacttatccacgtgtagtttctagacttgtttctcctcggtttttttctctagaagaagatctttttctttattaagctcaggattaatttgtgaatccataacttcattacccgtacatttcattacaaaatttgctaaagcttgactttttatcactgtcctcagttgataagtaatttcatattgttctaacttaatttcccatttgagtagtcgaccagaagcatcgggcttttgtaggacttcctgaagtgggtggatggtacatgctctgataagatgagcttggaagtatgaccttagttttttttaggctaagagcaaggaataagtcaagttttccattagcgttatcaactttcaacatcgattaacttattgctgacatagtagataagatattgagtgttgttttcttttttgattagcatgacacttgcagcaaatttagttactgcaaggtatatcctcaattctcatctgttcaaaagttttgataagtttgaaggttgtgcgacctgcttttttattctaaactttaatttgctattctcgtctttgctattcttttgaacttttctaatatcattcaaaataaattgcttagataaaaataggtttaatattcgttatgattaattactttaaatatatttggtttatatcggtctcttgactactattattacttgtcgatttatacacttgtaagcgtatcatataaattttcgcaaaaaaaaaaaattggcatcgttgtcgaggattaaaaagcttaaattttaattaatatagtgaagaagatatcaaatttcaatcaaagtttttattcatttatttattttcattaataatgttgtttttaattgtttgttgtgaaggtacatgcgcaaatcttatagttcacctctctcaccttttgattctaaaattgaaataacattgaagccagtcagaaaagtcctacgagctagaaagatggctgataacagagtcaacaacaataacaataacgtcgctaatggtgccaatcttgtggcaacccggaccttgagagactattttaggccagttgtcaatgatgatttcttgagtgtgagaagacagcaagtgaatgtaaatagctttgaattaaaacctgcacttgtcagtatggtgcaacaaaattaatactctgatttgcctcatgaagatccaaacattcacttgtctactttgttggaaatttatgacacaataaagataaaatgagttccaccagacataatcaaactcaagctatttttattctatttgagagaacaggctcgttcatggtatcaatctttgcctcttaatgcacttacgtgggaagagaccactcaaaatttcctcactaaattttttccaccttccaagacttctaaattaagggaggaaataactcaatccagatagtcaaaaatggagcaactttatgaggcatatgatagattcaagaagatgcttagaaagtatcctcaacatggcataatagattggtttcttatccaacttttctacaataggcttaataatcaaacgatgtcacacattgatgctgcatctggtggtacaattctatccaagacataaggatgagctatgacttatttgagaatatgaaaatgaatagttgttaatggcaaaatggaaggtcaactgttaaaaaggcaataaggttaattgaagttgatcagatgacgttactaacggcgtaaatttctatgttgatcaatcaaattaaagggcttacaaaaagtaaagtggtacaaagtcaacaatcagtaaacatggcacaagccttggggtctaatcaagttagggatgaacaatgtcaatatatcaatcgaagctataattttagacccaacaataatttgcctaactactatcatcctagtcttcgaaatcatgaaaaattttctaatgataataacaagaatgtacttaatccacctgaagagcccaaccaataaatggggagtcaaccttctctatcactagaagatttattgaaaatttattgtggaatctaaggcaagacttgataactaggaaacccgtctcaactgttgggttttgtgccctaa

SEQ ID NO: 221574 - DNA, 1998 bp, Cannabis indica
tgtattgtagaattttccatatatttatatataaagagtacaaaacttcatatgtgatgtctccatttttgtacggggtcacgtttttcttcactatacaatatacataattcttgagtctactagaaaagccttgctattaagtacaatatgtttatgttgtacaataccatattaatgtggcaagttgtgattagttattaattttttatattatttattaaattaagttgtatgaaatttaatatgtatttacactaataataatatgtcaactcttgtaatgtttggcacaataaaatactccaaatatttcttaaaaaaaaacacacttgattgaactttgtataagacgtggtgtgaccggtgttcattgatttttattctaatgatccccgatcaattaattcaacaaatacaattatattaatcgttatctaaaattgtcatttctattcgaacatataatttaaatattcgaacattcaatatccctatccaatttaattagatattcaaaaatagcatctaataattacaattaaaatatttattgttagacaatttattggtcatttgatcgatttattggtgtaagattgttttcacttgacaataataataagttagtgaccttccttaaaaaaagttagtgaccaatatctaaaatatcttgtaagtagataccaaatcatattgaaaactaatcatatcatacaccctgaaggaaataagagtaaacgaacataaataaaaaaatttaaaaacatggaataaaaatacacaaacatgcataacttcccacccagctccatacttctttttttttttttcatatttttcattttcttcatatttcttttttttatattgtcacacaccaaaccagaccatcatggactactggtggtggtgtacacattcagtgggaacggttgggaacctagcggtattggagcagtagtcataaaccatgtggttggcccggaacccacatgagctgttggctctggtgcaagttaagctcagacaacactcgcttgtcccaccagtaccgtttctcggttgagctcctgcacttttttagcgatgtcatctgctgcaaccgatgcaaggcatttacaggcattgatttcgaaacccttgtaatagtgctctcacaaaaatattgtattttaaaaaattaaatgtaatttttttaatttgataattatagactaaaataatagaaaaaccatcacaaaattaaataaatttaggtattatatgttgtacaatactatactatattaatgtggcgttgtaattaattattaatttattatattatttattaaattaaattatagaaaatttaatattaatttaacttataaaaatatatcaactctattctcgtaatacttggcacaataaaataccccttaatatttctaaaaacaaacacacttgattggactttgtataagacgtggtgtgaccggtgttcattgatttttattctaatgatccccgatcaattaattcaacaaatacaaatattaatcattatctaaaattgtaatttaaaaaaaaaaaaaatcatatgtactgttgaccattcttacttatatattgtattgttaaaaatatgtttgcttattgtaataatttctcatttactaattgtttgacattgattacctaaatgtacacaaattattttcttagatatctggtctaaattttagagcaaatattgatttttccaattgtacacttttcagtagtcaaaaaatataagataaaaggaaattacataaagggagtatattcagatacattgtaatgtatatggtacgtttagtttccttcacaatccaaaagttttgtttcaagattgtgataagtgaaataatttatatttttatatatgacttcatatttttatagacaatattttctaatatctctttaagatagtgactattttagtttaccaatcttaaatcaccttat

SEQ ID NO: 221575 - DNA, 1782 bp, Cannabis indica
tttaactatcattataacgtggggtgtgaatttaggtgtctagaaagagtgttgggtcttcttttgggactactttggccattttggattgtgagatgtgtggtaccttgcaattgcctgactacgactagtgcattagccactttcagcatgattatcttcagtggctcttactataaatgacgaacttgcctcatatgatggtatctgtatgaatttattatgttttacactcactatgaggattataatatacttaattaatactctctattttataatttaaaagatttggtaccttatgtttcattgaagcaaaaaacaaaaaattagaattttgtactttcaataatgcttatttggtacttatattttgaaattatacacgtgtttagtacactaaactcaaatttaaccaaactacatatatgtaattaaataaacaattaaatttgaatttgaaactcataattgaaaacaattttattgatcaagtttgagttcagaataacaaatataccaattaaaaaatacagaataccatataagcattattgagtacgaaagagtacaaaaattatattttgataaaagacaagatacctaatgaacagacagccctgattaggttaacaagttctagaatttcatatggcaaatggaaatttatgccaacataaacgccactttatttctcaaaaatatattaattacaatatttaaagttcacagtattcatatgatattcatcactcactatataatagcacatattaatattacaacgattagcttatctagtttgatggttttttagctatagtaaatggcctatttatacttcaatagaactaatacaaacttttggaagtcatttagaaagggactaaaccacaacgttttttaaattaaaacatgcatattttcattggtctacaggaatccagctttgttgtgaagtctagcacaattccagaacaaccagtaaagattaatgaaaagaaatagttaagaactgaccttcgacataaatcacagagctaaacgagctgctattcattctcgctcagcatcttcaatttcttcatcctccggtactccacgaagataaagaacattgttacatctgtagtacaaagtaacaaggaaatgtaattagggaccctataagtaaaacttaggtatttatgaacagatcgaatagctatagttgaaaatttagaagaaatgaaatgagagagagctaccggatcaaaatttcaccaagatttccagtgaattgtccatcaatgtactcttcagtattggccaactgcacgtaaactccaatcatcatatattgaaaattattgaaaactgcacaaacgtatttgtgagctaacaaggtaaatagtacaaaattgtatttaaaattacagaagaattgcaatagttcaatgaaaataaatttttcatctataattaataatgacatataaagtagaaaaatatacaaaagttagtgaagacaatacacaacaatatcacttaagacttgaaaaagaaaatccaacatagtttatgaagaatacaacatacaaatattataatgagatacaaacacatattttaatacacaaatgattataaaaaaaaaattacctgtaaattcatgtacgagtccacagagaccagaaaacctgaaaatagcacaaatgaaacatgaatataatgccaaccttattaaatgggaagaaaaaaaaaaatagctagagccaaaagcaacatacctttgtactccat

SEQ ID NO: 221576 - DNA, 1421 bp, Cannabis indica
gtatttaaggaaaatgacaactatatagaggtgcttcatgttagtgtcaacccctatattatatttctcgatcttcagacttattccaaattaaaaaataatatttagatatatattgtcactaattttattgagaaatattaaaggacatcagtggtgcctagcaccctcctatgtatctattggttcaactaagtatcgggtctcatataatttaatataataacttttagggagtatcgttaaccaatcgcaacgcgacatgtcgtgaaagtgttaggcaccagtgatgcctaatagcaatgctcagttttattttagtgactcacacaataaatgttgtacttaaaagcaaatttagtgataacaaactattatttttgtgattaacattttagccatgagttttttaataataatataggaataataatttatgtttacttgtaatttttttacttttagttataaattttgttgtaattaaaaatattattttttgtattattatatattaatatataaatattattcatataaaatatttcttgaccacttgcactaattacatatttttctttttccatagattctgatcttcaaaatcttggtgaactatgcatccaaataaatatttaattgagataattatataaaatattattttttgtaaattttttatagttttacgttcaaatatttttttttatatttttacggtgctctataaaacaatacgaaaacaacaaaaaattacatcaaaataacatcaaaacaacaacaaaaaataacattcaaataacaacaaattaacaatagtacaacataaaaatatattaaaagaccgtattttctgtaaataaaataataaaaattgtaaaaaatatttaaaactccgtacaaccgtatttttataattttttttattatttttgtgtatctgtgaaataattcctatttaattttcatattattatttttattattttaaagcaagtgcattagccggcattggttacataaaaaattgataataatttaatgatgtgataaatgaggtagctgagaaatatctcatttaataatttttcataatggttctttgcaacgttatcattattttaattgtaatgtgtaatcaattgtgttccatgtggagatgtacatttattatagaataattaaaattaaataaaaaaatttaactgacaactaagagctgtacatttatgtttaaaattgtactatgatcagatagattaataataaaaaaaaaaaaaaaaaaaaaactttataaaaattaagtaagatataatatatggttctaataatagtgtgtttaacttataagattagacaataagaaaaatgaattagcttaggtggcgtttggtaacacttttttaattagttttatgttt

SEQ ID NO: 221577 - DNA, 1348 bp, Cannabis indica
agactttaaaaaagagggtaaaaataaaagaggacaatataaaaaaggtatagagtgtaatttcctcttatgcgtaagggcgactttgattcttatttacatttgtattcttaaaaacataccctaacatgagaacatagagggcaacttactaaattggatcatttttaagtaaacaaacaaaaggatattctcgtgaatttgattttttcaactgtcgttttaattagtaattagttaatcttctaaagattagttaaattcgaaaagtaaacgtacgtgcttaatgctctattgacctaatgcacattcgtccaaataaaattaaataaacatatatataaggaacaccaaataattcgtaagtgatttgctcatcagtgtaatataatatgcattattatatataatatatatgcttaatgtttaagacaaattaccaaatataatactaatgtggtctacgaatgttgtatgtgaggaggtatataatataaaacaattgttaacaaattaataaacataaaataaagcataactatatatatattagtatatcattaatacctaaaaatacatgtacatataataacatttgtttagtaccaagttaccaaccaacatagcatatggactagatggaatgcatgccaccaccatatgtgattgtaattaaattaaagattatttatctattttttttttctttttgtgtgtgctcttttcaacaagttgactctagaatttccaaaaaaaaaaaagcctagatttctaagctactgctgcaccgaaccctacataattatagctcattaaaatattttttgaaaaagaccttaacttataaaaagtttttatttataataatattctctctctcactatttttttttaaaaaaaaattgtacgtattcttaggtcccaagcaatctttaccaaaaaaaaaaaaagtcccaagcaatggcagcaaatttgactaagatataaatatatatagctagtttgttaagtttcctacgtagacagaatttacaactaataaaactaagctttaaattgaatatatatagcgctggcaatgactcaacttgtcgcaatgttcttattatttaattatgatatattctaattaaaattaattaaacatgtgatttgaaaatattaatcacataaaagtattaattatttatggaaagtttgttggaaagtcgaataatggccattagaaagtaagaagttgattttgcctaacttgcctaacttagactccgtactgtgtattcattttgtttatattattgaacatgcatgtaaatttacatgaagaaatagtcaaattaaatacata

SEQ ID NO: 221578 - DNA, 1171 bp, Cannabis indica
gatcattaaccactcacaacacgttttgtcagttaagtataatattagacactttaaaatgtataataacaatactctcatcttattctagcacactaaataaagaataactaaataaattaataaatcaaaatgtaatattaatgatgatggggatgaatttttcgcaggagcatcagccaccaccggtgcaaaagtattattatcagcatcagcaatggctggcggaagagtagcagagccacctattgcgtcatccttgacgacagagatagtgagtcgcatgccgtgaaagcagtaacctccgccagagataaagtaataaggtttagactcagtgagttggaacacgtcacgacctccacgtgtcacgttgtttaaaaatattttgtcattgcaactcttgtaacttgtttcattcacttccagtacattgtaatatctcttgtcgaacacaaaatctattaatgtaattaattattattatcaaaaattttgtaatcaaataaatttttatacacttaactatttgttttttttttggtaatatccctttaacttaatttttctttacgaatttatgacgcaagttaatttacactattaaatactaattggaattgtcattatgcacacgtgacatcgtacaaaaacatgttatgtatgacggagccaccctgaataaaaggtggccatggcacccaaaattctaaacaaaaaaaattattctttttttcctcattttcttcaaaatttatagtttggtccctcttaaatttgtttttctcccctaaagttcaaactctagctctgtccctcggtgcacactgacaatccaattagtattttaatagtgagatttaatttatactttaaatttagaaagaaaataaagttaagggatatagtaaaaaaaaatcaaaaaattaaatgtataaaattaaaatataataaaatttcaccaacaattaattaagaagaaagaaaaatgaatattaataatgaatattgataatagaaataattacttacaaagccaatcgcctaggaagaaaggagcagttgtggtggaccattgagtgtagttaacgttttcattccaacctttagatcctcctactttgtgtagtactgctttggctgtggcgccgctaattgcgcccagccaagc

SEQ ID NO: 221579 - DNA, 1735 bp, Cannabis indica
tttttttttagacaaaaggcctaattttgaatttgcactaggtccctcaaaagcttgagacggccttgatggcgttttccttttaaggacttgattttaattactgtgacgtaaggttgaatttatgatatatatatatatgtgccctgtgaagtggatagatttccgtagcgtttcggtgagtacaaaatttagaatttccgtgttctactgtttttaaaaattcttaggagatcaaaaatcgtatttttatcataacttttcacccgagtgtctatttcggacgttttatatactattttgaagcttgcgtcgagctctacaatatggtgtatattttatagccaataagttttatttagtgtatttgtacttagcatttggtaaaaaaactctaggttgtcttttgcaactgttaagcagtgttttttgggataaatacttattggtttaccgttgttgtgacataggaccgagatcgtgaggaatatttcttcacttgggttagccgacatggatgaatctagattataggtaaaaaaaaagtatattatactgcataacattttatcacaatacaattaatattgttgtgaatttattaattttgagattaagatatggtactgaaaagattgattaattaagcaatgataatgtgatgataccatgaatgtgatacacgggctcaccttattaagtgatgcgatatacctggcggcgtaccttattaggtacgggcggtagtgatatgagaatgtcaggctatggcatagatagaaactgttgttgggtttcttcctggcagagtactttattaggtacgatcagcagtgatatgtgaataccaagctatggtacgggctcatctgattaggcgatgcgatatattggtgacaggttgtggcatgagctcaccttattaggtgatgcaattatgtgatatattggtgccaagtttttgcacgagctcgcttaattaggtggtgcggatatacgatatatgggtgctaagctatgggacgagcttgcctgattaggcaatgcaatacaggattatcagattaaaacatcgacttgcttgattaggcaatgtgatgtaatgaagatggttactttatgagataacatatataatttatattattaaatgaatataatttctattattggtataataattttgtattactaaatatctatatactgatatttattcgtggcagatgctagtagtgatttggatttcgtcttataagtaatgcgtgattgtgtgattctgattgtttgagtataaataataatatttgaatgataaactatatgattattattattactgttcttgttgagtccttgtgactcccgggtgctatgtagtgcaggtaaaggcaaagaaaagctagatcaaccataaggtggcaatcttttccaacaatatacatattgaccttaccggcttacgtgccgagttgccaagagttgttttaggctgtttctgctgtgtattttggtttttgtattttgaatcgttgtgatatatagtcttttataaactttttataacaggacttcctggaacacatttataatatcgtcatgatgcccgtttttagtgttttattttagtcaaatttttaatatcatcacggtttttagtaatcaatcaatctattagtattaaactagtttataaaatcacacacgtggcatccctatgggatagggtgttaca

SEQ ID NO: 221580 - DNA, 1285 bp, Cannabis indica
aactaaacttaaactttgggtacttatgccgctatttacccttgtactaatagtaatattaacacgtaaaagaatactagacactaataatattttttaacatttcttttttcatttattctttcttttagaaaggaattttcatttattttgttgtgttgtggtggttaatttctttaaattaataagaataagaaattaagatatctataataatgtgtctcataatggtttttagtaatggtcataggtattgcatttttcttttttgtaaggtggtattgcaggttaatttagtcgagttatagtttatttttatcaatcttttgactattaggttacaaatatttaattataatccgtttaattaaaaattaaagcagttcaacccattcaattattttatcgatttgatcgagttaactcgtccaagtcgttcttgaactggctgcatttcttttttgcatatcccctttgtttacatgtttacaaaggaaacatttgatagaatccttctttatgatagcttgtggagtcattgccttttttttttattcttcttgaatggttttcgtttctttccttgagtgaccatgtgagcactttctccttactcttgtaagagccttgcttcctcttgagcacacatggtcatcaatccattgatactctaattttttttttatgtgtattgtagaaaattttgaaaggcccatattatggaggaaaattgtaaagattaatgtaataaaccaagaaagtatcaggagtgataacattgagcttcttcaaatgagcagtgatatccctcatctttgagatgtattctcgaactcctcggacacccagtgagtttggtggatgagaactcttagatgaggttgttgaataaagatttatcaaaggtatcgaactgctcatccatcactttgataaaatctttgaccttttcaagtggcttcactgaaccacgcattctcataggaattctaaacatgatgcatagatgattagattgctcccactttatgaaatcgctgtaagaatagaattacaaatttagatgttaaaaaaaatgagactttaatgaattcatattttaccaatgtaaaaacatgatgaacatgatgaagataaaaattttactaaatctaaaattgcatgtgggataaattttaaatctaataaaattatatgaactttatgattgatttaatcaaacatttaatttaggaaataaatggtttgtaatctatcttaattaaatttgtgataacactattaa

SEQ ID NO: 221581 - DNA, 3490 bp, Cannabis indica
atgcactaagttactcactttttacttgcttttgatctccatttaagctaatgttgaaaggaagaactaaagaaccagatatgagaaatccatattctaatatatttggtaaattattgagcgcatatgggtaagtgtcaaatccagaaatccaaaatcaaattctcttttcatttcatctgtaatcgaagcaataaattcattcacatattgcaaacaataaaacccagctggcccttcttttttgtattgtttgtttgtctatttacaattagttgccaacaaaaccaatcattatataacctggctgaaaaaaaaaaacccatctgtaattaatttctaaatcattgtccaatcattttcatctaaagtagtaggcttttcagcaggggacatgcttccagacttaggaggccttttcaaaaataaagatgactttccatcaaagaaacttgaaaactgttgacctcttctcctgttttcggagttcttgtgttcttttgaagctggtttccctaagttcctatctttgccaccaaagttaagattgagcctcttaaacagtctttttggttcacctgcaggactaggactatcttctgccagcctcactatctttagcacttcctcaggattgtgtaacatcctctccactgtttcgtatacctgtacaattaatcagaccaaatttaacagcgtaatcattttcctcactatgaacccatggagaaatagaattaagatattaattctaatgaacccaatgtcacatttaagtacgaagtctttacatctagttttaatagcttcacactatcaatcagttctaagcttatgagttttacctggcaaagatcattgattttctcactcaaagcgttggattggcaaacagcaattgcgtaatctttgcattcataaaatagctttgacaaatcactgtttgtagatagagaagcctccgcaataacaaagcctaaacccagctgaatgtaataacaacacctagttagtaacaggctattgtagacaaaattcaaaacctcaaccacacaaataaaaagtgaggcaaaaaatccaacaagatgagaatatttatagtgaggatttgtcacagaacttgtaattcacagtatctctgcccagaatacttgtttcaagtcccattttgttttcatcccattcataaaaggtttttgaaaactttaaaagcactgaagtaatctcagcagagatttagcacatttaaaagataatgaaggcagagatggaaacggagaggagatcagatggtgaacagatcatatagttgaagccatgtcacacaattcataaataaaatgaagccaggacctgaaatttacattactgtctaaaatcatgactgaccagatgccatgtcaaaaactcgaaaactattgcttatttatgtctcagataaatagttagtcaagaaaataaactataagctgccaagtaagagtgctcatcaaaccgcctacaccatataaaaaagacagtttgaaatcatttgcagtgaggatgtggtcaaaccgcgcggtacagtgcagtttaagttttaaattcattaattgcaattcaaatcgcacagcaccaatatttataattttatatagtaagtcacacatttatacattaagttttgatttaagttttaaaacatattgatctaagtcttgtcttgcttgtacaaacaaaaaggtttattgttaatttttaattttaattctattacatgtctataaagatttatgtatagagatttttcaaaccaaacagaaaaaatagatttataatttggaaaggataagcagaacttccagcctgcactcttcacaaggaaaaggaaagaaagtaaaaaggaaattacattgtagcccaggtataactttttagaacaaatcacagtatttctttactcaattgaacacgagaacagttaaggtataacatatagcagtttatgaaaatttactaatactcatcaaaatgacagcatctagcagttcataagaaagacaatcaacttactaaagatacaaacaattgctcaaaaagctcacaaggtggaatttcctccaaattgtccagaataccttccctacaggaccaatagcttagattattacggaaaccaataataaaccaaagtgaaaacatcaataattgaaactcacactgccaaatcctcatcaaacaagggtgtttgtttaactgctggaactggctttgatgtctcccacagctcacgccataaatttcctattgaataagcacaaacattgttcaagcaaatttcatacaacatttctttgcaccagcacgctaatatatttctaagaaatgttccattgagtagattaagtggaatggctcaaaatattgattattgagattcctcttctgaaagaaaacatgggaacatttctgccatattcagaaacccatccattgagtaattaaggttgttagagtttcttgttcatgttatatggttaaaattgaaatcaacagaaagaaaataggagattaatcaaagagtttagttgaaacaactcatcagtcatttatcagattcaaacttgctatatcagactaggccctctgtttacatctttacacactactatatgcacataaatatacgagtgtttttcctaaacaactcttcatgaagaaacccaagttttatcgaaacattatattaaaaatagtacaagtttagcttataaacatgtaaacctcatgtatttgtacatatgcatgttgtataccttctttcttcattcgactacttaattgacctcttatagacaatatgtccccatcattagaagggtctttgtcttcaataattggctccacttctgtccaatcaggaggagagtgccacctaacaaaatcttctaaaatacaaccaggattcgctgcctagcaaatcaaattaaaagaaaaatgagttcaaatatacaaatagaaaaatatatgagattgcaaagcatactttttataaactcaaccttaaaagcctgcatatcagagaggagttgagaacacccagcaccaacactgaccattaaataaatggtgattattagaacaaatctatattgattaagacacaaaacacactcaaatatatatatatatatatatatatatatataatatgcataaacaaacacggtgacgacatataaattggtaaacgcagaactaagaaataagtttacagagaccacaatgttagccttagatattaaatacagatatatgagtgagtaggaaagggaaagggaaagggtaagaatttggtttaatttgtaattgctttgggagagaaccaagctcgaaatcctgggtattaataaaaggcatagcattattttgaggcctccgtcatggtgccgagattgccgctcttcaatggagaggacccgtatggctgggttcttcacatagaagaata

SEQ ID NO: 221582 - DNA, 4248 bp, Cannabis indica
tggatttttgaatgtcgggtgaagagaagagaggagataacttatttgtttatttggtgagacaaaaaaatggtaatgtaaatgggaaaagtattttggagataatatatttattgacctattctcgaaatattaggtatatatgtttaagggattaattttcccataatgtaagcataaatgttctatgatatatacttgattcacttattagagtgagagtaatccttcactaacaagccacaattggctggtaataatatgagagtggacccacccacacacaaaagagggtattagagtctcacattcattgatatatggcggtaaacattttagtgttggataaccttcgagtcctaatccaggtttcatcagctacttaaagttataacttgctaaatgtgacttgtgagacacgtgtttaggagaggatcaagagattataagcaaaaccacacttggaagttaaatcttataatttaataatgaaatgattactgggttgaattgtgatttagtcagtttttacggtttgtttcatttttttaaaaaataaatttaaaagagaaaaaaataaaatagtactgtacaagggcatgacagtaacttgagaatcaacacctcacccaagcttattactataataatctccatccaagtcgtctttcccgagagaaaaatcacacgcagacacagtctctttctctctctactcatctttctatttatcaattctcagaaacacagtcccacttcgttttcttcatatcatcatcttctgaaactctctaaagatatacccttttggtttcttcttcttctgagcgatgggtacgagctgccgttgttctcatacttctcacatcactgaaatcatcataaccagcttctttcgccacaagctatagaaattacctcaaaccaacacccagaagaaagccttacatacatggttgtttaagcaaaaacaaaaattacaatatattttaaatccttaaagagcaaacaaaagaagtgaagttaatttgtgagtttgaacaaatatggcgggtgggagagtttatggaggcagtactggatcttccagtcttagtgttttgcttcagaatcaaaggggttcttctgctactgagcctcttgattctcttttcctctctgggtcttgcaattcctcttcttctccttcttttttaggtaagatagttttctcttactcttccatggttacatgcagtttttttctttaatatgtttctgatgttttcttttatcatattactctgttttccaatatgtttgtgttcttgctcttcctaatgaaattcccaacttgtacaattaagcttaaacgaacaacacgtatatggtttttgttcaggatcaagatccatgatgagttttgaagatgttaatggtacaaatggatcgaacaagtcgttttaccggtcatttggctgtgatgaaatcggaattgatgatgacttcgatgagtattttcatcaacccggaaagaaaaggaggctctcagtggatcaagtccagtttctggagaaaagtttcgaggttgaaaacaagctcgaaccagaaagaaaagtccaacttgctaaggaccttgggttgcagcctaggcaggtggccatatggtttcaaaaccgccgagccaggtggaaaacaaagcagatggagaaagattacgatgttctacaagcaagctataatagcctcaaggctgattatgaaagcctccgcaaggagactgataagctaaaaactgaggtcaaatttcactacccttttagcaattgaatatagttttcaagtttaaaataaaatattatcttgtcataacattttttttttgatgtatcaggttcaacttctctcagatgagttgctgaaaagagagaaagagaaagagagtagtaactcagaagtgtgtgatgattccaacaaattgtgtgatcaagaagagctagtggagaagccaataataggagaatcagcgtcagagggtgagatatcaaaagcttcaacaacagttgtgtgtcaacaactagaagatattagctcggtcaggagtgatatattcgattcagatagcccacgttgtttcactgatggggttcattcaaatccacttatggagcctgcaagggattcctcatatgtatttgaggctgaccagtctgacctttcccaggatgaagaagataatcacttcatcaacaggaccttcctgccttcttcttcttcttcatacatcttcccaaagttggaagatgttgattactccgacccgcctgaaacttcatgcaattttggataccctgtttgaggacccgtgccttttggtcatggtctttctaagcttttcttttcttttttttttagtcttttggtaatatattttgtcttgtcttttcaatttctggggtttatgtcttgtttaaaaaaccatgttaatagctatatatatttctaccaataaaatgtcataaataacgaactgatcttaatatgtttgagttatggcctgcatatacaaagatgatggttttccccccattctgtaatattttctgtttgcttgtttatttactaatgctctgttgttaattgttgatggaattgtataagaatgccactatttccttccaattcaataataaatgaggaaaaatgtttactcctttaagttggtgaatcaagttttgtgaagctaccatatgttgtttctttcttgaatagtaaccacatgcagtaagaactagctaccaaggcattaatgaatattagctcaagatttgcacacacaaaaaattaaagttgactttaagagttgtggagaagtgtaaagaaactttctcagttccttcatagtggagattgttgaagcattttggcaaattatgctttctttctttcatgtttgtgggggtcaatttcaatgtgactcggcaaaaatcactttattttttctttggaattactgttccaaaagagaaaaatttatgtagttgcccccctctaaacatgcatacacagggccattaccattttattactcattctttttcttctctttaagactaaaagtggaagctttttcaagggagccctccataaatatgaaccattcttagcgttttgagattcaaagaatgttgacaagaatttttttttaagaggggccaacaaatatgtgtgtgtgtgtacaaagaatcacatcaagagacatatagtaagacccaccttatagacatagcagaattatgaccttgaaatgattgtgatattttctgcttatctttgcttgaggatttcaatctttagccaaaagccatgttggataacaggagaagtaaactcaaacttcatatattgtattatcaactcacgatatcctttttttcattattatttacacaatttatttactgaaaggggtaatattgcttacagaagaataatgatagtgatccttagtaaaaggtctgcatttgtaatttgcttttaaaaaaagtgcaattttcatctacctaataaatgaattgagagatttgtccatatccatataataactttatcattttccaaaattcctattcctcaattggtgagaaagaagaaaaaaaccactaattttggcaatttcatacaagaaagcacaaaaatgcaaatgaaaaatgctaaaaaaaattgtgtattttttatcaaccaaattttggagctattccaagtaaattaaaatatagtctttacttggtcaaaatggtttgcttccatttctttcctatgtatttgattgaaatggcatcatcaagtgtgactgctcatcaaattttatacaaaagcatttcttaacttctttgtatctctctttcacgcgtgccacaagctcgtttttattcaatgagatgggcaaagtgtggccactaattagataattatttaaaaaaatactaatttgagagttccaattaatgaaatatatggacgaaatgtaaccacactaatagtatatattaacctctactttttaaactttataatacttcttcaatatattcaatatcacacaatactgatttgtcacagttctacttacaaaaggtaaaaccttagttaagaattggtacatagtggtcaatttattagttattaataggctaattagtaatttttcttcctgaactttgacatgtactaaatcatgccccctgaacttttttgtccgttaaaaat

SEQ ID NO: 221583 - DNA, 2201 bp, Cannabis indica
ccgtcaatctagatatgaagagggcgtagtgagctaccttcctcgtgaaactctggatgtgttcatgttttcgaggggatggcatgtccaaaaatcttgaatttcttccaattggcctcgatgcctcactggttgacgatgaaccccaaaatttcccaaagctcacacaatttttgggattttatttcattccataattgcacactatcacgaagcactcttctaagtcacttgtgtgtttctctgtggtctatgatttgactagcatgtcatccacatagacctccatattcctccccaatagatctcaaaagatctagttcattaactgttgctaagtagcacccgtgttttccaactcgaaggcattaccaagtagcagtacactcccttataggtctaaagcttgtatgttcttggtctgctacatgcatgttgattttgttatacccaggataaacatccatgaaggacaaaagttcatatctagaagtagcgtcaaccatttagtttatccttgggaggggaatatagtcttttagataggccttattcaaattggtaaagtctatataaattctccaaatgccattgggtttcagaccaagaaccgagtttgcgagccacttggagtagtacacatcccagatgaaaatgatggaaataacttcatggcaccatgcaaagacatccagtgcctttgtgatgattgccataatttctttctttactgtgggattgaggttacgctcaatctagatggttttggtggggtctgtgtcggtgacataggcttcttcaacatcctccataggtttcagtattagacttcgcacctaccctggaaatactaggtacatcctttttttttcaacttgtcattggtacattggtgtcctcctggaccattagaaatggttgcgatgccatagtataacatcatatgacttctctttagtcattccttacagtccatgttcctcctaaagtggcagagaatttatgcacaagtgtcgaatggaagtaatttcttccatgtccatttaggcaagacatccaaatattacattttattccatgaggcaatccagtaccacaaaatgtgcagtatttgaaggtactctggattctctccattgaacccaaacaactgggagccataaggggccaagtcttaatccatgaaaccaattgctagaagtggatttgaaaatttaattgaacaaactcccactatcaataaggatatgggcaaccatcttgttggaaattaatgtctctgtgatcaacgagtcatggtgtggaaagtggacagtcacggcatcttcttcagtgaaggttatggcttgctccatgagcttgggtcattatgctagtagttgagttgttccctaacctcatcatcatggtccaatgcttggatgtatcttttttgttctccacgagtcactcctcctatgtgaggatcccttaagatcatttctatccattcatttggcctaggaggaacattgggttgcctaaagggttatctgagaccaggtgctaatggggctacagttggcagagcttacacaattttgggagggacttgagctactaaagcttgcggtaaaccctagatatcccatcagggcatgtgttctgaaattttctcctttgggccagtcgagccttgacccactcatggagatggtctaacctgatgaaatttcaattttgtccttcaataaactacatttattggtatcgtgtccaatattattgagatactaaaatctcttgttggtatctttcttggaacaatctttgaacattggtggtggcttcgtacaatgcacaacttggtgggtggctaggaagacattcccttatgtgtcaatccatttagtgtaccggtataccgaggttcatatttgggttcatttctcccttttttactactagtgtgaataatacctttgcttgatcttttactctaggacagtttcttattgggtgtgacagttatggcaggagtagtggatgcagtaggatatggaaatacactgtaggagtgacactagaatttttaggcaccccatattcagaaaaacatctttagtagcattcaaacctttagcgtatgtgccattggggcttggaattgtatgtcggaaggtctagctgctccggacaactattgagctgccagattttaa

SEQ ID NO: 221584 - DNA, 4167 bp, Cannabis indica
tgggacaatgtgtttggggtaccaagagtttctcatttggactattttcactctgatcacagagatattactgctgtgattgcagctcatgatgaactagtgcagtagcccaaaagaagaagtcgtttctgctttgaaaagctttggttagctgatgctgaaagtagggacataatctctcactgctggttagaccaattttcccataatcctattaataatgtgctaaataatcttgaagcttgtgccactaacttgcaaaaatggcacattgggaagtatggccgtatgaagaaaagggttgctgaagctcaaacccgtgtcaatgaactcaacaataccttggttcgatcaaacaacatcatggaagaactcaaaacctctgaatcaatacttgatgatttattagaacaagaggagatatattggcaacaacgatcccgggtggaatggatgagttcaggagaccgtaacaaaaaattctttcacacgaaagcttcagctcggcaatctagtaacaaaataaaatttctaattaatgatgttggcctcaaagtgcactcacgttcagatttggtctctgtaattgaagagtattttcagaatatctttcaagcttctccaacggatgatgctacaacgtcctctgctcttgaaacaatccctgtcatggtcactactgatatgaactacggtctcactcagccttttactagagcggaggttgatgaagcgctgaaaagtatgagtccggataaaagccctggaattgacggtatgtccgccatgtttaaccaaaaacattgggatttagtgggggatttagtctccaaggcagtgctgggagtactcaatgatggagctgacccaactcccttgaaccgtaccattaataccttgattcccaaaaataaaaagccatagaacatgaaagattaccgactgattaccctttgcaatgtcatttcaaagctcattaccaaggttcttgttgcaagatttaaagttgttctcccacatgtcatttcagaaactcaaagtgccttcttgccaaatcgcctcatcactgacaatattttagtggctttcgagcttgtccatgccattaagaatagaacagcgggaaggaaacagattgtctctcttaagttggacatgagtaaggcttttgaccgagtagaatggagctttattcaagaagttatgaggaaaatgggctttgctgaacaatggatcaaccttatcatgacttgtctctcaacaaatactttctcttttaatgtcaatggtgaagtctctggatccttgaccccaactcgcggtttacgccaaggctgccctttgtctccatatttgttcctcatctgctccgagggcctctcaagattgttacaatttgaggaagatgaaggacgattgactgggcttaagctgactagaaacgctgcaccgatttctcacttgctttttgctgatgacagtctccttttctgtcatgccaatgaaagttcatgtcttgctataaagaaagtcttggacatctatcaccgtgcctcaggccaacttctaaaccatgataagtcggtaatgtctttttctccaaacaccaccttggcatcacaaattctttttcacagacatctctccatgcccatcccatctgtgaatgccatgaaaaaatatttgggtctaccatcatacactggtcgtgacaagcaacacctgtttagtgacattaaagagaagatttggcgccttttgcacaatcagaatgagaaaatcttttcagctggggggcgtgaagtgcttcttaaagctgtggtttaggctattccaacatatgttatgagttgtttttgacttccagtctatgtcggtaaccagctagaatctatgatggctaacttctggtggggatcgaatgaaaatggatcgaaaatacattggagagcatggcacttactgtgtaaatctaaaatagatggtgggatggggttctgatcttttgaacaatttaaccaagcattgttggaaaagcaagcgtggcggttgttggagaaaccagattcggttcttggaaaattactcaaaagtcgttactttcctcataatgattttctacatgctccacatggtcacagcccctctttaacttggcaaggaatcatttggggacgtgagttactcattaaaggcttgcgttggaaaattggtgaaggaaggcagattcgggttgcacttgattcttggatacctggccaagatactttcactcccatccatttttctggtcctgccaatgcaatggttagccatttaatcacagatgaaagagtttggaatgtccctctcctgcaacaatggttctctcctttggatgtggatcgaatcttgacactgcctcttagttttttccagaattcagatgctcttgtttggcactataccacatcaagtgcctacacggtacaatctgggtaccatcttgcaacctctatagcagatgctagtgctaataattgctccagttctatctcacaagcttcttggtggaagtacttctggtccttgcaactcccccaaaaattcaagatctttgcttagcgggttattcacaatgctctaccagttgctacttctttggtgaggcgcaagatcatcacggactcaacatgttcagtttgcaaataagcgtgggaattaattgggcatgctctatttggatgcaaatatgccaaagctgtatggcgcaacatggatctaatttttgactggagtaaagcttctgcaaatgtacaagggagactatttggtacatctctctacaatttataacaaacaagagatggaacaaattatttgcacactttggtcaatttggacagaaagaaatcgagtggttcatggctcttctgcaaaaccagcaccaatacttgcctcttttgctgtcaattacttatctaactttcgaacagcaacagggaaatatcatgctgcagcaaccaacactactacacttcctgcaccagcaccagctgctacaaaatggactccgccaactggtttggatctgaaactgaatgtggatgccacccttgatgctaaccgaaatattattggagttggggctgttgttcgtaattcagctggtcgtgttcttgctgcattggcgaaaccaattatcggtaattttgcatctcatgaaatggaagcaaaggctatgtttcatagccgtaattgggttattcagctgcaattaccaattgcaattgtggagactgatgcgcttctagttgctaacgccttgcaatatggatctattgcaatttcttcctatcgtgatattttacttgatgtttctagtcttctttcctttctcccacaagtgaatgttgtccatgctaaacgctcagccaatatggttgctcactgtttagctaagtttgctttaggggtggatgagacttgctcttggttagacgatttacctctaactttttactctgttattgtaaatgacattcctgtttaatttataataacaagtaacttttcctaaaaataaaaaaaataaaaagtataatttttcattttaaaactagtaatcattatcatatatctataatctatttacaaatatttatatataaatttatggatagtgaaagtttaaaaggtatagcatttgaagatagatagagttgacaatacaaatgatccaaatgaaacgcatcgaaaatactttaattttgaaagagagtagttgaaatctcatcttacaaaattattgactctaatacaatattattattttaaatgttatagtattattattgaatattaatattaaagtgagagtataataaacaaaatctatgctctataattattttaattttctttctctacataagataaaattagaattttaataatattttgataatgataattagatatttagaattaatcacaaaaataagttttttacaactaactaaaaagtttaaacaaagatataagacctaaaataataattaaaaaaaattgaaacacaaaactaaaaattttaaaatatatctttatatattaaaagtgcctatctaacggcatttcttggtttaacattcttggtttaacagaatatacttaaaaataaaagaatat

SEQ ID NO: 221585 - DNA, 2443 bp, Cannabis indica
ccttgttgctctacatttccattctactacctattatccaattctcttttcttttttatattactcaggtttgccataattattagtttataaaaatgtttattattatttctataattgtgtacaattattaccattttttaaacgttataataacatgaacttgtaatgtattaataatcatgtatttataatatgagattttgttctaatctggtctgttacgaatatatatttttttatttttttcttatatgtcaaattcaactataaattaattgataaacgaaattccattcatggtaaataacttttgtttctgtttgcttggatttcaagtggaggcattgtatttttttgttggtgttctagcgatccgaacatagaggttcatgggattacgtttggacctgaattcatgcaagtgtgggttgacaatgttatctcaccaaatacatatttttttcctcccagccactcaaagatcactatacaagaagttgtcgactcttttagtgcatggccattagagaaggttgttccaatatgttaaggttagtttttttatatcttaatttaatgatatccgaaaacagagtcctgaattagattattgggcaatgtgtttgttactgttctattaattactgtattggtattgttgtgtgagcaattacctactgttttgagtttgttgcagcaaagtgttgatcaaaaagtacaagaataaaatctcattctccaaatttgtaaagtaaatttattagaattggaaatagtttatacctaaccaactgttaaactgagagtattaaacgtacataagaagtaagaagtaaaaagatgacatggaccaatagtcttgtttttttagtttacaattctaatagatctgtttctgttttttgttatgcctattgttgtaattagtttaaggatataggtgacctataaaataagaaaggactagatcgtttagaagttgttgggaaaattgtagagacatgctttaaaatctgttgcttctttgtatataacagaaacacaacacacccaaattctccttttacttcttgttctctttaataatttatatataacaaaatattatgtaaagtttttagctggtatatttggtgaagatgataaaattaataatatttggtattttcaaaattagttctcttgcatttaatattttttgaaaatagtttttttttcttagtgtgaaaattctttcaaattagattgtggctttattggtgaataaatatgtaattttcttatttaaaatatttgatatttactttatattttttaaagaaagtcttaatatttattttattcattcttatctaatttcttagttaagaaactgtgtacaagttgtatagataatatttatcatggttacttatttatataaggtaagttgttaaaaaattgttcaggtttaatatatctgttttaatatactaattgtttgtttgaacagaattcgactttcttatagaatatttttcatttattgattgattgttttcttacttgtaaagggcgatttatggtgtattaattaagaatataatgttacttaggttgtggttttatataataaatattgcatatttttttgtaattgttttattttattcattttctgatatgatctcattaatccctccttgtgtgatgtccaaggaaaattttgtggggatgaacttagctttgatggagtctagattcacaatactaactagacagatcaagatttcatatgcacagtttccttatctgtttaaacataatttcgtcacttaatgagtttttgtaaagaaactaattaatattttctttttgtattcagacctttagagctcagttttggtgtcatttttccctataaatatgacctaaccaacaacaaaggttgaactcttccacttcttaatttcttatattttttagaagagagtgtttcttttgtaaatgatagttgttctactattccttgatgagtttgtgtgtctttgtgattacttttatgtgaagtaaattctaaagtgaagacataaaaaataaccttcaggaaggttcatccaagtcttgtttcgggaggaaggaagcaccggtatcttcaagagaagatttctacaagtcttgcttcaggagaaagcaagcactgctatcttcgggagaatatttctataagtcttacttcagaagaaagcaaacactgctatcttgggagaatttttctacaagtcttgcttcgggaggaaacaagcaatgctatcttcgggagaatatttcgacaagtcttatttcgggaggaagcaagcatcgctattttcaggagaagatttctataagtcttgcatcgggagaaagcaagcattcatcatgtaatttgaagagagttgattaagactcaaatttgtac

SEQ ID NO: 221586 - DNA, 1753 bp, Cannabis indica
ttctagacgtgtcaccttgcaatttagttagcgaaactctttaaaagttattacattaaattacatgaaattcgatacttaattacaccaataacgatattgacactagaacggtaggaggatgcaatgcaccactttagcatttccatctactataaatatatgtttttatcagtttagattatgcttaaatcaaggctagcttttgatttcggttaacataactatgatacactattgatccgattcagttcttcaaagaattagagaatatacattttactaatatcagagtaagaattacaaaattccaaactttttgagacagtttggtatctccctaagagcaatgttttactctaaataattcacaccaaattctctatctctcatgagactctctctaagaatctctagtctaggctaacaaagactcctaactaagaattaagcacacttaacaatcatttcagccactaagcacttgacaactcaacttacaaaatcctaatcaattatactattgagattaaaagtaatgttgttttgatattggttcacacacatgatattggtaagtaatgatcatccaatctgttctaggtgattaatcataatgattctttgcatttgtcccttataacccagttatagtttcattctctaatatgttaattaccgtttagttgtctttatatttgcttcatgatataaccttagcttcaaattaagattgagttacatttcccaatctgatataattgtctgtatctatctcttaaatgcaaagtttattggaaccgatgaagcaacaacctgtgttggatttgctataaggaatcggaaaaatggaatgtaagaattcattttattgataataaatttactattgataaaatacttttctccacttcaatgttcctgatttacttttgaattgtagaacctcagttgctcatatggattctccaaatattgtcgataagggcctcgaccagatgctttcatcatttatcgatcgttgtttggatgatgatctagatgtattcctctcaaatcattgttgtaatttcatttgattgtttataactattgtcttgtggatcagttaaccagagaattttgtttttaaaaaatgcaggtacatatgattggtagttttgaagattcttctcctgatgtatatgcctaatttcctctactttccatttatttttccaaataagttaaccaacaccgaaaactgtcgttacattggatggcttggtgttttgataatccctatctaattaatgcaacttctgtgtttattatcgctttcattgctgcttctctaatagcgaaaaaggaaataaccgaagttgtttaaatttatgcagcatgatagtgataactctggctcagaaaatgatgaaaatttggatggacactccttctcattgtgttccaaaaattattgaaactttgatgatgaaagaggagaaatttcactttcaaactctgtgtgtccttgcacataacaccaagaaggattccgaaggaaatgcatgtcccatttttaacggccttgtggttagcttctacttcctaaaatagttgttcaactttgttattatatgctatttttttgtaaaagttacggattagaccttttgttttgttaaataacaatttagtcctgtattttccacttaatttttcgtcaaagtaaaacttgataatcgcataatttggaggtattatgaacagactg

SEQ ID NO: 221587 - DNA, 2713 bp, Cannabis indica
gacggtaataactagccaaaccccaaaaacttttgacttttgtaactatctttggtctcagccaatctctgatggattcaatttttcctagatcaaccttgatcccatccttactgagaatgtgaccaagaaaagacacctgagatagccaaaattcacactttttaaacttgatatacagtttatgttctcgtaatcgatgcataacatccaaaaatgtttctcatgcttcgcttctgattgagagtacgcaaggatgttgtcgataaatactataacacatatatcgaggaaatccttgaataccctattcatcagatccataaaagctgtcagagcgttggttagtccaaaagacataaccaaaaattcatagtgcccatacctagtgtggaaagcattctttggaatgtcctcctcttggattctcaactgatgataacccgattggagatcaatcttagagaagactgttttcccctgaagctgatcaaacaggtcattgatcctaggtaaaggatatatattcttgatagtcaacttatttagctcttgataatcaatacacattcgtagcgtcccatatttctttttaacaaacaacaccagagctcccgaaggcgatacactaggtcgagaaaaccctaagccaagcatcccttggagttgcatctttaattctttaagttctgcaggatccatcctatatagttctttaaaaactggctccgctctgggtgctaagtcgatcacaaagtctatttctcgctgcggtggtaagcccagaagtttatgtgaaaacacatctaagaattcttgaactaccatgatgtcttctggccaaaatgattcaagtcgtgtggtgtccaccaccactgccagaaaccctaagcaaccttcttgtaataaatctttggctttcaataccaagatcattagaattaggatccctgaactgatcccacaaacacaatggttcctcgccctcgggttggaagatccctatcttccgcttacagtcaatactagctgatagttggacaagaaatccattccaaggatgatatcaaaatctactaaacccaattccactaaatcatcactcaactctctatcctcaattttgatcagcatagacctaacccaccttttggagataactaattctttgctaggcggtagggttccaaaccccttatcataacaatcaaacagtttacctaatttatcaaaaattatggccgccatatatgaatgagtggccctagagtcaaacaatatagagaaataagagttgttgatcgagagatgacttgtaacaacagaggggctagcttctgcataggcctaagtaagagcaaacacccttgccggaacgggctttgaaattatcttttgttcttctttcttgagctgtggacaatctctcttatagtgtctaggcaaacaacactataaacatcctcaccctttacactcacctaggtgattcttcttacagttaggacattccgggtaagtgtataaggttttggaaccaccctaacggttgtcacgatcctggttcccttgaaacctcttgttctagtttaaaccactgggtgcagatggttcctttctcttctgattggcggtcgagtcactaccacccctaccatagccagaggtaggaggagtagtggctctaccaacaacctatgtcccacgggactccgagatgcactcaactgcaccctgagcttgcagtgcctttcccaccataccagcataggtggtgttatcatcagtggtgatcatgaggtcatgtttgatttcgatatttaacccatccatatacttttctttcttactaaagtcgattggcacaattcccatggccaacctggctaacctattgaactgggttgtatattcagtaacaaacatattttctttctgagttagctgagtgaattcttttctctttgcgctacgaaatgcctctttataatactttgcattgaataattcttggaactcttcccaggtaatggtagtgacaacccgaatcagggccaccatatcccaccagactagggcatcctccagaaattggaaggtggcacaagccactctgtcattgctggtgagacccataaagttcaaaatttgagtaataatagttagccactgctcgactatcatcacatcttgacctcccagaaaaaccagaggtgcctgcttacggaacctttcgtacagttgttccatccagttcatagtagtaactggccctgcctgcacaccaggggcaggacccaccgacattataggagcaggcattgcaggaacaccttgctccctcaggcatctgatttctttgtcttattcattaattttggcttacattgctgcaaacctgttttcccaatcttgggcagcctgcggcgggttaacatctccctgactgtgtcccttgtctctcgggcctctaccttagccatgtatattaaggggaagctaaactctctaactgccattggatccgaccgagtttccctggcttctcgtgtttcgcctggcatccaagctcagggtgaagagcctgcaaaaccaagagctagccttgtcagatcgtgatcaagaataatttactaattaccgcttacttgagaaaatgaaactggtggaaattattttaccaggatctgaaatctactcacaagtatgttga

SEQ ID NO: 221588 - DNA, 3368 bp, Cannabis indica
gaaagacttcgtgatttaattcaaggtgcgtggctttgcgaaggagattataatgagataatgtcagcaaaagagaaaaaagggggatgtaggaaacctgaatctcagatgacagaatttaagaatgctatttccttttgcaaattcagggaagttcaaatgaaaggtggggaatttacttggtgcaatgggcgacaaaccaaccttgtctttgaaaatttggatagagtattggaaaatccggaatggtttagacgatttcgatcatcaatggttactctccttccttggtggaattcggatcaccggcccttgctattgtgtgcggattccaaaccgaattggtcaacaaaaactcctagatggaaatctaggttccattacgaacaagcttgggctggggaagaggagtgtgtcaaaattgtgaagtcggtgtggctggataattctaattggggttctcctcatggtattaggaagaggcttaaccattgtggggagatcctccatgaatggaataaggataaaaaagctgatttgaaagctagaactaagaaacttaaagaagaactcaaacatctatccaactcggtcgaagaagaaaattggagtaaaaggagaagggtagaaagggatctcaatgctatcgaagctaaggaagaaatgctatggagacaaagaagccgagctttgtggcttgctcatggagaccgtaacactaaatacttccatcgcaaggcatcccaaaggaagaagaagaacaccataatcgggttatatgatgatcaattgaaatggtgcacctcggacatagaaattgaaaatattctggtcagcttctattcgaagctttctactccttcgagatctaacattgacatggttgacattctcacccgatgtgttcccaaccggctctcttatcaagataatatggctcttcttgaggagttcacaagggatgaagtgagagatgctattaaacaaatccatcctcttaaagcccctggaaaggatggtctcccggggttattttaccacaaccattgggaggaagtgggagaagaggttcttactacatgccttgaagtattaaacaataatatgggctgcggttcccttaatgatacacttctgtgccttattcccaggattaaagagccaacgatggtgggagattatagacctttaagcttatgtaacgtcatctataaagtgatctcaaagtgccttgctaatagaatgaaacatagcatggaaaaggtaatctccgagaaccagagtgcatttatcaaagggagacaaattcaagataacgccattctcaggtttgagagtctccattgcttgaagaaggggcggtttggaaatggaaagaagatggctcttaagcttgacatgtcaaaggcatatgatcgagtggaataggattaccttgaggtaatgatgaaatgcttgggttatgatgagcaatggatcacaaaggttatgaaatgtgtgaaatcggtcactttttctgttctgcttaatggagaaggctcggggtcacattgttccggagagagggttgaggcaaggagaccctctatctcctttcttatttcttatctgctcagaggggttatcatgtctaattaatgaagcaagccgtgctaataaacttcatggtcttcgatttggtcaccttgaaaagagattgacccacctccttttcgcagacgacagcctcattttcatggaggctacggatgaggagggacaaacaatatctgaagtgctacaggtatattcttccttatctggacagtgcattaattttaataaatctaacctttgtgttggcagaaagatctctaaggctgaaggaaaaagactggcgagtaacatgggggtcaccttcactgaaaatcattccaaataccttggcctcccagcttttgttggcagaaacaagaaggaagcctttggtctaattcgaaataagatttgggaaaagctccaagggtggaagatgggacttttttctcaagctgaccgagaggttctgattaaatcaatcatacaagctattcccgtttacctcatgagtagtttcagactaaccaagggtcttataaaagagattcaagctctcatagcgcgtttttggtggggatctactaaggaaaaacaccaaattcattggggaacctgggagaaactttgcaaagacaaatggagtgggggcatgggatttagagatttggaggacttcaaccaagctcttttggcgaaacaagggtggagattggtaactaatccagatagcttgtatggccaagttctaaaggccctttactttccaaattctgaatttttaaaggccaatactggttctggttgctcgaatgtatggagaggaatcatttggggtagggagctgcttgttaaaggtcttcgttggaaggtggcggatggatcaaaagtaaggataaatgaagataaatggattcctaggggagctcctttccttctcagaacaccggttcaggtacccccaaatgcatatgtaaagttcctaattaacgaggacggaaactggaaaaggaaatatatagaggatcgtatgcatagtgatgatgttccttggattttgggaattccaattaacaccggttgtggcgaagatgagatcatttggcagtatactatgaatggggaatacacagttggcagtggatacactctaacacagaaagagaagcatgaaaccgagacttccaacaaaatgaaagtgcaaaaatggtggaaggaagtttggcaatcgaacttaactcccaaaatgaaaaattttgtttggagagtatgccacaattgggttcctacgaaaagtgaattaggaaagagaggtatcaaccttgacggaacttgctcgggttgctggaacaaaattgaaacgatcgggcatgctttgtggtgctgtccaaggctgaaaccagtgtggaaaacagcttgtttttggcatcttttccctgaaagcctcggcttaatgacgaatctgatggagtttctaatgtacatgaggggacattgcactaaacaggagtttgagtcttttttggggctaagttggatggtttggaaccataggaacaagcaaattttttaaaacgacaagactcccctgaagaattggatctcgtgggttgtggattatgttgctcatgccctggagaggaaggaaatgaatctgaatgtgaagacggagaaggtgaggaaatcttggcaggctcccccgactggaacttttctgctgaactgtgatgcagctttaaagaaagaacaagaaggttttgctactgctgctgtcatcaggaatgagaagggtc

SEQ ID NO: 221589 - DNA, 1823 bp, Cannabis indica
aattcatatgttttagagaattattatccctttgggttattaattctagatctactaaccatgtttatattcttcttatttcagttccagctacttaaacttggattacaatcctagcaagttgaagtggatagttggagagaggggtggagaatgtccaagcttgaggatgaagctcaaaatttttattttgaataaatagttttaattttcgaacaattcggtttcaatttagtttagaaattctatttcctatttcatattattgtagacaatcattgtgtcatttttgagagtattaatttcaatttttcctctttaaaaggatttcattatgagttatttttataaaatcgagctttatattttgtgatttgtatgctaatactaaaattatatttgtcttcttatcatgttattatgtgttttatatttattattgataaaaaatctgtggtataattctctttctaaagagatattaccacataaacacttgaacgtgaattcaatgtttatgaataattgtcctttcttaagcaattattatgattttgtttaataaaaaatcttgtaatctaataggggtggagaagttaagtaatttatatatgaaattcaaagatcttttataatgaactctagactatattcagaacttattaccatagaatatctatcacacacatattttgataagacatagatatactatactactcaaactagcaaactagtagattaagtttattcttgatcctgtatacattctaatatctcctacaattgtaacagataccactaaagtccctagacatagaatcatagaaccttatcacagtgagataatttttctagcctgttattatttggatgacactagtgatgacttacattgatatgttcaagaaaggaactttgcataaagctaagaaaagttaatctaaccattcacatgtatagtaataacttatcagtattatgaggataagataagatatcctacaatgtctattcaaaagacttaagcacaattcgtggtccttatgaattattttatggtatctctagtgattacttaatcttaagcaactattttatattaatgttaatactagaatgctaagttggcgacttagtctagaaagattttatgttttctagaaaaaattataagtcacaacaggatgtcccttagtactaatagtaagacattaaatggaccttgtgtatgcattaaattagagtcctactgttgagtgagagacatcaaatatgtaatccaacaaggaaatatagggagataatcaagaaagaatctctaaaagtgacctatatgttagatgataggggcattttttagaacccttaaatctaaatcaaataagaacttaatatctgggatggtgattactctgggggtggaagaattattttggaagggtgtaaaaactcatctataataatttagttctaccaatgaagctaaatgacttagttacttttaaaaggcacaagaaagctattcaaattgaagaaagttcttgactgttttatttctattccactttggatagaatgagagatgtgtcttctgtatattcagatacacttattaggtaataaagaattcaatatccctagaggagtaatacatatagaaaaatgatgttccataatattttttgaaaacaaaaggaagaaatgggggacaaagttattgctttttaaaactttacagttcttattatttgggtaaagtcaaacacactacacttgatatgaatattaagacaatttattaattgaaatgcacttctagt

SEQ ID NO: 221590 - DNA, 6783 bp, Cannabis indica
tcactatagccacaagtgagaatcaattgtaattgaatcaatgcttccttgaatttgagtcggagtactctttgtgaatattgattgtaatacacctttgttcttagctcaataaaaattctaaagccattagagggatgttctagccggggaagtagacaagtgatgtaatcatcatcatcatcatcatcatcatcattcgttaaattttggtgttctgttttatgtttaatgcatttatgttaaattcaattgaccattttcatgttagcattgcacttgttctaattcacattgcatcgtcttgtgtttcattgttcttgatcaagtaataaatcacaacagatattaatatatggacagtgtaacattgttcatgtgtataaataagaagacagtgtgtgacaatatatctttcataaaatatttgaccgactgatagaagtgcactcgtgatatatctccaacattgtcgacatttcatgtatgcttcagaaaattttcatatttcaatccattaatttctatttttggtgcaaaggtgcatcgtgcatataagaaaccagattaaaatgacatgtccaaaatcgaagaacattttctggctaaccaaaacctatggaaaccaacactactcaaactacaaagagctagtttgtgggcaaaccaggtgacaaattaggattagaggtataaacttgactagtaatttttatgacaccagaacagcgtgtactttcaagacagacactagctttcgactgaattctgtgcctcaacggagtgggaattttctggcacaatatggggtggctcttgttcagtttgtgccggctgcatctctgacttctttttctccttgagaataacctgcctaggcattacatctagcaaaaagctccctccattccaagcagtggcagagaccttcagtatttgaaaaatgagatgtaattcataagacaagaagatgggaactgtaagcgccatagtcgctactgtgaaaaggccttgtagcaaaatgtacataaacgggcggttttggtccccaagcaaaccactcaagcgccaccaactgttgtttgctttctgagctttctttgaaagctccctacaaaagtatatagtaattagaagaggtgaaacgaagaaacaacgaaagagatcattaccaaaaattagtgacaaatttcagaaaggtgggataaagaataaaaacctgtaggaagtcatgacttcaggatctcttaacagcctttgtcgacgtaagacattgacgatgaggaagtatagaatctgccagagagtgtatgcaaataagggaaccacaaagagccatgtccataggtaagatttgtcttctacataaggccatgaacttctgcgagaagatccttctggatgcatggctgcgaaggttgctggatcccaccatcgaatggtaaagaaaactatacctgtatcattttttatatacaagaaaaaaataacattaatagggtaaaaaataacattaatagggtgtgataattggggatgccaagccaggataacaataaaaaacggatgactgaaccagatactacgctgctgctgctatacagcataaacgctatggctttgacaagccgataaaccaactagtagactttggtatggtgataaacattagagtctaggattatgtactagttgaacaatggtaatacatttacttggttgggtcaatagctgaagcactccttaatatctacttggatctttgaccaatgtttgaaatgcagggaccccaacagcagataaccacaacaaacacaacaaagaagatatccagcgaaattccaatttccacatacagaacttaaaattgatacaccagaattttctctagaaggaaagccaatcaggcattccaaaattttattcactcaccgggtagaagatgtataaggacactaacaagtttatcaagagagctaaacaccaagctacaacgccaaacaatcaatgcccatgctaatggcccctgacatcaatcaaagagtcaaaactcgtaagttatttgtactcactttttcagtcaagagggaataaaaaagttctacagcaaagtgctacttctttacctcagcaaacgagaagcagatcatgaaaagcttttcattccttggatacagaagaagatcaaccaaaaaaattgtatttgcatagtagcaaaagtcctaagacatgaagggaaaaaaaaatgaagtcattcttcacttcaacttcaatgagttgaacaaaacatgaacaatatataaaacaaaaatctgaggtaacatcaagattgactggaaagtataaaaatgagtttggtaaagccataatgagaccaaaacggtttaaccaatcttttattaacatattgaaagctaatttggtaatcatttcaggcacctgcagactacatttactacaaatgggtggtcaaaacaggtaacacaaattttcatgaatgctaaaactagtaaggaattagccatttgttacagtgatagtgagacaccttctgagattcattactgagcaatgaagatatatcttttaaaaatatactaaaacttaccaaaagatagtaatgccacttcttgaacctgtagtatatccacctaaggggaacgaatataacatagaacaaacaatatatatagcgaatatcctgcggtcctgttacatatataaaagaaaataataaataaataaataaattgtacattcaagtgtaattactgcaaaaaaataactgccatactcacttgctcccaagagaaagcaaaacccaccaaaccagagcactcccataagatgagtcacctaaaaaaagaaaaattaaatgctatttacaacttgtcactgtacgaatccaaatccatcgaaattaatctttcatagacatagacagacaaaccttgcttataaaactttcgtgttcttctgcttgtttggcgatcttaacagcctgtttggataggatctcctttgtctgaaccgcttgcttcgaaagcaaatccttcgtttgagcaactttctggaaaaaccaaacaaaacccagatcataatacgaaagataaacaggacccacgatccgtaacgaaatgaaacgaattcacgggttgatcataccatggatcgatccttgaacctttgcttcacctgctgaaacgaatccccatttgattcttcacctgaatcttcgttttttgacatcttggttggcaatatgaatgaagtgcgaaggattagaaattagaatttagaaggagaggaagagagggtggtagtgattgttggagtatgaaaggagacgagaaatgagtcgctctgcttcaaattaacatgcacggactcctaagttattaactatacctttcttcctaattttgattagtaagaacttattatacccttaatgattgatcattatacattccacgtggcaattttggacttaagccaatgcatacatcatcctcctcttaactcaatttctttttctttttcttttctcataaagactaaataccttactcttgttgaaatataatgtatgcaatctcttttttttccctgtaaagataaatagttcgttatattatcagaaaattattaaaaagcagcccttatattgctgttggtataataagtattaaattttatataatttaagaaaataatttttaaaaatatcattaattaattgtaaaacactatttataaaaattactaatatcactaatacgcaatacatattatcatgggttatgacttaaattaaatgtagaatatgaaaaattaattgtgaacaaatcctatatataaacttgcaagttgtgaattaagaatgaaaaaaattttggagtatctgtaacgagacactctgactaagtaatctatttttcatttatttatttgttaactttttttataaacccacattgtatttgaaataattaatttatgatttaatgccaaacatagataagtgtatactctatttagcactggaactttaatttccgcaaaagaggtgaagtctatttctttcaaaataaaaattaagtaaagaggtgcaattttaattttaatttagtaatattaatttctttaatagcagttgttagtggtgatttttattatattataaatggtattgcatttacttttgttaacctctttagacaaacaatgattcaatgagattttctttcaaaaatacataaataaataaacaaagtttatatatataatgtatatattttcagattgagatcgttttttttttatgagggaaaaaagtatttgattatatagggacataggattattattttactgataatttgatcaaagttaataggcgatatcaagatatgaagagaaaaggttgttagttggctgagctgtcattgtagttagttagttagttagtatcatttgttattttctgtttgtatcaactgaattcggttagtctgtttgtatcagttgtgcagatataaatagttgtaatcctttctttcaaattaataatacagaaaattcacttcctctctttcagttctctctctctgttttgttctgtttgtaatatggtatcagagccaccatttttgtgtgctgctctttcttgatttgtttgtgttcatggcgaggaaggtgaccagtactcggagtcaagctgctcgtgacagctccagcaatgatgcgaatcagttttcagtgcttgataatgatcctgtgcctcggcgttttgatcagagcagagatccatactatattggaaatggagatcatccatcagcaagcttagttccgaagatcttgactggaagtgataattacaatgcctggagaaggtcaatgatagttgctctatcagccagaaataaaattcagttcgtcaatgggaaactgcaacaaccagaagaagatcatgaagatcatgatatctggaatcggtgcaatgatctggtaatttcttggcttttgcattcagtttctgctgacattgttgacagcttcatgtacaaagaaaatgcagcagaaatttgggaggatttgcaagagagatttcatcagaaaaatgctccaagagttttcgaagcgaaaagatcgatgcaaatgctaagtcagggatctcttgatgttacttcttatttcacacgaagaaaagctctatgggatttaatacaacagtatcgccctctacctgcttgtaattgtggagcaatgaaagttgttcaagaatatcaagaagaggacaaagtgatggaatttttaatcagattgaatgaatcctatggagccatgcgttctcaaatccttcatgcaagatcctctaccagctgtgaataaagcatacgcatctgtcatccaagaggaaagagaaaggagtattactgcgattcccaacactgttgctgaaagtgataaaaatgcatcagagtcttctggagctactggtgatcagtttgctggaagtgccacttttaatcgatctaaaataacttgtcatcactgtggtatgcttggacacattatggcaaaatgttacaagcttcatggatatcctccagggcacaagttttatggaaagaatccgagcaaaggtaacaatggacaatctggaaagccatctgcaaatttttctggtgtgcaagagggacaagcttcaggacatgatggacaaagtggacaagggaatgtgccaaatcaggatctaattcaaagtcttaccaaccagtaccaacaactcatgagtcttttatctcagaaatctcaagaaactccaaaaacttctccaagttcagatcagcctttggtctctcaattttcgggtaagaattttcctattttgcataataggtggattatagacacaggagccacacatcatgtgtgtcctgatttatcattgtttacagatgttaagaaaagttcttccctttctactgttaatcttccaaataatgcttgtgtgaaagttaattgtgttggcaatattcaactttcacctgacattattcttgtgaatgtgcttcatgttcctgattttagatacaatttattatctgctccttcactaatcaaatctattggatgtcatttcaatttctctcttaaccattgtatcattcaggacagtatgaagactcgaacgattgggatgggtgatcgaaatggggatctctactacttgaacttgtcacataattccattcatgctgccattttttctgttattagtgattctactgttgttgatgataatgtttggcactatcgtttaggccatccttcatgtatcaaacaacatcctctcaataaaaaattgcaatttcgacattatcctagtcccaattttcattgttccatttgtcactatgctaaacaaagaaagttacctttcatttctcatcacaatattgctgccaactgctttgatttgttgcatattgatatttgggggccttataaatctatgaccacagaagggtataggtatttcatcaccattgtagatgattgctcaaggtttacttgggtgaagtttattaagcaaaagtctgatgctcaatcggttatccctcattttttcacaatgattaaaactcagttcaatgtgaatataaagggggttcgatctgataatgcaaaagaacttcagttccctcttttattcaaagaacttggaattatacattatcattcttgtgtccaaagaccacaacaaaattctgt

SEQ ID NO: 221591 - DNA, 4151 bp, Cannabis indica
ctgggatctgcatactcaagttcatcatcatttgctagtacaaggaacaaaacatcatctgcagataagataattaagaggaactttcaaacaggatactcaccttagagtagagaaagaaggaaatgaaaggttgcatgggtgagaagagaaattccccatgaacacaaacaaggaaggtaccacctcctcattctcaaaaacatcaaggacagtggttagcttttccatagccttctctacggaaagaacaatatgaagttacatggagtctttcacaaaataatatatatgaacaaaaaatatatacacacaaatctgaagaaaatgccaatcacctcttcattgtctagccatatgtcagagattatgacaaacatgtcattaactgctttcttttccaattccgcaagtctaagctattgattagtatatcggaaccacaagcagcccttacagatagtctaaaatataaaataataatgtgaagctaaaatcagtaaaattaacattagtgttaggatacagtctcttctcgtgataatacaccactgccaaaaaagtcatgccctgcaagcagtttgagtgacttctctctatcttccaatgggggaaatccacaagtaatgacctttatcagcaaacaaattttagcatcttgcaaattgaactctaaatatttgcatatagtcaatgccaaatgatttttagggaattatatttacacctctcggtaggagtaaccaagagcaaaagtagaattcaaatatgaatattgtgaatattaaagtcaagtggagcctaaaacaagtgaattgcagcttgtttttgttcaccttaacatcaatttacaagtgaaaaatacattaacgtttaaaaaaaacaaggttagaacaaaaagatcaaaccctcttcagttattatacaaaacaagagtgtaaggatggccatttcttcacatggtagaaaagcaaaaagaagtaataatgcacacattcaaaacttgaatcctctctatccataatcaaatatttaaactaaggatgcatttgtttgcacttaatgaaggggtgaatctgattggaccagatttatcatcattaagatcatttgtttttctttttttttttcaaccacttattcccccttaatacctcttactgaataagaggtaaattagactctgaatctttttaagacatatatatcaggctcttttttattcattttttctcaactataacttttttgctgtctctatgcaacttcaatcaaatcaaacatcaaatgttaatgtatattcatttttgtttttgtttaaaaacagagttttatctcatgtctttgtcatatatataatttaaaaatgattatgctatgatttgatattatgtatatataaatataatattgtgtatatttgtttggataagtctatagtacacccttctaaagaaatgtttcagtaaacactatctatttcggcattcaaaagagatttttaatctaattttttttatgatcgtgtatgttatagttatttaggatcacctataaattcttaaaaaaatctgaatagtaagcaatgacaaaagtaaggttaaaataaagttaaattctgaatattttaagagtactatcatatatacaacattaaaaaattatttatttatttagacagatggaaacaaacggccttaagtcctgagaatgctcaaatcatgaataatttgaagaataaaatagcactagagctaatgcagaggaaacaattactaattgaatttttttataattaatatattaattgtgtattttttatgtaattattttttagaatacttttttaaattaaataaaattaaataaacttgttaatattatatgattaaaaatattaaataattcagatgtggaaaaaaaaaaacatgctaaataattttatattcaaattcagatatgatcttattatttaaatgtacaatcagattcaaaggtttggatcttaaaaaaacaagatatactgctcgctcataatacccctcaaaatataacttttacattaacgttatccttttatcacactctattcaattttttcatgaaatgaggacacaatggatgataatggacaaatagatgaaaattatataagtttcaccaaaatattaatttattgttaaaaaaaatgtcttttattctattattcattaacgtaaaagagagaatattatacattttgcatccatttaccaactaccatctactgtgtcactcattttgcgaaaaaattgagtagagtgtgatggaaataccacattaatgtaaaagttatatttagagggatattattgacaagcacagaaaataacaacgtaagcacatcattattaatataaaataccacattaatgtaaaaatactaattattctaaaattaatttcaagcacatcattataacaacataagctttatttatttcgaaataataacttgttaagaaaataagtcagccaagaggcattttatgaaatccaacatgtacactaacaaagcaccacactagccagtagcacagaaaatagtagcgaggtaggggcaacaaaagttacaaaacagaaacaactaagctggtttgattcttactaattttaaactacaactgaaataaaacttttagaagagaaaaggaaatgcaatgtcaaatcaagatgaagcaatcttcaggataagaacaatgctaacctgaaaaattccttctacacgcatttccccttctgctacaactatagtgttctcggaaaaaaatcctgtcgttatcttgtattggttgtcaaagaaaatgatgatttcacatttccaattttatgggaacataaagttccagattcatgtatttcaagatttgatcaatagttaaataaattgtttgatataccatgattaccagatgggacagcttctagaaaattacaagtatagttgtaaggcaaaaacaaggaaacacaattgacgagtaacattttcaaaggatattgcattggacaaattgatctccactgatgctgtaaggtcttctaaataaaagtgtccatcctccaattgagatatcaaacccattacccattttctccccgtttgcccaactagagactggattggagatatctgcacgaaaattcatgataactaagtgactgtttaattgtttaataatacaaattagaatcacaaaaattcgtgacacttaacaaatcttagcactgtccattttctctggtgttctagggagagactacctcacaatttccaaaatttgaaatttcggaatcaaatgcaggtttagagaaatgttgatcgcgggtgagcctctggagcaataattgatacctatcccggtaaaggtttgcttttgcagaagcatcaccgtgaatgggtagattccccgtatgcctagaaaaatgacaaagcaatgtcagatttccaatacaattgctccaaaattctagaattatattcataccatcgcttgggtgctacaaaaaccctagagtacaagcattttcattccaaaagccccatttcgcaaaattagaaagcaatgtacaagaaaagcccacaagttgagctcgtaatgaatcaaaaagaaggcttagagattgagacatactcatagaagagcttcttgatggagtcgtaacgtagtttggggagcaagaaggcatcgactacccgaatggcggaagtggtagaggcagcatgtgaggtatctccatcttcttcaccagcagcttcggcctcggagagaagggcaacgacagcttgaaccgcttccttttctatgatgggggatttcactgcgacaaaaaagaaatggaattagagtgagagaggaattgggatgaaatgagtagatagctaagagcaagagatggatgagcttaagattacaagtttggttatggagctggtcgagaaggagatcgatggcgtcattggcatcagcatcgggaaagcgggaaacgaaggaaaggatctcgtcgagtgcatccactttgaggttataccctctgatcttgcatctcttctgcactctcttccgaatcgccgtactcatctctccctctctctctctctctctctctctcgt

SEQ ID NO: 221592 - DNA, 3164 bp, Cannabis indica
ttttgcactaaaaaaaagtatggaaaatttgagaggggtattttgaagttttagataaagtggtcatatattttcaatgatgatatgtattagtttagaaataaaatattaggtatatgtaagtatagaaaatcaaatttccctcccagatatttgctaataaagccttccccagttagatgcaaggacgaactaaattcatgctgagactcagttgaagtattaggggagaaaagaatagaagacttatctctattaactaactggccagtggcttgattatagagaagaaggatagcattaagagcttcactggagtgaggagtaacaggagagaacaacatgctatcgtcagcaaaaagaagatgagatagggaagggactcccctacaaatttgaatgcccgcaaagctaccattagcctcgtgtaaacggatagcagcagaaaggcccttatcaaccaggagaaaaaggtacggagataaaggatccccttgtcgaattccacgggaggatcgaaaggggtcagagaggataccattgagagataaacgataaatgacagtagaaggcatttcatgataagagaggtaaaagaaggaggaaaaccaacatgagtgagtagatgatgaatgagtttccattcaactctatcaaaagccttttcctcgtcgagcttatggcagcccaaccaagtttacctgaacgccttgagtgtatggcatgaatgatctcattggctataaggatgttatcagtgatttgacaacccttgagaaaagcactttggttagtgctaataattgagtgcatgacacttttaatgcgattagcaagaaccttggagatgcatttgtacaatgtgttacaaagacttattggtctgaagtctcggacagttttgggatttttcttcttgggtatgagaactaaaatagtatcattgatcaaggaaatgtcaccctgatgattgaggatgtgaagcataggatgacagagatccgagccaaagatagaccaatttttgtggtaaaaaagagggtttaaaccatcagggcccggagctttatctcctgaaaggctgaataaagcctgcttgatctcagcctcggtgaagtttccatcaaggaacgccgattgctcaggacagagtctgggataaattccttggagaatggaattgatagccacatcacagactccttgagaactgaaaagattagtataaaaagttaggaattgggaaataatggtagaagagtcatgagaaatggaaccataagggagagtgatattacgaatgaaattattcttcctacgaatggaagcttttcgatgaaaaaattttgtgttcttgtctccagcacggagccagtcaactcaggctcttttcttccagtagacttcatccttatggagcaaaccatctaactcagattggagataagcagcatgagttaaagattggggagtaggctgggaatcattcaagaccctatggagctcagcttgagttcgagaaatttgaagctggagaggatactgagatctactccaagtcttaatatccgaaagacatatggatttctcagtcaagaaattttgaagaggaggtgaaatcaaagaagaaggaagagtccaagacgattgaataagggtgacaaaagaagggtcagtgagccagtggtttccatatgaaaacgggatgatttacggtgatgggaacctatatcatcgaacttaactttaagggccctatgatcagagccataaaatcccaaatggaagagagcagcctgagggaaaagattttgccaaagttgattagaagtacaccagtcaagacgctctaaagattggccatgtctctaagtaaatttaggaccagaatgatggagggggatgtgattaaacctatccagaaacgagtgaaaatgatgcatagcatgaggaggaggagaattagtcgaattcctatcactaacagaaagatagtcattaaaatcaccaataactaaccaaggcaaaagaggagcaatatcaaataaaagattaagcagagtccaagtaacagtttttgatcagaataaggagaaccataatacccagaaaagtgccagttcatatcattaaaattatttataatacagtctatgtgattaagggagtaagaagtaacagttacatcaatgcaattattccaaaaaagtaaaagacccccctctaaactgcctaggcacttctaaaacattatcaaaataaagtagcagcacctgtcgttggctcatcatctaacattgaaggaaacacagcgtcttcagaaacaactgcccgtgctctttttcaacatgctacgtacagaatctctaacttgggcagtttgacgcgtgaaaggctgcctggttccagaggaaatgcctggagaagctgtggtgcgtggttcactgataaccacacctttgcttccacgactgtgaggaggagggctgggaggagacaaagcaatagtttttcctttgtcaatgtgggttgtaacagaatcagtcataattggtgggggggatggtagagtgggccaaagatgaaggcagagaaactgaaggatgggtgaaactgacaaatacagcagctggatgtgaatttggacgcgagacaggggaatccactcacaggaattggtcaacggcttgctgtaagctttggtcatcagtcttgatgcgaggaaagtactcctcataaggaatagaattagatagctcaaacgggttccttttatgctgggcagatgtagtggcatggagagattccttgtactctaaggcaggaggaacagggagattatcacaatgcagaaggtacttggtgcatttgttgtaggtgtgatcaacaagaccacaaaaataacagaaactggggaggctttcgtacttgaaactgacccatttaggatcattgataccacggaagcgtatagtcataccccggcgcaatggcttagtgatgtcgaataaaacctgaagacggagataaggaccaaagttctcaagcaaggagagggggaaaatttcaattagctcaccccggcgcaatggcttagatgcaccttgttgacataggtagtaccaattaatctatttaagctctcttcaactgtgtagtcccat

SEQ ID NO: 221593 - DNA, 1681 bp, Cannabis indica
attagcggcagaccccgctgctaaatctattaccggtgggcactagcggcggacagctcgccgcaaataaattaaaaaaagtaaaaaacccccaattagcggcgaaaattggagtccgtcgctaatactaccattattaggagtgaattttatccgtcgctaataatttcgccgctaattaagaaatttgttgtagtgatagttagttacaatgttagtaattagtattgtaatagttaggataaatattatattgttatattgctgagtgataaggttagatattattgagtgttaatgataattataataagctaaaaaaagatacctgtgatcaaaaagatatatttataagtccttacctctataccaaataactattttaaataaattaacttttataattttctttaaatattaaaagagatataaagggaaattagtattgcacatttattgtagtaaaattaacaaatacatgataaacattgattctaatacttaacataagaattatattagtttatttcaggtcaaataggaaaagaaaacacaaaaaattaggtgaaaatagtgtataacatgattttagtatacaaaatagtattttttggacaaaatagttggtcaaactaccataggctatttgggatgcatagaatgcgaaaaaaaatacccaaaattcaaaaaaaaaaaaaaaatttagacctcaaacggataactagatcaaaagttattgatgtttaaattttttgaaaaagtttatgtattgtttggtctttctcttattttatccattcattttgtaccttaacttattactttattgtattggtcttgaaaacattatatgaaattgagtggtcacattacataattggttaagaaatgaaaaaattatgccatttcgaacctactaactgccctctactcaatttagtttttagcaccacatagtttaggtcattctcttatttttttttttcatcatttgattgcttctaacttgtttttttattctattaaaacttcagtacaaaattcttttttgatgtctcgtatacacatcattatttggtatgaggtatgtttctttataagaatatattttttttttccatatttaggtaatccttaaataattaaagtaattttagaataacattagtgtaatatatttacttagagtagaattctttttaaaaaaaatatgtataaaaatattaaattacataaaaattaaaatatcacatattatttatcattcaatgtactaattattatacgaaacataacttaaattataaaaataaatattaatatactaaaaaaaatacaaacccatattataaaatttaaatatacaaaaatattaaattatataaaaattaaaatactaaacataattattattcaatatattaattattaaacaaaacataaattaagaaattataaaaggatactaaaatactagaaaaaatacaaaaaaacataattataaaaatgtaaaaacatagaataaaaaagaatggctaaatataacaaataacttaagagcaaatgtaaaatttgtaatttatttaaattttttctaatttaatttttatttaataaattttagatttttaattaaaagtaaaaaaaaaaataaatagttaataaagtactgaaaaaaaat

SEQ ID NO: 221594 - DNA, 1556 bp, Cannabis indica
aaacaactttgaaactgaagaggtgaatgaagaagccatgtttgtgggttacgatctatacaaaatgtcaatattgatgattgtatgctcgacaacaaaaacatccaaaatgtgctgtataaatggtctggacacgcctttgaaattggtacctacttcatcatatacattaattattaagaatatatatatatatatatattaactctaaattatataataatccatttttatacatacctgcataacaatccaaaatgaattgcaacagcaattgatgaagagaaatagacaacccagtggcagattttcacctccaatattattaataaataataataataatagctttgagtaatgttttgtattaacaaatagctttggcccttttattatggccatgcaaatccctccaccaatgcatacaattgtaccaattatcttagcaatacttctcatgctttttggattgattttctccattctaaatattccaacaattacattaataataataattttgatatattttatacataacaaaaaaaagtgaggtaataatttatagatagttattatttacccaactagagctgccataataaaagtgatggctggtatgagattaagcattgcagttgcaattgttgaagaagataaatttaagccctcgaaataggtgttgttatttgctgttactctgcaaatttatatatatataaaagacactaaaatgaaacatatataatcatatacaaaattaataattatgtcaattaattacccaattaaagaggtgagaagtatcatattaaagcttctcaatcccaagggtgttgcatgtggatctttcctgaataaaaaacaaaagagatatataattgctattaaaattattttccataataattatgattatgattatgattatgattatatgtatatatttatagtaccgtaccatcgagagaaaaaagcaataggagccattataagagtggcaaaaagttggcggtagaggacgaaaaccctaggactcattccttgagacaaagcaagtttactgaagagagttacagctgcagtgatacattgtaatgccaccattgctattacattcttgtaactactcatcatctcattcatacttgtatattaatattgaatcgatatatatatagatagatctcttcaataaaactttaaccaaaaacaaaaagaaataagttcaatatgtagggagatgtgtatatatatatatgtgtgtgtgtttatactataatatttatttatgtatatatataatgagcactatataatggtatatatatatattagagaaaattaatgatacagcgaaataagaaaggatgtacgatatagatctgtggctagatataaaatatataaatgagtgttgttgtgaatgtaccattacttctatataaataaataaataaaatgcactgcttaatagtgttttattatagtgaaaaattacaatgaaaatatgtagattttagtaaaaaataagttaacaaaaatatggcatttat

SEQ ID NO: 221595 - DNA, 2596 bp, Cannabis indica
tcttgtttgatgatggtcctcgttggcatttatcggctaattatggatttcctgaaggtgttactaaaaaacatacttggtaattaataaagaggttggctgatgtctcaccacttgatccgtggctgttaataggggatataaatgaaattttctcaaatgaacataaaaatggtggtcctttacgagatgataatcaaatgcaagcttttagaaaaaccttggaccaatgttttttggctgaaatacctgctgctggggatgaattcacgtgggcaaaaaataggaaaaaagtggctggtttaaaagaaagattggattggtgtttcattaatcatgtttggagggatactcttgcttggcctaaattaacacatcttgattactatggttcggatcatcgagttttattggctaatatcgatttcaatccaacacaacctgtccaagctccaaggaaaactcgttttcgctttgaacaattctggttgaaggataaggagtgtgctgaaataatttctagttcatggtgtcataattcagatacagattcagccactcagttggtgtcttctttaagtgattgtgctaataatcttcaacaatggcattctaggaagtttggtaagatgaaacaagatatcaagcatgctcaacaagttgtacatgggctgaatactgctgtaaattcagaccccgatttccattcaaaaatccattcagctgaaactattttggatgaattgttggttaatgaggagcaatattggcaacaacgttcgagggttgattggctccaatcgggagatcgcaacacgaaattctttcactctaaagcttcagctagacattccaacaaccgaattaaagctcttatggatgatcatggacatacagtcacaacaaaagatggcatctcgcaacttgtaacagattattttcagcaactattcacggcttcaaatgaagaccattgggctttaactcatgttctctctaccataccaacaaccatatcagatgagcaaaatgaatttttgtctaaggaatttactgtctcagatgtcactgccgctttgaagactattggttcggataaaagtccgggtttggatgggatgtctgctatgttctatcatcacaattgggatatagtgggggatttggtgactaaagtggtgttggatgtcttgaatcatggagctactcctgaagctttcaataagacactcatcactttgattcctaagatcaaaaaaccaaagaccatgaaggattttcgtcccattagcctatgcaatgttacatacaaaatcatttccaagatgctggccttgcgatttaaggaagttctccattctgttatttccgagactcagagtgcctttctttcaaatcgcttaattacggacaatatccttgttgcttttgagatggttcatagtttgaagcatagaactcgtggctctaaggggttcgctgcattcaaactagatatgagcaaagcttttgatagggtggaatggtcatttattgcagcggttatgggaaagatgggttttaatgttaaatggatttcactcatcatgacatgtttacatacaaactcattttctttcctaattaatggagaagtcttaggttcggttaaacctcagtgtggattgcggcaaggagatcccctctctccttatctctttttaatctgttcagaaggcctttcacgtttgttgcaatatgaggagaagattggtagacttcaaggactggttgtttctcgacattcaccatcaattacacaccttttgtttgctgatgatagttttctcttctgtcgagctaatgatagatcatgtggttcaattaagcgtgctcttgatgtttaccaccgagcgtctggccaactcttaaacacagataagtccgtcatgtctttttcgcctaacactccagatacggttaagctatcttttcaacaaattttaggaatgccgatctgtgattgtcatgaaacttatttgggcctcccagcttatagtgaaagggataaatcacaactttttaacaatatcaaggaaaggatatggaaattaatgcatgcctggaatgataaaaaattttctattggaggaaaggaagtgcttttgaaggctgtggtacaagcgattcctacttatgctatgagctgttttagattatccacaaagttttgtaagcaaattgagtcaatgatggcaagattttggtggggatcttcaactgataataaaaagatacattggaagagttggaaatcactttgcacttctaagggtgatggtgggttgggatttcgatcttttgtccattttaatcaagcctttttactaaacaagcttggcgggtttttcagaatcctcattctttgcttagtcgtgttcttaagggtcgatattatcatcacaatgattttttatcagccaaagcttctggtttatcatctctcacatggcaaggcataatttggggtagggaactgttacaacaaggcttgcgaattaaaataggcactggtactgcagtgagttgtgctaatgattcatggattcctggccat

SEQ ID NO: 221596 - DNA, 2344 bp, Cannabis indica
agatcattatagaatttcaaaaattatatattagctaggatatgataaataaaatgaaatatttgtatatatttgttcatttcagttcatataaaaaactatattgtagttttgtgtaaaaaaaaaattgtgcaattcgggccggatctaaatacatataaaattgttgcaatatttactagaaattatgaagggggagaagagtaatagaataaatgtggtggagcttctcatgcaaagagtgccatggagattaatgctaaatatatattgtatatttctttcagtcattatttgtattcaacttcaatcttaagtttacctaacattggttataaaaatggatgccaaatgctaatcattcttcctggaaataaaattatatgatgtgatttgttactttcttggacatgcattcagaaggaagtaaactataataagtaaagatggccttctctttgtttgttggattcaatttgagatgaagagggcctacttttattacctaataaaatagggaattgataggggtgacaattcgacgtaaactcgatacaaattattgcagggtcataaaaaatagatgcgagttgaaattgagtcgaacttgaatgacaagattattgtttgggttgggttaaggttaatgcatgtgacacggaattaataataagaattgatttgtttatatccaatatattatcaaaattattaatatgtagtcaaatcattatttatttttatagaaaaatatatattagaaagaaaattatttatagaaatacaagatagataatttaaaattattgagaattttactcattgtatttttaatttgtgataattattttaattaatcaatatatttgattgcaacttgatatatttttatttagtatatttaaatgaatcagaaaaaaaaaatagatcttgtgaagggtaggctcaagttgtctcgaatgacctatagggtcctcgtctcgcgctgggtcccttctaccctgatcttttggggtgctttctgtggatgatgtggagtccattccaccaacatatgtggttgggaccctgtgcttttgttattgacttttgtactgaaagtgcgagacttgagttttgcctttgagtacgtcactcgaacactttttgcatgttagttaccgtagcttctagcctttggttcctctagcgaaggtcgttcatctcctcttcatggcggcgagttcgggagcttgagctcatcgagtatattcgctttttcttttgaggtccacatcttgaagtgttggggtcttgtggcacagatggtggagggtgccacacctaagtggttgaatgcttctattgacggggttagccatcaatgcagtcatcaagccatgttgtgttgggggctctttttgcattgacttggtggttcacgctttggttattcttcttttggtcttctccgacgaagggaggtggaggttctcttatgatggtggttagctggttgtcatctgagcaaactccattttcttgttgatattgcgaacgtctacgcatctcgaaacaatagaatgatttaggaactaacgttgttaatgtttgttgttcccataaatggcgccaaactgttgacatcaagaactcgtcaaccaagctatggtcgaaaaatctaagattttaggcgagataagattaaagtgtttatgaactcaagaacatgaatgaattgcagagaagtgatggagaagatgaaatagaaattttttattgctatctaagtgccttgactacaataattttccaactcctgtcaaatatgaggaaatgagtatttataagtgagctctattagctctcatttacatgatgatcctctagtggtccccaaatgtcaggggatggacgtcctgctcctccaggttgcagttgtaataggtggtcttgcaacattgttgtgaaaattctaatatacaagtatacgtagttgaatcaagtaatataatgataagtaatgtatcgttcccacaaagactgcaattaattaccaaacaattaaatttttaaattctatttggtgacaataataataacaaagaaggtttaagttctactgaaaagaaaacaaataattaaaatgcaattaacaatgataagagcttagggtgattaattttgattgaatctactttctatggtttaatataatttaatttaaatttttaatttcatgtgatagcgaatttactaaagaaatttatattcgtaggacatataaatttcaacctatatgcaaactttctacgttttcgtgataaatttaaacatataaaagacattaagcataaaaatctta

SEQ ID NO: 221597 - DNA, 1493 bp, Cannabis indica
aagtaactactaaccagtaataagactcatttaataatatcaagcagtgtttttcaattctacaagagacaaacttgagaacgattttttctgtaaaatcatatcaaaaatttacatcaaaatgcttcaatatcaaataatataactatacaaaaaaaaaaaaaaaaacaaccagcataacaaaatcatgaaagctttaatccctgtgcaattgaacaaaagaaaaatctacttttctgggtgattagtgtgtaagacgaaggcaaaaggcactattatagtctttacagaggctttctttacaccttcctggggttcttcagatctgcctctttcttatcagtctccatggcttttttcttttcttttctctccctcttctttagagctgtcatgtgggcctttaggatagtggcatatgaagcttgaaagcgcatatgatccttcgccccaaccttccccaagaagcaaaaaataagatttgagtgtcaaccaagttcaagttcaatgaaagagagtcaatgcattagcatcactctgcctcaagaaaaagctaaccttcactattgacattactttagtacattcaaaaggaaaagttcgaaaacaagcactaagcacaaacatgttactaccagtaccatcaccaactaaaaagtataaatcaaactttgctttgtatgactgatacaaagaatgagtgatagatatgcaacaatatgattagtctccttttttttacataaccactacctaccattgtatagtattcatcaagcttcatacctcagtctaatatgtatgtaaaacctacaacagaattaatgtctattttcacataaccactaccatggtatatattcatcaaacctcatacttcactccactatgtaatgtaaaccttaaaacaacagaaactaagaacagcaaattgttacagctataggatacagaaggtttcacaatccataaaactcaaagcagctacatggtaatttttccaaatttgggaatctaatctcatctacctaacattcagggcacacataacgagtgtaacaagtcataaatccttaataattagctccattctattgtctcctcacagtcacaggatcatcctcatatcgaagtagaaccaatacatccacaactgggaattgtgccctccattctagtatttaaaaactttatctaactatacctcataaacataacaccaaatgttaaagcatatcaactcaaacacagtaaacaacaaacaataacaatcatctaagattctaaataaatcataccatggtaaagggcatgtctgtacaaaaaccttttcaaacaatgtatacccattaagcaaattattccaaaaacaacgtgattgggcagtacaattttcttaacacttcgtcaattggatattaaaagcaacagacgaaaattcaacacatgctactaacgaaataggctacaattaaaataataacaataataat

SEQ ID NO: 221598 - DNA, 8130 bp, Cannabis indica
atgatgtgtattttctctctatgtgtttgctccttttgtggctttaaggctctttactattggccatatcaccactattgccacaaagtaacactagtagctcttccatatatttgtaataaagccaagctatgtgaagaactttcttagctagactatttccttagcagcctcaactacagctatgtactcagcttccatggcagagtaagagattgttgattgcttaatgcttctccaaaccactgttccatccccaagagtgaataccattccagatgtaaacttcctatcatcaagacaagcctaaaactctgggtctatatagcctaaagggtttaaaacactccccttgttctagtcctcttcaagtacttcagaatatgcttaactgccattcaatgttcctttcttgggttggactaatatctgctgaagattcacactgcataacagatgtctggtctagtgcacaatatatcatacattaaatttccaactactgaagcataaggaattatgctaatgtcctctactcttagggatcagtaggagagactgttccttagtagacacaaaccatctctagaaggcatattttcccctttggcatcggtcattgagaagcgcaagcaccttatcaatgtaagatgcatgtgagagagcaagtgatctgctattctagtctttaatgacttggattttcgaaaatataattagcttcatccaagtctttcatcataaattgggtgctaaactattcctttatgtcagtcatcttcttgaacttgtttccagtgactaagatgtcatcgacataaaggactagcaaagctaccacttcattatccttgggttggtaaatataaggtttgtctttgttttggtggaagctgtagatttttataatttcatcaaacttgtttgaataatgtgaagcctgtttcaatccataaaaggatctatttagcttacatactttctcttattgtcctgaaatcttgtaaccttctactctatatagataatttcatcaagaattcaactaaggaaagctgtcttgacatgcatatgataaatctcataatcgagaaggccgctatagaaagaattatcttgattgatttgagcatggcaactgaactaaaagtgtcatcatagtcctctccttctctttgggtataatcctttactacaagtattgctttataagttttggcttatccatcagcacctcttctcttcttgtagatccatttgtaccctatcacccgaaagtcttcaagcgtaaccacaacgttctagactttgtttttcttcaagaaatctatttttgaatccatggcaactaaccacagttttcattttggactagccattgcctgtttataggtcaatgggtcgtaatcagcggtgtcactaataattatgttaatttcaccatctaagcaatagcagattgagttataaaccctcccactatgatgaggtaccgtgactttctaaacaggaaccttagtgatagtttcctcagttatctaaaattgcattggttcaaccgaatgggtgagatcatcttctataagtgcagaagatgaaggaacattagttggtgttaattgaaagtatttctctagcactacttggttgtgtggctttatttttttgatatagtcatcttcaataaacgagacatttgtggaaataaacactttctcatctttagtgaaattttgtttttatgattaccaagtgaaattaacaaataatttatttaatgcagaattgttataaaattgtttgaatagaattgaaatttgttctattagaaaccgaacctactatatcagaaatatactacagaaagtaaaattgcagaaattaaaataacacacgataatttatacgtgttatcaacaatccttgcatattgctactagtccacaggacgacacccagcgataagatttattagtcaaatttcaataagtacaaattaattgacataaacaaaacataagctccctctaatgatttttttgcaagcttgatgtactcttatttgctaaatgaatcttcttaagacaacaaggtttgaactcccttcaaattacttaatgaatgcttcttttgtcccgatgcaagacttgtagaaatcttctcttaaagatagttcttgcttcctcctgatgcaaaacttgtagaaatcttgtcctaaagataaatgtgctttcttcctcctagagtaagacttggatgaaccttctttcgaaggttgttctttatgttcttcactttgaaatttactctacataaaagtaatcacaaaggcacacaatctcattaaggaatagcaaaagaactatcatttaaaaaagaaacactctctctaaaacttttatgaaatgaagaagtagaactgttcgaccttttgttgctgttttatgtgatatttataggaataaatgacacctaaaactgagctccaaatgtctgaatacaatgagaaaatattaattagtttccttataaaaactcattaaattacgaaattttgtgtaaatagatatggaaagtgtgcagacgaaatcctaatttgtttagtcagcattttgaatctagactccatcaaagctaagttcatcccatgaattttttttggacatcacgaacactagcagaagatattaatgtagatcatatcagaaatagaataaaataaatcaattaaaagatttaccatatagagatataatatttattacataataaaccattttattcattctatataaaaccacaacgtgagttacaatatattcccaattaacaatcatcatatgtggcgacctccaaacacggagctccaccatgtcagggatctgtccgctacatcaaacacaaggagtgagcgcaccaccaaaaggaaatcacctttttgtccaatgtcatattctctgatattctcagtaccaacacaacaattcatgacacatggcattgtaattggtccccactcgtacaaacaaccgttatctcgagaattaggcttcaatcaatttgcccaaagtatttttccccatcagtaggcctagttgagacctctaaatcctactgagtctaggctaactcatacccggatctagcctataaatagtgcacaaccccttcatgaaaggggaattggttgagaaattacttttctgctactaagatctaagagctagggttcttcagctagggcaaaagcacttgtataaaaattactttgaagtttttctagctcaataatattgactctttgactaatgcacaacctgaaccacataaaatctttgttttctttatcttcaatttatttctttcttaagcttaattattttataatcggtttccaaaaatcttgatatagatattgtaatggactttgttcgatttgcctattaataaatatttccattttttctctctctcaaaaaaggtaagatctctagctagaacaccatttagtgtagcttgcattattgatgccgtaatgccatatttttgtataattatcactacctaaaaatgtgatatcgctattgatataattaagtactatgacgtcttatataattaatttattaactattatagaatatcactaactatttacaaactcttatttctatatataatatatatattcttggtgtccattgtgttttaattaatgagaaatattaaagggtacactaatggtgcttagcacccgtgtcaatatcactatttgttcaattaagtatctaatcccatataatttaatataatcaatcacaatgcaccacgtctagaaaataatagacaccatttagctaatatccatacttttaattaatataatatgtgataaaaggagtactgacacacatgaaagacacatgggaattggggtcacatatagattgaataattgaaaatagctcatattctctcttcgatactagtttctgccttctttggttgctagttccgagagtcatcaccttagaactatcctcaaagttcatccaaattaactaattgatggctctatgcaagacagatcgatgaatatggtagttctctttctcaccattgttacagggcgaatatatatatatatataaataaatataaatatgtatgtatttcgaaaactatgtgctacacaaacattgttggttccacctgtcaaccctcaattttaatttccacgcaaattttgttccatctttgtttctttttgaacaaacagtagacttttaccctataatatacattaaaataataaagaaccaaatatggggtctaccacaggcttataattgagagcaacttttagtaaagagatgctcgaaagtgagaccaatttaatagttatttccatacgtggactttgttcatgcttatattgtttgtttaagtaataatattaagaaatatcaagagaaacatcacatatcaagtgtggattatgttgtctcctaaataaagatatttatatatatatataaattccaatgtgccagacacatcacccaatttgctagctgcttattaagaaaccatacactagaaaaaagccaatatcaaatgtaataattagtgaaaaaacattaatgctgcagggttgagacatgtagtcccacttggtcaaacccttacatatatagaagctaatacagagagatatataataaattttatatatataaaattattatgatacaaacaaccatattacttagtgatcacttttctttctttgattataatcaaagtgaagcatcactctctctctgtcctttttttttatttccttggattgactaattaacagaactgaagaacataggaattgagaaatgatatacatatatcggattaaggtagccaatataatggattatcagtaattaattaagtagtgaagccatcgatcgataacaatggatgataatattacgatgaagtggcaatgcaataaggctcccagaatagagtccgtctaggctctttgcaaccctttaacgttgaaaccatgtactctcctttgttacctctcaaaaccagcatttgtggctccaaacgatgatgattattcatgactttattgttgtaaacacaattgttcatctttagagtagtagtggttgtggctgttgggttagaccgccgccagaagtactcgtaagcgttaaacgaggccgttgcggcggcagcaccctttgccaatgttgccggcggtgaggctatgagtcggcccaccgcaggcctaggtctaggtgggagagattgtgcgagtgtggtttgagccgcaattattttctgatcctcatcagcataatcttcattcaattttttggaccatggagttgttgttgaaagattcatatttgctaaacctatgggtttgttcatcattaaggctaatctatggacattttataaccccttggtgatcctattttttgaagattcctctgtaataccataaactatttcatcatcttcttcattatcatcatacccatgatcatcttcatcttcatctccatcttctttgttgtcctcatcgtcctcagagcagtttccgaactgttcctcaaactcgccatcctccttcatcaactccacatcttcttcttcggttttcacttctttctcatcaagatcatcagctgagacatcaaaggtgagcactaagcggccatcttggcgttgagccgcgaagtagttcttctgagacggaacagaaaccgcttccacaacgagccttccattgtcgcggcgcgtttgcatgcgaaccttagacgccccgtcgccagatagagaagtgagcggcggtgggaacgatcgagtaggagtgaccgatttatttctagtgacaacagtgggagtagtttgttcaactgcttctttaagctgtgttttctctttttcttcttcttgagtaatttcgatgtcggatgatgatgagtctccggtgagtgaaaacccatcagagccggtttcacatccgagactctcagtgcaaattttgaggctgttttcactcaaagaacttgctctggatttcacaagtgggtgaacataaggagttgaagcagcagattttaattcttctttagccttttgagaaattatcaaactccaaatatcgtactctccttttcctcctccagcttgttgatccttagtactactattcttttcataatcatcatcatcatcatcatcttctgaggatgaaaatgagtcaagccgacgagatggaatagaaacgagttcttagttctttagaagaagcaatctttttcatgggagagattagcagtccattctgagcaagccatgtcttggaagacatgtcagcagagagtgttcgccggagagaagaagctctgcttctttcgcagtaatgatcctcagacccaagaatggccacagctatgccctgcttcccttcgccacctcctccggtgaccattgaagatggacacacttgctccacgatcttcacgaacgaggtggacaatccaatgcttttgcttagagaaccagacatgtttttttttagttgtttttttaattaattatctacaaaaacaaaaacaaaaaagtaattaatacacataataattagacataatcttaacattaatgattatgatgagaataatagtaattattattattaccttaggagaaaagcaacagcatccaacagaggtctcaagacagaccactgggggagcaagttgcaggggaataaaaatattgatcagcagcagtggtgatgtgataataattatggtaagttttaatatatgttttaagagagaggatcagaagagagagagagtaggaagtagtagtagtagtgatgagggtagtgaatgatgggaaaggaaggagaggggaatgtgggtatttgtaggaagccagaaaggcctttggaaccatttccaatggaccatcctacgccaccatgaaaatgacatctttccattctttttctattgaagttttataatattattttgagaataattctataatatgtggttgcaactgtaataaatttaaaaacataaagatgtaattgacacacgccatactactttttacgacaatggatcctcttctttatttatttattaaatgtaataagtttcttaaattagtattataaaatatgtacatgaataatacatgcataattaataaactttacgttgctatatatatgcatattattattagagataacaattagttagttagcatggaagttctcattttatttattagttagttgttttctgttaataccaattggttaccgatatctattatatattagtttgttatgagattggttatttcttgtaactgtttcatagctctatacaaaaacgtgtttttagtcggtctacgcatttggtcaaactcgttgattcatgcaaaagttaatgttcacttttttgcttcggttgttaatcgatactaataataattaggctaattagtaatttttctccttgaactttgacatctactaaatcgtgctccctgaacttgtttggccgttaaaaattccccccaaactattgagattgttaaatctaaagacttttgtctaattttagtaaaaaaattctaacatagatgaaagttcaaggagcatgatttagtacatatcaaagtttgagggacatgatttggtagatatcaaagtctaaggagcatggtttagtacataaacaatcactgaatcagtaaaattgaattaaattagacaaaagtccttaaatgtaacaatctcaatagtttgggaggaaattccaacggacaaaaaagttcaaggcacgtatttagtacatgtacaaaggttcgggggaaaacattactaattagcctaataattaatttatgtcggttattactttgacactaaaacaaaaatcgatgctaaatgtgatttattttaaaaaaattataagagttaaattttgcgtcgatttcgctcagacgcaactcttagcgtcagtttaaagggtgtttgtatcgattatgcaccatcacaaaaatttgcatcggtac

SEQ ID NO: 221599 - DNA, 3289 bp, Cannabis indica
taaatggcttagtaaccatcaattggtaatacccattaagaagtgtttcatatatatatatattagttagttacaacatatatttgtaataaaagataatatttataaatataatattagcttttgtataatggttaagctaaattacatatattatagaagtcaaggatttaaatctcaccaagagcatttatttttctttttaagtttaattttgcctcttatcttattaaaaaaattacgcctctctcactttaaattttgaatttgtcactgtcattaaggtggaatcttatctaacacaacctttacaatcctttaattataagtaaaaagatccacgtcaccccaattaaactgaagagccaattcaaggccagaaatagtcgctgctaattcgctaagaatagcaaagttgatagtcacctttaaagcactcaaagccagcacttctccattccaatcgtgcaccaccaccccgacaacttcaatacccgctttgctagtataagccacataaactcgaattttcacagacctagggatacctcaacaacagtggaagcttaatcataagacaacttaagcaattgcctaaggcctcacataatttaagacttacattttaaaggtaatatacatttttttttaaatataggtgataaacattaaattcaatatttttttttgaaacaattaaattcaataaatttaaacattaatatttactactaaatgtgaatattacatttcaattaatctaaaattttggaactatcaattaataattaatgaatttttcttaataagaaattttatatataaattacctctaaataatattataatgtttttttacaattatacttattttattgtgatcatttgtatgactattggtttaattttttatgaaagattcttataaatgaatttgaagttaataaaatgaaattaatataaaaattaaaatcttaataataagaatttaattaattaatatatctctaactaaaaataaaattttaataaactgatataattaataattttgtcaaaaagtctaatttaattttcgcctaaggccttgttcaagctttgcctaaggccttgttgaagcttgagacaatcttacctagcgaatgtcatgtattctgcccgtaactttgccattgactcctttagtcatgagaacctttctatagcgaagaaaagccacattgatcttgtttttgatctctcctgtaagccatctctccccgttatggtaattagtatccttaaagtaccaaagataatagtaaaggacaacagcaaaaaccacaaaatcatcattgttaccctgtatattattagcatcaagaatccttgaattaaaaatccaattaacaacctctccacaaatgaaaaggaatttcatcagtgcgaatgttgcacacactagagaaccaaatacctttagttatgggacacttgtgtagaaatgttctgcagaatcactataatcctctccacataaggaacaagatcccaccgtattgccaaaattacagctagacgtgttccaaaagggagagaatccttatacatcttccacaaaaataatttcaatcgatcatgaatttgagaagactaaattttcaagtaaatctcatcctactgcataaatctagttttgttcaaatcccagtaagccattttcaaagagaaaacaccattaggagatgacttctacaacaacaaagagaagataatgtttgcaacctcactacgaaaaaaaattagagatcaccaatgtaacgccctaactcgtaaaggcgccacgtatgtgcttttatcaattaatttataataataaacttacagtttaagaaaattttgtttaactaaaagttttaataaaataacttaatttcataattaaaacttttcttacaaaatactactggtttcgaggatccccttgtttataaacttttacaccatgtaacaaaatagctattacaaaataaggttatattttcaaaatacagccaaaagatggatcctgtccattgagagccaagatgcagcgactgatatgtacattgtcgagagacctcagactcatgcttggtccagctttcctttacccttacctataccacagagcacctcgtgagtgacgaagactcaggaagaaaagcagataaaacatgatcaacacaataaagcataatctcaaaataatgcatcatatagactaaatactcattcaagcataatgcagtaaagataaacaactagttgtcttataagacaaactgaccttgatgctttataaagtatccttaccactcgttaccaacgagttttatatgtcactatcgttgcttatgaagcaaccgataaataaggaacctatcagcagttttcaaaagtgagtaataactcatttctaacaacgataattaccgtatctttacctcgattataatccaatcacaaacgataataattgtatcacatttgacatgctaagtagtgcaattggtttttcttaccttgaatccaaaattaggtgtgtgggtcgacctgagttgaataatgctcgacgatcccggttcttatgtcacaacaataaaacttggtgaataacttaaccaaatcccaaaataagccctaatttcacaactggacaaaccctaatcattatgggtttcgaaacagcctaacatagataaaacatcctaaactacattctgaaaacaccctgaaaaaaaaaaaaaaaaacaaatttcgaaaaaactagagttttcccctactggccaaccggttgatcggttcctgctgcagaaaagaaaaactctggtcttttgaaccaaaacccaaccaaagcgtcttcaaacctattcaaaatttctagaacaattcaacatcataaaattaacatatccaaacattcaaaattcaaaaacacatcaaaataaccaattcaccataattgagtgaaatttgagttcttaaactcaattcacctaattcaagacctagcaaccaaggaattatccaattcactcacaaacaatgttaaattaaacctagaaacatattctgaactcaatttacaccacagacccaaaaccatagaaatacccaataaaatctaacctaaaacttaagaaattaatgagaaaaagaaggagaacttacctcaaagcttgaacaacacctagggttagctaatttagctagaaaatagtggatttgatgaacaaaacttctttgcttcagttggtttctagggctc

SEQ ID NO: 221600 - DNA, 1738 bp, Cannabis indica
aaggccacttagattttaatgctttgtatattttcttgttaaatgatgatctggacatgtgcatatggggatttatttcaacatgtttgtttgtaaatcggcaaaaaaatcataactaataccaaaaaaagtttaaatatatgtatatacaaattgaattgagtataagtgttagttatgaaccgacatttaaggaatcttaagtattactcaaattttcaaataataggcaataattttcaaataataactcaaatttataattataatttataaaataattgtaaatttatatattttcaattagagaataattttaaaaattagctgtattaaaaaaattattgttggaaaaaattattggcggactaaaatattattggacaattatttgagttcctaaaatattattggagaattatatttaatttagctatatgagaaattttcgttaaatgaaaattgtaaaaaaaaaatatattttttgttcttttttctctcttgcaaaataaaagaaatttttatttattaaaaaaatatcaaaaaaaaaaaaattcagaacaataaaataaagtataaatagaacattatggacccgaaactaaaaaccctaatctcatctttctcactctctctccgataccttctctcttgctccctcgtcacgctgcacagggaaaggctagacaggagcatcaacacaacattgttgttgctcgctcctctcgttcatgcggcaccagaaaaagaaagaccacggtccctctcgtctcttacccagatggaccaagaattgtcacagccaaacccagagatcaaaccccataaattgaacctcgaagtcttaccctgaaatcccatcggatggagccagtatgaaggcggcccactgggacttactctctttctcaccgcacaataaactcacactcactcttttctcacacatctctctctcacacaaaatagaattaacacacatatatatattaatatatatagaaaaattaaaatttcaaagcttctttatgaagacttttcactatgtagccatacaaaaatattttacacatgttaattatccaaaatcaataaaataatatattaatttgagtcaaatatctaacaaatatttattgatataattattccaaattgatacagatttgcaatatacgacaaagttactagatctacatgctttttgtggtttatttcagtcagaatacacaacaacaacaacaataataataaaagaagagaaatcagcctaaagcaaactacttaatttatatattcattgctttggccatagaaggtggatcatatttagaaggaatcaagtacaaatccttttctctacaggttgtcatgccaaatctctcagtcatgtccaactcttcatgtttcatttcattgggaagtttccaatcaaaatggtatagcaaaaatgctagaggaagctcaacactaattaggccaaatgacataccgggacatattcttcttccagcaccaaatggaatatactcaaaattacttcccttgaaatcaatagagctatcaacaaatctctctggcataaaactctcggattcaatccaatatttaggatctcttccaattgcccacgcatttacaattattcgagtttttataggtatttcatagccattaatctcacacttttctctactttctctggtactaacaacggagctggaggatgcaaccttag

SEQ ID NO: 221601 - DNA, 1480 bp, Cannabis indica
agaataaaaatgatatatatttttaaaatatgatttgatttgatttagtgttcaataagggccttagggtattttagtgtctcgatgatcaagaccagctaaattcatagtgattatattcaaattgaataagtaaagaatggatggaatgaggtttaattagaggtgattttcagagataaaagttattggcataattatagtgtgtgaactgtgaacccaacccacctaataataatatctctcgtttctttgggaacaaaaagctccgtgacaagcaatcataataataccaacaataattatcaaactctttaaccaatatatttcattgccatcccattgggtcacaaaagcattacgattacgattagtgaatcattctttgatatggataatttggtcaaattatctaaaaggatatcgaacatgtacacgtgtacggtcatcctttcaacaagactcgtaggctggcttgaccttcattcccacgtaaacgtgggtaaaccattaattccacgtggcatcttctgcatcaggagaattacatccatttcggatttatatggtaagtccaaagttgacaatttttcattcaattaatcggaaaattttcactactaccttcacatttttttttttaaaaaaattaaaaaatcatttagtaccttgacattttaatatttcagcaaaatctaataaaaatgtatggtatttgttgttaataggaaaaaataatatatttttaggcgattttgtttagaatgttatttctctgtgatgtataatacatttttctctaaagacttctgtatgggtgagatatattttagtttgcttcttcagttttattttattttatttttgtttaaatatataacagtatccaaattcgaataaccactaagatgccgtggtcccagagccaaaccaaaatttaataacatatccaaaatataccctctttttttatattatacatattttgggataaactttcacacgtacgagggattttaagaaaaaaaaatgttatcaagatcttagtgtgttatccaaaactcaaatgacatttttgtccattattcagattgctaatgtgcggtacaactatgtaagacttagatttaaatatgaatcgttaatagttaatagtttttgtttttatgtttagtttttagttattgaacaatattacatgttacaatcagatgattaaattcaagtaaagagtatgttatgttgaaacctaatttcacacgtgtgtgcatagaaaaattagtgctgccgaccaacttataaaaaaggagaccaaaatacactacaacaacaaataacactacaaaggagacatatatacataatatttacgacaaataatatagagccaagaattgcattcttaccaagccaagagagctacagcaaaagtgtgctggcactactacaaaaaggggtattttcgtcgttttataagtga

SEQ ID NO: 221602 - DNA, 2859 bp, Cannabis indica
atcttcatctacatggtggcctataagaattattgaaggtaatcctttagaggtttgtcttcttgttgcttgatgtagaccaaatcattgggcttgattagtctgtgccttgatggagagaattggtcataaaatgctttcttgagcatctcccaagaatcaatagatctcggggagagctaaagataccactattgtgctgtttctaatattgtggctggaaagattcgacaacgagaattgtctcaaatgtcttgcaggttaatttgtacttttaagctgtgtatgtgggagagaaggtcttctttgccagtgtatggatttctgaactttgaggggatccccaaagaattgattcaatcttagagaggagaacaccgctctcgatctaattcgtactatgtttgcctttgagtagtcaaattcagccctaaacactatggtgatgtgtgtatcagttggccgcttcttgctaatgtagttatgtaggctcttttgtcctccaagtcgatcaaaggcattgatcaacctcggccatatggttgttgcctgctcatgttgccttgatggaaactatgggaatctatcccgtatgacgatagtgtcgtcttttatatgtttgcttcgtgagcaactgcttacagtactttaccgactattctcttcaaaatagtcttcctcatattatcatgtgtggagggagttggaccaattgttcaggctcaacatgtctccatgaacccatgggaagtattcgtactgtcgaccgtcagtacctcaagtgaagtacctacatcaagcacgttgttcatcacgaaagtatttccgagtgtggagtagttcattgatcttcagccttcgaaactcatactcttcacttttatagtagcgcttccagggtcttcccctaagtctgactccatgtcccgttccctttgcggggtcacatggtggttttgagtcatgaggattgtgaagagaatccgatggaggagatcggtttcccacattatttgaattgatttgaacaaaattgcggttggtcctataacctacgtgtggtagacctataagcctacgatctcgagtttgagtccttttggatgctcgctcgtagctcgttttcttaacaggtgatttttccgtgtcaggcggagatcctatggatccacgtttctgagtctcagtccttttagactttcgctcgtaatccacttctttacggggaatttcagtgcttgctacttgctaagtaatggcgtgggtacgaggagtggtatgttgctttgcatgttcatggttgattgcttgcttgaacttatgaattccttgcagaacaaagttctcaatagaggaagtcaaactgtagatgagaaactcaaattgtggctctcaatgaaagcaccaaaatattgacgctgtaaaactggctaacatcaactcggtagattggcaagatgactaataagtttaagtaaataatttattgagacacaaaatttatagtagtttaccccttatattcgatagtaatggggctacgtctactttgattttttatttctctcgagatgataatttcaacaataggctaagtatcaaaaaatccaaactccagagagagaaagtctagagagagaagctgtgaccttgtggataattttctgaaagtgaaaaataagctaagggagctccccttttataggtgaaggaggcccacaaaaataagagaaaaatacaaataatttatcttccactattgatgatgatctaacagtgaaaattagcttctcctggtgatggccaatttttggtgcccgacgggtcccactgtgggttacctggagcttatttttgtaacttccttggggtgaattttatcttcataattatatctataatgtgagacaagactttatagagcgcataaatagcttcaaaatacaagtcgaatcacgtcaatcaaataaaaattgagtgaattgtggctattttcctaaagctacttcacgtcccaacgcccaagttgacatccagcgcctaggttgacattccagtgccgtggttgacatccgatgtcaatttggacattgtataagtgtaggaatgtcaaaggggtatcctttgagattcctaagtgatagtttgacgccacttagtccatttatatgttctagcaaatcgatcactaattttgggagatgttgttgtctacggaaacaaaagactcgaaacttctgattttagagagttaattttccaaaaaaattaaagttttcaatttgattgttctaacttcatgtatcaatgcacttgtgaaaaactaaatggatggtcgaaatgacatgatatttggatactagaaccaacaaaccaggccatatgctgacttgggcgctaggccctttatgccgagctttcaggattctaattctgataattctaaggcttatgaacttgagaacggggtctcctaccctatttctgagcatgcccaattcaattgctgcatcagatttaacatttgagcaattgaaggtagcatcccatgttgattctcaacctgggcgctgggccctatttctagggactcgagtttgtgtttttctcctcgagtttacttgattcttcattatttttgatgacggtgaaaatgtttgaaacactttttaatagaactagattagaaacaaccaaggttgacagaatgtgtacctgggcggtgggcccaactctaggtgtcaacctgagggctgggtgccagttttcgcccttctaaaaatttgttggtccctgaaatagtgaatctctaatattttatgaagacatagatgatgctcgaaataatcctaaaaaact

SEQ ID NO: 221603 - DNA, 1714 bp, Cannabis indica
aaattaaaaaaaaaaataagatttaaattatttgttcatcgattcaacagaaaaaaaaaaaaaatcatcgattgaaagttataaccaactttgttgattgcatattctttgtcatcgctctcactagctttctacattgtatagtcttaccctatgttaggatataaaactggagtaaaagaaatatttagtaaggcaattgaagagaagaaaaaaaaaagtggtagagtagaataaaaaagttaaagctagtgagagaaagagagatttcattaatactaaacaagagtgaaaaacatagtgcaatgggagctttatatactagcggagtagagtaattaattagttaccactatttgtaacaaactaacactcatcagctcaactaactcacacttaatagatggagagtgatgttttgcaatcctatcttgtctgtgagtatgttgaagttgaactgagtagagaaaacaaaggcttgattaacattttgatccttagtagaaatgtgtattgctttgatgattccctcttaagttttttttccacacagtatgatagtctatcttgatgtgtttgattctttcataatagactagattagctgtaatgtgttgagcaattttattatcacaatgcaagattgctagtcctttatggttaattttgagctctttcaaaattgacaataaccatataatatcacatgtggtgtttgtaatggcttcatactttgcttttgcaaaagacattgttgaagccggtgaaagtttgtggatttgagcttaccttaaatgaatacgggttatttttggacatgattcgcctgaccgtttaataaacaagtcgtatttaggttgactcgtataattcgtatttgatcctttgaaattaatttagaactttaacaaattacaaataagttataaatatgttgtatatatcataaacaatgttaaacaagctattaatatattaataagttggcatatttaaataagattcatttataaacaagttacctaaacaagttacctgaatcatattgtgttaatgtgtttataaaccaattttatttgagttttatttacctaaacaagttacctgaatcatattgtgttaatgtgtttataaacgaattttatttgagttttatttttttacataattattaaactagtcgtatcttgtaatgtataagtctcaatacaatacgaatgtggcccattaacataaattatcacccctaataagctagtacctatgtatgtcatagttgtaagttgtaagcttagctaagaatgaaaaacatgtaattatatattaaagataagaagggaggggtggatagattgaccgactgatgggggcagacacgacgcacaaatggtttggtttttttttttttttttttttaactttttttgttattatttaaggtgaaagaaaatgaatggaagagataatggggtcaagatgttaggattttttcatatgtaaaagacccaaacatgtaaagtgtgttatatttaagtttcaggggcaacaaatgtggcccataatactattacctagagaaattttgcccaaacacaacaaataattttatcttttgtattttaaaatattaaaatgtcatttcaataaagtaacttttctattattttgccataacaactaattcattttaaccattccaatacaataatttttt

SEQ ID NO: 221604 - DNA, 1798 bp, Cannabis indica
aaattaaaagtgacccatgaatttctcataaactattttatttttaatataaataaaaagttacccataaatttctcaaaaaccaaaaattctgttatatagacacactttatatagaatagatatatgatagtaatattcatgttattagctaatactgcatcttaatttttcagtttagtgtagatatttagctaacgtttcgttgcttccacgtttaataaaagattcagttatatgttttgcaccacacaattgtacattattattattattattattattattattattattattattattattaggctgataaaggaacaagatcttctgttaataggaaatcttgattcctttctttctcaacaatcaagattttttattaaaaagttgtgtgtcatactgtgttaaactaatttaaatttgacacgtcaactaatttttcatttattaaaaaattaaccatctgtatatacaatttttttctttaaaatgctcaaattaattgatgtgtcacaatgagactggtttaatacactatgaaacataatcttttaacacaagatcttggttcaggaagatagatagtatggtaaaatttataaagttttatcttaaaattaattgagaataagtagagtagcacatttttttttttgtggtagtttatttatttggatctattttcaaatttcaatgggtgtgtttgagaaagtaagagggtatgataacatgtagaaattctatcttaaaattatagttgataataaaaagagtaccatatatatcttatatagggataattatataaaataaattttttataccaaaaaaattatatttttaggttttaagattgtttttttttttttatatatatttttacattttttttataaaaacaacacacgaaaacaacaagaaaactacataaaaataacatgattataatatccaaacaacatcaaaacaacaacaaaaaataatatacagataataaaaaattaacaacaaattaaaaagagtacaacataaaaataccatattttctagtaaataaaataaaaaaaatcgtaaaatatttaaaactccatacaaccgtatttttgtaattttttttattatttttgtgtatttgtaatataatctcttttatatatgttattaagttctcacaaattatcattatatatgattctctactgaaattttaaacaaacaaattagcttagttgttattatagttagtagagctctcttattttaaaagataaaaagttgattagttgaatgttaacatgttgttaataacaataatagaaaaataggattttgatgattacaatagagtattgctttaggtatctcaagatgcctaatattatactaatatatagtattacaattgatcagtaattttttatattatttattatattaaattgtgtaggacttaatattaaagtgcaccaacatcttttctggtatttgccaccttatctctaattgaatgttgaaaagatagtattttgctatattttcagcatacttaagaaaactactactctaataatttagcacatgctaaaatttttgataaatgctacattttatttattataataccacaaattattataatttatcgacttttactaaactttatagtttttatatactatattactattatttaaaggctaattaataatttttccccctgaactttgacatgtactaaatcgtgccccctgaacttttttggctgttaaaaatttaccctgaactattgaga

SEQ ID NO: 221605 - DNA, 1136 bp, Cannabis indica
ctacaagccaatgtcgcctttactggatcaagaagcaatccatatcgcccacctcaatcgttcaagaatggtgcaagacccaattatcgagcccagaatccacaaaacaggcctctctgccagttatgcctgcgttacggccacactgccccagtttgccattatcgtttcgacaaaaattgggtcacccccaaaccaggcaactcaggcccttccaatcccaccaccaactctactcctcgtgcctatgtcactgaacatgaattcgaatatgaccctcaagcctttgcaacatcatttatccctgattttggagatgacttcggttggtatgtggacacaggtgcaacgaatcatgtcacaaatggccttgacaatctcgaatcggctatcccatatcctggcacagagggagttgctgttggagacggtaagaagttactcatctctaatattggtttggctaaattacctgcatctaattctaccaatattaagcttaaatctgttcttcatgtgcctgcaataactaaaaatttagttagtgtatcgcagctcactaatgataattttgtgtttcttgaattccacaaatcttgctgcttcgtcaaggacaaacaaaccgggaaggtgctactcaaggggacacttaaagatggcttatatgtgctagaagagtgctcacgggcactaccagagacaagacaatgtgtgtctaatgccaagaatcctgttgctatgagttgtacgagtcatttaccattagctactgtaacaaatgacactctttgtactgatactcatatcaataaagacacactttttcatgaaactcaatattcccctattgtttttcataccagcaataagcatgacatcaatatctggcaccaaaaattggggcatccctcccccactattatgcaaaaagtcttgtccacaattcctcatactggcaccatcaacacactacagttttgtcaggcatgccaattaggcaaaagccataagcaaccgttccctagcagtgattctaaagccactcaaccacttgagctcatccacacggatttatggggtccttcccacatcaaatccaaagatggatactactattacattcattttattgatga

SEQ ID NO: 221606 - DNA, 1193 bp, Cannabis indica
atacaatccctcatttggcataatgggacaaaatcaccttcctatatatatatatattagaaaaggtggattcgaacttggagcctcctctttttaaggggaagtgtgaaattactaatgtatgcttaggaacaaactttagtatttttttaatccaacgcttttgtagatatttatattttataaattaatattaaacttttaatatttacattaatataatagaaatacttgtattgtaatctcagaattgttttttacttagtacaagacaaaaataattaaactcactatgtattttttttttttttgaataaacttactaattatttaaaataaaagaactttagttctaatttataaaataaacaaatcaaatagattggttctaagtaatttgatgagaaagaaaagaagagataaaatattgcctatgcaaatgataaataaataataagaaatattgaataatatgttggtataattttaatctaaattgatatttagtcaagataaagagatagaaaaaaaaaaaggtgacaatatatttaggactaaaataatataatataatggtacattattattacttttctttttctaaaaaaaaagtagattaattattcatcaaatagttctacccaaggcctaatctgatatcacaagagaaatagaaataagaaaaagactaatgtggcacaagagaaatagaaaatagcgtgactatctctatgatggggtgactctttagagccaaggcttaaaagggtatgttgagaaaagatataagattagcaaaaataaataaataaatattttggttacataagagggtgttgccgttggagacaatcacttttaaaaagtctacttcgaacgaattgtaagattttcaaaagagatggttagagatcatttgaatgaattgtggtcagtgagtgaccctccaaagtcatttcatttgaattaaaattcaaaccagtaaggaccccactcttattagcttactctttttttttcattatatattattttttatttttttatttttaaatttacgatttggattgatcgagtagttacttgggtgaattttatataaattgcgatgtgaattttaattgtgattcaagttgttccgttaattattatgtgagttgttgtgtgaatttttatgaaaattataaaaaaaa

SEQ ID NO: 221607 - DNA, 1070 bp, Cannabis indica
gggatcaattctttacgagtgcgctcctccccgagagctcgtgcaattgttgatagcctacgaatagagtttaaccgtagctggatatcgtcatttttcagctcatctataagaacagctattgggtaaagcggttcatcaaccatagccattgcaatgcaaagtttatctcacagctctagaaggaccaaaaggaaatcagaagagtcgtaagtaacgtactgtcagcgtaaataccaaaaaacaataattacattaaaattggattatataagatactagaatggttagaaggattaacagaaataaattgtggtctctccggcttaagggcataaatacaaccgtaactgagaaaaagcaccagatcgaaactctaatatctaaagagcctaaaattaaaatgcaagaacgaagaaaatttttggaaataaaattaatatagacaggagaaaataaatcgtgcatctgacatcagtaaccctaagtttctgcgtggtaagagaaaaatgtaaaataaacacctgcccagtttaatttggataatctaagtcattaataagctaaggtgaattgaattcccctccaaaatcgaagaaagaaatgcaaaatcggaaaatacagaaactaaacgcaaacattacattaaaaaaaatatattaaaattataagaaaattaatgtctaagaaattaacttaaatacaaatctaattccattataaatgtaacaattaaatcaaattaaaagaaataaatttttcaaaaagaatgaggagaaaaaaagacatgttcttcatatatcttcaacccaactcagattaccagacaaaaaataaaactcaaattaaaataaactgtcaaacaaaactaagcattgtcacaaattaatgtcattaatcaacaaattacaaagaacaagaagaatcaagcataatctagagcaaaaaagtcagattcataaaccataaagaattcatattcaaaaacagagaacaaaatcaatcccaagccaacccttcccgatcatgacccaaccccaaccacttcttctctctcgctctctctctct

SEQ ID NO: 221608 - DNA, 2663 bp, Cannabis indica
attttcagtaccaatttaagaaaattgcattactatacatgtacattatgaacgtaattgatcattttatcacaaaataaatttcccttactatgaataaggataagataaattgcaataccacattgattttgtagtatggtcattcttgggttacaatatataaatatatccataaataaacttacaaaattgaaactcctactcctttaaacaaattagtttctcattaatttttaaaatcaaattatctttcaaatgagaaaattaaatgggaagatgaataaatcaacttttatattatttgaatgtaccttatgtccttcacctttgttaactccccaatatccatatcaaataagttagtttctagtgtgaaagtatcttctatatgaaattgtttgaataattaaggatttatttatcaatctcatgtaaactataatttctcatatgtatatatatttttgacaaaactatgatttctcatattaaaaaggcatatatagttgcaaaataaccaattactacaataagaaacttgaaaaagacttattttgggttgtatttttcacttttttaataagaaaatttacatctcatactgtaattattatttttattacttttatactgttactttgtaacgttataatttacttttatactgtgtaatatttttgtttatattgtatttatttttcaaactttttttagtgtttgagtaacatttgtcacattaaaatcacattgagctagatttttttttgaagctgaatacacgtttttcaaatccatttcttcttctccttcatcttcaaaattgttgtcttcttcttcttaaccttctattttagttttctttatttgtttgaaaaatttatctacgttttttcaactgtgggtggttatgcacgtttgataagttggtgaactgaattccatttcaattcagttttttttctttctaaaatcatatttcctccctttttaccttccttcgttggtcattgtttccccatttatatatatatatatatatatatttgttttattctatccatgattattactcgttcatgttcttcttctccagtcgtaaaaaaatcctgaaaacttttgaaaaaactgtgaagagttcaacaatgggtaagaaagattttggtaagaagaaaaaattttaagatgatccccctagccttacatctcccataacttctaaaagaaagttagtagttgattaagtggaaaagaagaaatcagaatattctaaagttatcattgaagattcaaactttgattttgagcttgaagatgaatattttgagatagagaaagtgacaaaggtatttatttgttttttttttcgggaggggtggggtttttttaatcatcttgttattgtttatgttatttgttgtgttttgttttcaatcttgttatgtagtttagggttctcttgttttattgttgttttagtgtttttgtttgtgcatggtcactgattttttaaattttatatgttttgtattttgtatgtcctattcattgtttaattagtattatatacttgattttatgttttttacagttattttttgtcgttttgaattattttttaatgtaaggggaaactttccaagggaaaggttccctctcatgatgatatggaagtccccattgtcaaaagagttattaaggtatagtatttatttgttgtatttttttttggtttattttatttttgaagttgtattgttattttacagtggtttgagttgattttaagttattgttctaggattggagtcctaagttatggttatttttcgactgtcccatggttgattggtggttgctgatcgtggctgctgagtttaaggagctttgatattgtttgacttacacacaattgactcttgctacagctccaagaattctctcggtcatcgaagatttgagccaagaaagaaggagctgatctttcttgcgccattgttggtaaactggatttggagcaccattgatcagaagtcgtggtggagacaagtcagtgagcagaatttcgtcaagatcatggccaatcaccgtgggaagaacttgagatttccatgctaaaaagttcgtgtgatcgagtttgatggtgagagaagaagtaagagaatgagagaaaggggttctaggattgtgttgtcgtagcaagaggattagcaccaggatcagatacaccagctgatgacgagttgtcgccagaagaagctattgacagaggtcagttgctctgataccatgaacaaagagaaacaggggagaacagagagagagagagtgacacaaggaatgcttgaacacttgcctcaataatgaggactttcactttatttataatacaacagaattgtacaattacagaacaagaattctgttataaatgagaattcgttaagtgtagaaagaaaaaccaagaagccaactaactaatcaaatagtgacaaaactaactaactaactatcttgattatccggcactaacaatacctaataacaatgctatgtgttatatggcagagtcaaagtatagacattaaaaccatcttcaagtgtccatgtgattcaatagcttaattaattattgtgaattgtgatgtgactacctaattaat

SEQ ID NO: 221609 - DNA, 1691 bp, Cannabis indica
gttttaacaaagagaacttaacgaattatacataccgtaaatatcctaataatattttccattattcaaccaaaaaaaaaatcataatatcctctacaattcaccttcactagaaatttagctcgcaacaactaaaaaacataagataactactactactagagagaatcataatggtgaaaagctctattatgtcttgctgagaatttaagtaaagtagcatgaaataatacgaataaaacaattatttcacattgtctattttttttctgtgacaaattaatcttgtggtaaaaaaaaaccaaaaacaaaaaacagcattaagattaattgtaccttctgaaaagataaagggaaaaaaaaagccattaagactctaaaatgaactaccacaccaccaaaaaattgaatatataagttaaaagcctacaaaactatgtaatcaacattcatattgcccgtccttgcaagtgccacattggaccaaattgtactcaagttgtacagtcacacatggattaattggctaaaagaaaatttgcctcaagttatatcatgtttaccgcaattggcttgattctaactactatgggcccttgttttgcctacgttagcaaagtccaaagaaaatctctattcttctaaacttccaaaagtatggaaatggaaatcttaaaaaatacaattcatgaattgtcatctgtccgtacaatctaaaaaaacttcatacttaaattccttgttcattaatctccatatttcttgctcattaattttcccttatgaacaaaataagccatgtttattattctctacaaaccataatcttacacaaaaaatcaacctcctatataatatataactcaaattccacgcaaaacagagaaacagcataaaataactcttgtttaattcagcaaatcgcctgtacttagaaaattaaaacataatatatatacacatatctattctatcagtacaacatctatactcaattaattgcactttcctctaaagattttctcttcattttcaaaattgaaataaaaagaatctaaagactttaattgcatacacatatcaaacaatcaaaataaataacataaacaaaaacccttattagattattattacaaaactcataaacctcgaagctttaaaaaaaaaaaaaagataaattctgatcaaaaaagggttaacgaaaccataaccactcaaacatgcatacacacatattttcacagatatcatcaaatcaattaatttaattaaataacaaaataaaatcaaaaaaaaaaaaactaaccacttcgagtgccctcctacgtttcaatttcatgttgaaaccgatagcattgcacgaaagaataatgcagcgattgagaaccgatcaaccctcaaaccaatgagaattggtcgaaacgcagagagagagagatagcgagtgaagattaaacaaaattgacaaaaattcgggggggagtgaagtagggttttgttaaattgagaatgatcggatggtggaattggattgtggatgaagaagagaatgaatttgtggtttgattattgaaatattagggttttgatgggatcaaacaacacacggagagacccacgcagagacccaaagagagagagaaagaagaagaagagtatgagagagagaaattctaataacttcagaaaaa

SEQ ID NO: 221610 - DNA, 2884 bp, Cannabis indica
ctctgacaaaatctacgatagaccagtggaaaaggttatctctgagatcgatccacaactggagggacctacaagcaatgttcagaaagaaatttgttgcagcaaaggcctttgacctggaagctagttccctgacaattgtcaaatagcaataagaagaaagcctgaagaaatacatccaacgtatgatggatgttacagctaaaataaaggttattgatgatataaagatggtggctttgacatgaggattaaccataggatctttgctatggggagaactccaacgcaagagcgtagaaacattgactgattttttgtgaagagcctaaggattcatcaatctagaggaagcttacgcttaagcttactgagtacttctagcaccttccaccaacataacaacttcccaagcttcgtagatgactactccatcaattttccctcaagcaactacctttacgactcctaccgtttacggaccaagtgcttctacacatgctagtttttccagatttggagcagtacaaaccagatatagtgtccttcccaaataaacgaaccaaatagcagatgctaccgagtccaatgtaatttaatcacagagcaaaataagttccaagggcccaagtcaaaatgattctacgaagaaaggaaagacttgagagtcaagatactctgagtgcacaagccttgttgatacttgagagaatgtctataaggtaacttgtaacatggtccattacaagaagcctctgccaatgtacaaaggcgatgcaaatatcacggtgacatagggcacaccaccaacgagtatgactatctgagggatgaaattgaaggatttgtttggaatggtcatctatcaaattgggtaagaacagaggttatttatcctggacagggggttgcacatggtatgctttttattacttcacagcatggaataattaatcctccttagggagtagtccatccacaaactcttagaattcaatctcccaatgcacaagcccttcaaggggtgaaaactgctcaagcagcaagatctgatgtggctcccagtcctggaaaccagtactctctaggagcagctcaaccagcattagatggtcatgtagcaaccatttttggtggaacacacttgacgaaagcacccaaaatgcataaaaaaggtacttgaatgaattggatcaagacaaaacttgcaacttggtacaatcacctgcccagtgtcctcagatgatgaatttaccaatgactttcacagaagattatgccaaacatgtacattttcctcaaaacaaccctttggtgatagaaactcagattgcaaataaaagagtttatggaatcctcgtagataatggaagctctattaacattattttcaaagatgcctttaaagcgatcgtccttgtttaagaaaatttgttaccttgtccaattcaactacaagtcttcaatggagacatatggattccaatggggaaaatacaacttccaatgatgatcaattgagaagtctctggaagcaatgcaatatcttctttcaagtacaacacctttgtagatgttgattgcacaaaaaattacaacgtcattctgggacaatcacttttggttaattttggagcagtgacatccatccgctatctatgcctaaacttcccaggtgataccggaagcattggaatgatcagaggcaccaggagactgccaaaagctgttacaatgtttcaaccaagactgttcttatagtctgtgaagtaattattacaaaagctgaaacatcttcccagccagcaccggggtggttcacgaaaaggatgaacttgattcaagggtaggcgtggaacaaataaatgatcctattgaagaggtagaataagtatgcattgatgatgaagatcccactagagtcattagtttgggaaacaatctatctccaacagttagagaaaagattgcctccacagtaaaggcaaacaatgatatattggcatggagtcattctgacatgactggaatcagtccccgagtaattttggcatgcactaaacataaatctcaaggcagatccaggtccatagaagcgaagacccctagacccagtgagatcagaagcagtgaaagcggaagtagacaagttgatgaacattgatttccttagggaagctctatatcatatatggctagccaattcggttttggtcctaaagcctaatgggacatggaggatgtgtatagattttacaaatctaaacaaagcttgtcccaaagactgttttctacttctgcaaattgatcagatggtcgacacaacctcgaggtacgaaatcttaagcttcatgcatgaatactctgagtataatcaaatcaaaaagcacatggctgaccaagagcattcaagctttcaagctgagaaagccatctattgctacgagggcatgccttttgaattgaagaacgccagagatacctatcaaagaatggtttataaaatgttcaaaaatgtactgggaagaacatggaagtttatgtcaatgacatgctggtgaagtagaagacttccatgaaccataatgaatatttagaagaagctttttccattattcaagagtatggaatgaaactaaatcaaaagaaatactctttcaaagtttgctcaagcaaattcttgggtttcatagttagttcttgtgacattgaggcgaacccaaaaaaaaatcaaagctcttctagatatgccttcacccaggaagcataaagatgttcaaaagctgactagaaggattgcaacacttagtaggttcgtttctaaatcaatagataagtgcatacctttcttcaatgtccttcgacgaaacaacaagtttgaatg

SEQ ID NO: 221611 - DNA, 3101 bp, Cannabis indica
ttggtagcccatcaacaaaaggtggctcggtagttcaacaagcaagtaaaggcacgaaatttttgtgtggaaaatatggtcctaaggagagtatttctgagcacaaagacagcacgactggtgtgcttggaccaaacaaggaaggaccctatcaggtggttgattatctacaatcaggagcgtacaaactttggtggtatgacaaaaatatgaaactcgtctagtgagatattggaatggggaacatttaagaaagtattatcagtaaaagtaccaagttctacaaccgctataagtataaaaccaaagaatatttacttttaagtaaatggccttctgagcagatcaaacccaagggttcagaagaaatgactaagtactcaggtcggatgaccacctttgaaattacaatttctttttaagtgcaatttgttttgtttaagtttagctaaagattgaagtagatcatataatgactatcatgtaagttaatacggtaataaaaaaattccaaccaataaatgaataaagatgtctatttaaattctgattgtgtcaattttattagcaagttataaatttaccattaaatgtatacaaaggtctgctcgaatccaaaagaccgaacagatgaaaaccatacttgtgaaatgtaagtgactaagagtcaaaactctgcttggtcacttgaagggcaactatacccatacaaagaattggtaaaagtaaacaacaagctaaaactaacataatagcggcatggataattatcaaaataagggataacattcattaaaaggacaaagaaagcacaataaactcgggatcaaaaggccacccggtcagctagttatattaaaatgaaaatataacccaagtctaaaaacctcttggctggtcatttttggctctaagaaaggctcatgggtcgaacaaaaaaaatgaacaagaaaaaacgttaagacgtcaggggtccccagctccttgtacgaatcaacttggtctgtgggggtcgagcgcttaactttctgggcagtaggagttttcagtttttttttcggtcggaagtgtagaagtggttgcctcggggttttctttggccatctaaccttcatagtaatcaagatacatccccttggaatcataaaggtaataaaaaaattattgggggttagccttccaaaattcgtagaagacctcaagggtagtcgtttctagtctttccacctccttctcaagctcttcctccctagtctgcttaatctggacatctcctcaaactttgaaagaataatgcagagattctccctctcatctttaagctcattgacctccctagattaggcgttaccgtttgcctctagctgggcggttgacgacatctcttgaatctccttggccagctcttcaacccgtttgttagcagcaaggagccttttgttcacatctttgatctcgttctgcacgtcccaaacctcctttttacgagcatatacgtccctctataatgtgttggtggtagcaaggttcttggctccggtggacttagctcaagctacaagaaaatagaataaaaataaagaaggaaatactcactcgagtatcctccttcaagactcctcccacgaccagttccaaagacaactcattgttcgccccagacaactgatcgctcacttcaggaagtgatcggtccaagatgtactagagcatgtctttgccttttttcgcctccgtgctcagtaccatgaccgttgaagaggttttaggttaaccaaatttgtccgagatgcctcctctagaactctttgacttcaaaaccttttagactggagggtgtgcggtaggctgttccttggaaaggtcaatgccttcttcagccgaacccttttcctttgatggagcctcagttcctttcgtatcttttgggcagaggagattggcccgagctgccattaactctcttcttcaaggcgtgaagtaccttctgagacatttttgctcaaacaaaataacacagttagaagcaaatatgatgtaaagcatgttatagaagaagtaaatgcaagtcaaagataccctacacgtgggcacaagcatttgcccaaataatcacagatagagcatcattgtctgaagagtcttcatcctactccaccaggacgactttcgtatttcgctccactagggcagatggccgagcaggcatatcaggttcccttatcctgatagcgtgctccactagtgtttggtcatttgggagagttttcttcttcttcttggtcgacttctcctgctctgaatattcttgagcatactgctttgcgttgttgtctcccttcaacttcacctcatgcttgagttgaatgagccccttttcatgctccgtcacaccagccccgctcaacttttcctttttcttcttctccttcacaagcctcgacacaaagtcctttaggaagagtttgtagttgacaaagttggcctcagtggccagcatggtagagtctgatatgtactcggcctccatggtaagtttgatattacggtttgcttagagcttctctccacccccaaagtaaacaccatcccagatgtagactttttgtcatcaagacaatcctagaaatctgagtcggtatagcctacagaatttaaagaaccacccttgtagaccaacacataattactagtacttttcaaatattttagaatattatttactacagcccaatgttccattcctgggtttgtctgatacctgcgcacaatttctactgcatggcatatgttaggtctagtacataacatttcatacattgactcccaactgctaaagcataaggaacccttctcatgtcctctatgtcttgaggattagtgggacactgttccttagatagacagataccaaatctagaaggcatttgtgccccttttgtatttgtcattcagaatctctctaacaccttatcaatgtaagttgtttgagagagagcaagggttgtgttcttcccgtttctaaaaatatgaataccaagaacataagtagcttcacccaaatctttcatttcaaattgagtgtcaagccattccttgat

SEQ ID NO: 221612 - DNA, 1505 bp, Cannabis indica
tctctgggcgtggcctcatggaccaagagaaattcgaaagagttgctgataccacgtataaaatgttgtatcatttaattttctgtattttactttctacagtatatttatgttctgtcagaatttgtgtctgatataatagagacaaattctgttcaaataattttactacaatttcacattatttaaattgcagaattgtagtaagattgtttgataatttcacttgataattattaaaaacagaattttaattacatataaagtttttataataaatcttaataaatgaatactaaataattattctttaataaaaaaaataattattatattttgttttgtaaaaaaattattctaactatttaattaatttttgaaattttttattttattttttaataacatgtgatattataatgataaaagtacatgttggtaaaagaaaattataaagtaattacagatataaaatatggagataattgcggtaaaagtttccaaaaaacttagggttgatgcagattaatctccaacctcaaaaattaacagtaatagtccccaaggtcacattttctgtaagtcagttggtccctaacttaagtgatccgttaaacccaaataaaatggcacgtgtcaatttttaattggtcaataataatttaattaaaaaattttaaaataaaataaaaaactaaaaatatatttaaaattataaatttatttgttggggttttagaattaggagttgggttctattgtgctattggggttacggtcgtgggttgtaggatgagtgggttgtgatggatttgaagttaccttccttcatcatgttttttcttcattttttaacttcttaaacataataacaacatgcctttcgattgttgatgtggttgtatattttttcagtgtgaatggcggagagagacacccattaacaatcaaactgagtttctatttttctaagatttgaatatattgttattatattgggaatttatatatataacatgcaaacaaagaataaattcccagaaaaaatgcatctatttctaattaataaattaacccttttttatctttctatgccgccgacaaggcctcgtcgtcaaaaatggaggccactacaagcctcaccgtcgttctttggagtcaggccactatgaccttcactgttgagtcaccattaagagttcgccggagtaagtgtggttggaattgagtgggtgggggtgtggctggaagaaaaagacgaggtggggagggggctcgagtgtggctagaggaagaagacgaagaagaataagaagaaaaaaagaaaaaaaaagaaaagaacaagtaaaataaattataatttaaaatttattttttgtatggcattaaaataatgaaaaatataaatgtaaatcctatacaaagtggccggccatattagtgaataatgggcctcacattgcaatttgccatttgtatttctcaatcccatttctcaaaaatcc

SEQ ID NO: 221613 - DNA, 1929 bp, Cannabis indica
ctgaaatcccagaaacttgttgaggtaccttctcggcattgaacaccaaattcaccgcccctcctcggccgaagcttgaatcttcgagctctccaccgatggacacccaacaatcgccacccccgaattcaccttagcctgtcactgagctttatttttaattgacactctcttcctttggctcccattcggtctgctagccccctccccatctttcgaaacaccataagcaaaagcaccattttcctgaattgatccaacatcctcaagaacatgcttccctttgttaaaatatcttcttgctctgtcaatctcgtcagcatcaccttctccatgagttttgcgttttttaagctctgaatgcctatcctcaaagcctccagtcgactgctcaaacaccttttgaatattacccacctgacctgcacgtggcccttgtaacccagcatcacgtggcccttgtaacccagcatcacgacccaattggccaaataccatttcacttaatttatttggacttacaacctccacttcacaggcccaacccacattgatctttagtccatttgatttttcacacgtacccaaatcataaccacctttgcccaacctatcacccacgatccccgaattctcagcatcgccatgaatggccgattccactagcagttctccgaccacctcagcatcgccggacctcccatcacccgtctccatcaaatgaacttcttttccaagcttggtgaccaatggaacctccctctccgattcctcctgctccaccgagatatcactagtcctcacctggccttgtttgaacgccacaaagcaatttggtgtaggatcatcttccgtcaaccaagtgccatatttaggaaccagcagctcattctcatccttttccatcactacttgtttatcacaatcctttttttttcttgtccccatctaccacagccatagcaaagcagtgataatctctcaaacttgaattgaatccaaaaccgcttcccatcgctcggttgaaatcggcccacaaacaaactcttattcaacggaaaaccaatacgcattcggacatagccattgagaaacattctacgatcattctgccatttaaaatcctcaatctcccctgccatttcaccgatacgcctgacattcctctgcgtaaatagctttaaaggccatcctctcatcttaagccaacaagatcttttattcagattataatccctccactgtcccgtatccagccaagcttctagtaccaataatcctccgttaaaataccatagttgtttagatagcactaattttgcatcctgggaagttttgaaagaaaatcctacaatatgattatccccttcctcttcatacaccttaacttcccaatccttaattcctttccacagtcggccaaacatattcatcaacaatcgctcactaatgtcccgcttcgaaataatcctaccaaccaaagaacttcctccaaatgacgccactgcatcagaattttcctcccattcctcctcctgagcaactcccagcttactagtcatagctacaatgtcatcaacatcggctaccgcatcccccatcatcattaaactaatcaacagccacaaatgaaccatgaatcccaggtcaaaaaccagtaacaaagtagtccctcatacaataatttattattttaagattaatcaattgtatttttagagtgagaaaatatcacttttggtaattaatgagattattagatgaaaactcaataaaattgaaaaattaaaggatgaaagattaaatacaaaaaactgccacattattaggtggttatttataagttatttcattattatttattagtaataataatagataatatgtgttattaatgtaaatattttatatagatttttaacttaaaaa

SEQ ID NO: 221614 - DNA, 3800 bp, Cannabis indica
tgtttaaacaacatacttgtgagtagatctaagatcctggtaaaataaatcccaacatgagttcctaactttcccagactaacatttttaacccagcaataacaatggtcagattcctgtttccaatgaaaaaaggcctctgagttgagatttagatccaataaatcttaattcttaaaaatccattcaattttggaatagattctctctccattttcttgattgttagatcaagtaaaatcagaaccacaccttttcaattcatctgccagtccaaaagaaaaccaatgattagcatcaactaactcacttgcactaactggccttcctccaatcctatcatcacaattaaacactgaattaaattccgcacagattaaccaaggcttaacatgcattgacaaatcagttaggctttgtcataaatctagtctctcattcacagaattactcccatacacaatagtatggaaaaatactttattcatacctcatattctgactttgcaatgaagaaattacttgattttctttaaaacctccattgacaaaagtcttgagcctcatttgcaaaattctaccctcaatgctggagctagaatagaactcccaccctaggaagacatatttcaccatctcatcaactttacttcctcttcttttagtttccaaaaatgcacaaatacccactttattctccttcaacacttcttgaattttatcttgtttattcttgtggttaaaccccctaatgtttcagcacagtagattgcaattctccattaagaatattaaacgagttttgcagttgtttgccaattttcttttaaattcgacaaatttttctcttgggaattcgccattcatctttaagttgagtctccaaagtgtccacctattgaatttcacattgagatactttagacttcgaactctcttgaacgagaggtgtgatatagttactgaatctacacaaatctatgaatcagtagaaataacatcttgtttctccactgctaagaacggtgaacctgctgacactttccattattttacaataagagtttttggctttattgttaccccaatacctccattcgaattcccaagctgagtgaaattttttccctaattcctaactgctctattaactgtttcagcaatctcatcttgacccatatccactttctattatgaattaatgggaagtggcaacctcttaaagtctagagccgttggcccattcttcttctctgaattagctatagaagaggacttgaaagtagttctagcctttttaaagctcaacatgtgacaatatgatgatcataaccccacatttcgagcattgataggaaaccattcatattcatattgaattggaattcaattaagtcgatcccattcattttcatagttgatcactgtacgtaaatcttccttaatttctatgtcaactgaaatctgagcaaactttacttgtgatcactatttagtaatattgtctacaatgattggggttccaatagtattagctggtgcactaagacaattggttccctaatattatagacctaggccaggtagtttaatccaaaccgagactgtttttacaaaattcatggagtcaaaattcaaagtccatggtctatttataaattgtttgtttccaaattgtacaaacacgacttccaaaacaatatctctggaggcttcatctaacaattttactagtgaaataccatcgtgcattctaaccattttctccaatcccatatttctccaaacccttcgagcgaacctctcaaacactttcaatgggggattttcccctaaaaccatacataacatagcatatttccaataatcagactcaatttcaatttccttaagatcaagcttagcaaatatctggccatccttcttaagaggcgaagagaaatggagccttacacctacatgacttgacttaggtgagatctctacccacatctgttgagatctctcttggaatttctatccacattcatcttctcacccacccacatttggaaaagaggttttcaacatcgaaccttggttgagaaaatcttgcatcttatggattggaggaaacactccatcgagggcatctgtgaactcttttgtgaatcctcctaattcacttcttcctagaaggagggaataatagctacatgtctcccacaaaactaagataaagaatcaactttcctatatggtgattcggtattcctcgacgttgaaactgtctttcagtgggtatgctttgccttcctcatcgatagagaacaagcagatctcacgcctaatagataacataggaataaatatatttattatggataaatcacaatattttgtatagaacattttatataaaataacattgtaatagtagtattcttaaaaatttagaatatttataaagaagaaaaataatttaaaaatgtatctgtctaacaaaattttagtggaaaatttattattatttttgaaggaaaatatatttattatttaagaagtatatatagattttataaatattaatttaagagaattttatatttatttttaagagcattagccctaggttttgttgtaattctattttggttcgccagggtgtctgttgacagggacatacctcttaaaaccctatagacaaaaaaattgtattacaattttttattttatttgataactaaatacaaaccaacacgagtacgtcactcatggcttttatacatgggtacatcactctggctgcttcttggaatgacgacaggccctacaaaccaacacgagtattttcagtatgatttatcctcacttacaagcttcttaagagaatttcccagtagttaacccatcctaagattactccagctcaaacacgcttaatattggagttctctagtaatgggcaactaaaaaaaagatgtaccttgctgatataggtagtacctatcaatctatgtaagtcttcttcaactatttagtcaaactcttagaaaatcttagaatcatcatacttgatcttccccatgcgatgtgagatttcacagcttactcggtattaccccttacagatcacgagactactgactgtcacaataataatttaactaggttcattttttttataataatgaagcccccacaaagaaatttttttcggtcggttactatctattgataggctagttttaggtatattttataatgtcttttagccgattatgttcatttttgttccaaattgcatttgtctcttgttgtttcatatttaatggtcaattaattattatggattgaaatgagaataaacatatcaaataagacaaatatggtaaatatatcatagattttggagttgtaaaatataatgagtgataaattttatgtttgggatgctcaatacatttcatttgagctttggaaatgcaagtttaaagcatcaatcaattttttcactttgatcctttcactttccagaaaactattctgaataaaatttgtagagcattcttcaagattttcaaaatatcttaaatcttaaaaaacttatcgaccattgcagtaggatttaagagtcccaaattcacaattagttccatggctcccaaataaagagttgcagcgcacacgtctatacagtacacgaaagctcaatttgaagggacaaagttgtcttttcacctaaactaaaatcgttatggttactacataaatatctttaagtgtgactttcattatttttttcgcctctaaaaacttag

SEQ ID NO: 221615 - DNA, 1352 bp, Cannabis indica
tttttttttttggtcttttcttttagcaaaatgacactcaatcagatgtcttctctacttttttattttatttttatttttttataagtaaaaaataaattaaaataataatttataaaatccttctagttgaatcattatttatttgagctttatattatagtaatttactcattaaaaaatatactatctatatttatgtctttcctatttatgatttctaaagtctttttcaggtactacgaataattatttgagttttaagtcttttttggttaatatataaatttttgttaaatttaaagtttggctgcttatttcttaataagttataaaaagaaactaaaatattgtttatgatactggtaatattttttttggtgatgatgttgttaggtttgactcttaaatagattttaaaggtaatttaaatgttattacaacataagagtataatgttacctaaaatgaaaattttaaattttataatgtttaagatatcatttagtttcttttgttaaaaaaaaaaagatatcatttagtttatttacctacgaaaattatttaatggaatagaccattatttaggagatgtcaaacaactttatagtaacataagttagttgatatattaaactttatttgaatttaaaatttggttacaattttattaataaattataaaataaattaagtagttgcttttgattttagttacatttttttggtaaaaataaaaaaaatatatgattctcacatattaaaataacctgcttgaagagcaggtcataatggtattattttttaattaaaatgactaacaatgtagttgtttttttttttagagttgtagaaaataaaataaaagtaggttaaaaaataataaaaaagtcaaaacaaataaaaattcctaacgtccacttcatcgtctatttatttttagaaaagaaaaaagtcaaaaataagatgaggctaagtttgatactaacaatgtgaggaaagtgcatataattgtttatatgcgatacaacaaccgtccatttcatcatttaaatattcaaagctatatttgttcataattttaaaattatgtataaaattaaaaattcccctatttgtttcctataaccgtttaaaggaatctctcaaccacttgaacaaatctctcaactaccttgagagattatctcaaccatcagaaatatctataactactttcaaatttaaatttaaataaatatttattttaagttaattaatgggttgagatgcgaaatgaccctcaatttagtaactaagttagtaaatgtccactttttaaaaaaattaagaaaatggtcaaatctaataaa

SEQ ID NO: 221616 - DNA, 3835 bp, Cannabis indica
accgatattgatagtagaaaagatatcataaacttaccggtatatcttttctaagtcaatgtcacttagttgatcatagatcgtttgatctcaatcctgagatagttaagttctaacttaatttattatgcgagttctttgacttgtttgttaaaatattacccataggactagcccatatttacatcttgggaatttgatagtacaattgagtgggagcgttaatcatagatatggaatctatagcttctattactattagaagtgaaacgatggtttctttagagcttggcttaacgcgataaatatagagcgctcattttaattaatttttactgaaatattatttacaagtagctacgtattttaaaaataaaatacattgaagggtaaaacaataaatttgtccctacttaatgtaaactgtctttagaggatcattgattatttagattgtaatattgtataatttatagtgtatctatatttggtatatagagagttctatgtaatcaagagtgtgattctaattctataatagagtcaggagaaactaataagctaggaaatttacttagtaaatttcggatcaacttattaggagcttaattacgagcttaattacataagccccatggtccccacactaaccaagataatattgttttgtagtctcaattaattcatttatttaatcaattagaattctaactaatgactttgtcttatttatgaactggggaacaaagccgcgcttcgagcgggttcgaccttagttttgtaaattttattttacgaatgaagtgatttgatgtaaaatataatattttgatatttatattataattaaagaaaaatttaaaattataaatgtaatttgttattttaaatatgtagaacggtggtaaaattaacatatgaaataaaattacatgtgtcttttaaaataaatgaaaaaaaaaaatataagtttaataaacattgcgtgtaaacaaaagatgtatgtcttctccatagagttgaatgtaggataaaagttgcgaaatggaccacgcaatattttttgtttctgtaattgatagattatgtaaaatgttagtgattgaagttttttatctaaaaaattagataaaatgattaatttgaacaaattatgtagagataaaatttgtaccttaaattgtaatgttggaaaagaaggtggtgatccataatactaatcttttccatactgaaatatttacttgtgttactatctttcttgattattaagtaaaataaataatgtgcatattaaaaataaaattgtgaaaatgtgataccttttttggtggatgatgagtgagttttttgaaatacttctttctagacgacattcttgattaaaattgggtcttccacttcatcatcggcgtttattataatcaatccttctcttaaagttactcgagagactgcaacatataattgaccatgagtgaatacttgcttagggagatacaatccgacatgtttaagcgattgtccttgacttttattgattatcatggcaaagcatggtgctaaaagaagttgccttctattgagcttgaatggttacttggattcatttggagacatgattattcttggaatagttacattttcattaatatttgttccaaagattatattagctctaattcaccatttaccaggacgggtgacaatcaatcttgtgttattgcataaaccttttgtttgatttagatttctgaggagcattacaggagcaccttcctttaggtgtatgtcatgattggggatgccattaaatttcaaactatgcaaaaacttagctggatacaaaagatcgtcttcattgtgtttatactttctttgcatatactgtctgagctgaaataggtcctcccttctcttggtatcatattcataatcatctcatttaactcatggactatttcaatttttggcgttagtattgctctttctttcaaatatgtcgggtcactataattatactatagtgaagggtagatagcttggactatagaattcatgggatcatcagatggacttctgtagatgtctgaaggaattttgataaattccctatcaatgtcatgatataatgaaccatccccaatttgcaacaaccatttatcaaaagaagctattttagcaacctcatcctcattgacatttccattataaagcctcatattttgcttcagctcatatattttaaaaaatggccataggtatgatgaattaagagatgcatcaacaatgtcagctcttgtaccctttggaacaactggcaatatttgccgaaaatctccgccgcatattattgtaagtcctccaaaaggtttggtagtgctattctcataccttgttcttagaatatctcttaaggtcttatctaaagcctcaaagcaatacttatttgccattggtgcttcatcccaaatgatcaaagaagtctgcatcaagagttcagctagtagggtgccatgtcgaatttcacatgttgactcagctgtaacctccaagggaatatgaaaccgtgaatgagcggtcctgccattaggcaataataaggctgctatgcctgaagttgcaacaggcaagactatctttgattctgatctgagctttgcaattactgtattccataaaaatgtttttcatgtaccaccatgtccactgatgaaaaacaaatttccttcttcattctctacagaattcagtattgcttcataagctaatttttgtgaaggatttagaacagcaaacggtttgtcatagagggttttcaattgttctgtgtcataatccagctctttattgaccagtctattaccggtttctctcatcaaagatgaattgggctggggcattccatttatgtctttcagactttttcccattttttgtatgatacattcaatttcgaacaatgtgtatgcttcaacttgttggtcatttagctggagatccctcatcctgaatatttttctttgtaatgcagtattgtcttctgacaatgtgatctagtttgatttctaaaggtttgtgacatcagaaacctgacaattaatgaggatttttacaaaaagatgccttaagccatttccagtggcccaaagtgcagcttcagtcaagcagtcgatccattctttatcatcatctaataatccgagagcataacatgcacctttgaaagtagaatatgtgactccgttcactgttctgatactttcgtaagaagtgcatcctttcacaaaatttagcatcattctcatgtagaagcgttctcctgttgaagggtgtgcaaagtatattcttccaattgcaataccttgttttcttcttgtccatattttatctttcgaattccaaacccaacatgtagggaaatcagaataagttagctcccgagcatcctcgttattcttgtttgtctctaaccattcagtaaactttgttttgtctactccaggtgtgccaagaacattttcagggcacttatcttctccgaatatcactgtatgctctccaagtaaatggaatggcaatctttcaactgatggctttcgataatgtatgtcgaattggaagattctccagcaagcttcagttgctgagatgtatctgcaatcaagatatgttttaatctcgtctatcccttcggtgttgtcgattgattccactgttgcagttgttctatcagaccctttatggacatacttaaaaagatattttatggatcttgagtaattgcaaagctcaacattaagttcctatagtaagggacaacgtaacgattatc

SEQ ID NO: 221617 - DNA, 4580 bp, Cannabis indica
ttttcttttctctgttatttacatggtatcagagcaaattctttctttcttccttttctggtttttttgctttcgtctgtcgtcttcaagctcgagccttcgttcatggctgttaactggaggttccgtctcacgacttcctgggttcccactcttccctagatcccgcacctgttacttttctcgcattctctctctgtttcgattggatgagcacaattatctcccctggcgccatcaagtgtttgcagccattaaggtagcagacttcagcatcatcttgatcatacaagtgctcctctaaagttcctcaccaatgaggatcggatcctcaatcgaccttctcctgaatatgaaatctgggatcagcaagatagcatccttgtttcttggttgctttcatcgatgtcagagaaaacactcactcgcatggttggatgtgactcagctgcacaaatttgggagactctcagcacctactacacggctttgaacagagcaaatgttggtaaatacaaaactcaacttagaaattccaaaatgaagggctcactcaatgatttcttgctgaaaatcaagagcactgtcgatcttcttgcctctattggacatccaatgtctgctcaagatcacatagaagcaatctttaatggtctttctagtgagtataatgtgtttgttacctctgtcaacaccagattggacaattatacagttgcagaaattgaggcattattaatggctcaagaagttagattggataaagattcagaggatcttgatatcaataaaccagaagccaatttggctcacacaaaaccttttacaggtggtagaggtacattttcatctccttattatccttcctctaactcttcatctcaatctggtgtgttcaggggtgcatcgggctcttactcggctaatcatcctccacctggttttggttctcattcacaagttccaactcgaggaaccatggctggccgtggacagatgcattccaacaggtctggacaagtgcaaggccgtggtcaatacacagcatggggtcagaaaatgcaatgccaattatgtggcaagttaggccatactgtacacaagtgtttttacaggtttgataagtcattcacgggtccagaaactttccaaggattctcgggtagtgtcaatcttgctgaatgtgctcatctctatgcctctcctgaagtggttcaagacaatagttggtatcctgattctggagctactcatcaccttactcccaatgcccacaacttgatgtattctactgaatatgcaggagatcaacaaatacacatgggtgatggatctggtctcaacatccacaacattggtaaaacctttatcctttctccctttcattcacaccaacttgtcttaaataatcttttgcatgtgcctcacataaccaagaatcttcttagtgtgtctcaatttgcccaagataacaatgtttattttgaatttcacccttctcattgttgtgtcaaagatcaggcaactcagaagaccttgttggttgggaagcttgatcaaggtctttacaagtttgactctcttcaactttaaagtcttgccacaaccaaaagctgttccaactcccaaaccgagtcaacctctctacttgaccaacacaataaagttcaatgtaacagtacctccatcccacctagaaattctcttttttcactttggcctaatagactagggcaccctactgctcaaattgtacaaagtgcactgtcaacttgcaatatcaaaataagcaataaaattgatccaaatttttctgatctttgtgcctcttgttgtttaggtaaacatcataagtttccttttcctatttccactactgaatataatgaacctttacaacttttgcactctgatttgtggggccctgcccccattgtatcttctagtggatacaagtattacatcagttttatagatgcttattcaagacacacttggatttacatgttgagaacaaaatgtgaggccttaccaaccttcattacctttaaggcacaagttgaattgcaacttggttttaaaatcaaaaagcttcaatctgactggggtggggaatatcaagcttttaccaatcttttaaaagaacatgggattattcacaagttgtcttgtcctcatacacatgagcaaaatggggtagctgaacgaaaacatagacacatagtggagagtggtttaacccttttagctcaagcatccttacctcttaagtattgggatgaggcttatcgcactgctgtttttcttatcaatagaatgcctacacccaagttcaattttagcacacctttggaattactattccatgtcaaaccagattacacaatgttaagagtttttgggtgcttgtgttatcctaatcttaggccttataataaagtcaaactcaattataggtctactccttgtgtctttcttgggtatagcttgtcccacaaagggtacaagtgtctctccaaggatgggagattatacatatcacgtgatgtcctatttgatgagcatgtttttccatttgctatttcagcattacactctaccttacctacaaaaagtacaatggtacaaacggctccttccacactttactctcctactcccaatggcacggttccatcactttctcccaatgtcaccactcccaatgtcagtccttcatctatccctatcccacctactgtcacttttgtcccatccacacaaccatcatccattccttcatcaatacaacccacactcccacccgttacacaacctactgatatagaccattcatcttttgtcccaaccaatgcaacagtaccatcaaatagtacaaacactattttcacaacacctaccatcactacaaacaatgctccacctgccactgttgcatcaggttcccacattaacccacctttgatcaatcaacatcccatgtgtactagagctaagtcaggaattagaaaaccaaaggttttaatggcttctctttatcccaaaaccgtgaatgcagccatgaaaaatgaaaaatggcttaaagccatggatgttgaaagacttgcattactcaagaataaaacttggattttagttcctcttccagagggcagagaacctatagggtgcaagtgggtttataggattaaagaagatgaagaaggcaatgttgtgcaatacaaagcaaggctagtggcaaaaggttatcatcaacaagaaggctttgatttcaatgaaacctttagccctgttattaagctagttaccatccgaattgttctcacactagctatcacaaaaggttggacagtgaggcaattagatgtcaataatgcttttctaaatggtgatttacaagaagaaatttatatggtacaaccacctggttttgttgatccttcagctcctactaaagtgtgcaagcttcaaaaggctatctatggtctcaagcaggccccaagagcatggtttgataagttgtcttctgtcttactctctcttggttttaattcagccaaaaccgatcattccctttttgtcaaaatagattcttcatgttgcttgtatgttctagtatatgttgatgatattttgataacagggtctaatgaagctttagtctccactttgataccaggttacacgaagtcatttgctctaaaggatcttggcaaattgaactcacagccactggtattcttctttctcaaaagagtatcttcaagatttactttgcaaagctgagatgcaaggtgccaaaactcatagcactccactgaatagtggtctcaaattgtcaaactatggcagtgatcctgtgcttgatcctaatgcatataggtccattgttggtgctttgcaatatgctaccatcactagacctgatattgcttttagtgtcaataaagtttgtcaatttatgcataatcctcttcaatctcattgggttgctgtgaaacgaatacttagatatttggcaggcactcttgactatggtcttcaactaaacaaagtctctaatttgcatcttgaagcatattgtgatgctgattgggctgctgaccctgatgataggagatccaccactggtttttgtgtattttttggtgaaaatttggtctcttggcaatctaagaagcagcctaccatttctagatcctctacagaagctgaatttcgaagccttgcagctgtggtttctgaaattacttggctccaatcattacttactgaacttcatgttcctaaagctccttctccaatgatttggtgtgataacataagctcagttatgctagctgcaaatcccattcttcatgcaagaaccaaacatatagaaattgatctatattttgttagggacaaggtacttaacaaagacattcaagtgcaacatgtccctgcagaacatcaaattgctgactaccttacaaagccaatctcaagcaatcggtttccagcattaaggagcaaactcagtgtctcttcttcagaggacacttcatttgaggggggctgtcaagagaagaagagttagt

SEQ ID NO: 221618 - DNA, 3720 bp, Cannabis indica
tgagttttatttagggataaaacccaacagttggccccaggtccatgatatttgccatgacctgccttctgttctgcatattagaccccaaaagctcgatgtaatataccagaaatgcatcacctatcttactagggtcatttacccttatgccatcagcttgttccatagataaaaccatgttctgtcttcttctccctttaatactggcatgaaaaattgcaaaattatcatctccatgcttgatccaagtgaccttggacttctgctggagcatagactgatagtctttttgtttctggagcaatagcttccttgcttcatgcttttccttgtgcaattgtgtgttcaaaggatcttgtcttagtgagttttggcattgttccaaagcttccttggctcgaatcgtatctgaaagcagattagagtagccttcattgtcttagtgagttgggattgcataacttacccaatatttccccttacagatcacgggtctactgactgtcacagtcttggcatcaatctttctgtttggacttctatttatgaggtagcaagtagtgtgcaatgcctctccctagtatttcttactcattccagcttctagcagcaagcatctcaccttgtttaacaaggttctgttcattctctcagcaatggcattttgttaagggttctttacaacagttttgtgtctttctatttcatacttcaaacaaagctcattaaattcatcatttataaattcaagaccattatcaattctcaacactttaattttggaatttgtttgagtttccacaagagttttccaattttaaaaagcttttaaacagtcatttttgtgtttcaaaagaaatacccatacctttctgctataatcatcaacaatggacagaaaatattggttacctcctattgtcttgatctgtcttgctccccatagatcatagtggatgtattcaagcacactcttggctctgtaactgttgttagagaatttaattcagtgttgctttccctgcacacaaatttcacataatggtaagtttgcataagtagttaattttttatcagaccctattttgacagttcaactaaacctgttcaccaatatgccccattctagcatgccacaagttagtttcagacacacatttatccacagatgctgcataagcaggcatgattgtttggccatttagaaagtacaagccatgcctcttggtgccttccaataccagcatagatcctctgatgattctcattactccattacttgtcttgtaatcacatccctcatcatcaagagtgcctagagagattaagtttctttttaaatttggtatgtatctgaccttggtgagagtttttacaattccatcaaagcttctaattacaatagatctaatgcctctcacttgacacttgtgatcatttcccatgaccacatttcctccatcgatctcttcatagttagtgaaccattccctgttaggattcatatggtaaatgctaggattgtacatcggtcggtttagtcggtttatactacataatttctaacccaacgtcaagattggcttagaaaattctacatgcaacctgcccaatttttaaaaaaaaatcttaacccgaccgacggtttgggcggtttggtcgggttaacccgcccaaaccgaattaagacctttttttttagtttcaactaaaataaaaattaaccacataaatacacaatatatgtgagaaagaatttttttgagaggctgagaaagaatttcaggattcatgacttttttttaatatatattatatatattatataatatatataatttttttttaaaaaaaaaaagtaaaaatcgggttaaatcgggttgggcggtttaattgggcggtttgggtcaattttcaacccgcccaattagctgattgtgcgggttagaattttttcgagttatgtcggtttgtattttttatcggttttgtcggttcggtttgggcgggttattcgggttggacagtttacgaaaatttttgtacagcgctagtaaatgcaaccactgtccaagatccactcatcataatctttctgttgcaggctagtgcagacatctccatatgtctgacttgcacaacagtcattcatcacagcgaaaagatcaccatctgagctatatgtgtcatttactactgcattcgagtcattaaatttttcttcatctttgtgcttcttcttcttatttttgatctcccaatagttcttgattagatgtcccacttcaccacaatgatgacattttctagtttctttaggcttagattttgatcttgaatgtcctctgaatcttgagttgctacttcttggatttcttcctcgagaaaacagaccttcatcttgtcttgattcttgtctggtagccttttgccaattcaattctacatctcttgacctgagggtactcataacatcttctagagttagagtctctcgactgtacatgattacaatcctcatttctttgaattgatcaggaagaccatttaacaaaatcacagcttgatcttcttccttgatagactcacccatattagtaagagataaaacaattttatttaattcatcaagattttgttttaaagaattaactgcattcattttaaagccatagaacttccctttcaagaaaatcttggttgcagtagacttggccatgtaaagacgatttagcttcatccaggttccaagagctattttctctccaatgacttgtcttagtacattgtcagccaagttcatgatgattgctgatcttacttactttattatagtttcagcatcttccttcttggaaccatcagtctcccttttctggtttctcagttttctcacccttctctaattgatcttcaagagctgaatccaatttttggtagatcaatattgccatcattttctctttccacaaaataaagtctccagtaccatcgaacatctcaagatcgaatctagttgatgagaagccattgttgtctgtttcttgatttcttgaacctttgatgttcttcaattgtcaaattagaggcttattcttcttcctgtaaaaccaaagctctgataccactgttataaattaacaacacacaattcgacaaaacattaaaccaataatcaacaaaaattaaaaacaaaaagcttgaaaaaaagaacacagtttttatccaagttcggccaaagaaacaaatgcctacttcctgctacccccttaggtattccttgtattcaattcataatcatggttacaaaaacacaataatgagcattacaagagaatttcaactctcttactcgagtactccaagaacacaccttggacagtactacctcactttctttcactctgtttcttctctccccaatcaaactaatctttcagttttttcttgtaacaaaatgagagcctacatgtctttatatgtccaggcttcatgaaaggaaaaacaaaaattgtaacaacttaactacccaagctcaagagtaagtgaacataactgaaaatattatctgtccaagatagttggaaccggtttttaactaactgtttctttatttagattaccaaaaaaactatatatataattgagctataaaataaaaaatcacccacaatatgataaattatcttaacttgtacacttgagctcaattttttt

SEQ ID NO: 221619 - DNA, 3565 bp, Cannabis indica
gtctctccaattgtggattgatctcagagataaactctccttccagtcttctacagattttgtcagagtcaatgaaaagcaaagacatttttcatcatcactagccttagcaacttgcattatgcagttgtattttgataagtggtccctggggtctgtccttccttcataaaattccatttaaggaattctgaagcactctagtagtggtacgtctatagttctcttcacacatgattctgtatcttcttcttctgaatcagacacagttccattttgtctttaggagatcttctccatgagcttcgttaactctttgactttacattccacgcattgagttttatcatttgaagattctcttccatggactcaatcatttatatgattcctcaattcattcccacgaggtctggcttattctgttctagccttctctttcttttcatttaatcttctttgaagatcatttgtggagagatttccacgtcgttgtctgaaactagatgcaccaatttgacatcattgcttcgactactagaatcattacaatgattcttatcattccaggtagtaggcttcttggctcaggcattagacttatctttctacacaactctgggtctagaattagtctggtcaccctgccctgaagcatggtttcctttctttttctattgaggttgactggaagatttagatttctttattgttcagcctaaggaggcttctttgaggtttcacctacttttcctttccctttatccttatgtggatcataagttctaggatttttagaattattttttacgatggtgttatcctctggagtcatttgtttggctctatttctagaagttagtgctattaatgcagcctcaattctcgatactttttcaaacaattgcaaagagaattcttcttaccgagttaatttacgttcaattatttctaacttcttgaccataataccacaaggtctgactcgtctagattgtccttcttttcagcactaccaccaacaaacatgtcttggggatcatctcaaacatcattgaaactattgtctcctgtttcattgtcttcaaatataggattgtcacaattttggtctttatcatgtttgatccttatggtggcttgtcacctcattcaaatcttttgtatcccttgccttagcattaggatccatacaatgaagaccagatttatttctagtgagtaccatgattactgaatgtaatcatcatatagtatcactacttccttcagctctcaatgaaagcaccaaaatatttaccaagattttcagaaaaccaattataagaaataagaactgaaggaataaataattcaaagagggaacaaaacaacacttagaatttttacgtggttggggcattaaaaagtcttagtccacgagtcgatattattatgtattttatctagaaaagcctttgggaatacaatgagtatatgttctctgttttttcctgagcaaatattgcaagagtgttcaacccttaatccaaaaggttatgtgagtatatatagagtttacaagaatcatacttagtttccctttccctctaatggggagttttcatgaatcatacacaagttagggctatattcgtgaggcccagcccatgggacgatgagtttgctgactaggcaaattgaacaaggtcaagctgtcattaccatgttctttaattgggggtaattaattgtgaattaattacttaatctttattttaggtagttttccctcttagcttgatatgatcttctagccgagattataggagagttaattccttattctgtgcgatttgataaaaaaagggaaattgtgctaggcttttaggaatacgttgtttgaccttccggaagcattgtctgagcgagaaaggaagatgccttcctagagggtcttgttgaacttgggctttgcccaagttaccttctttgggccccctggtgggctttggatgctaacctagagtccacgtatcccttgctagaaacacgaaaaataataagagagacataacaatttatagtagttcactccatgtatcacgacagtaatggagctacgtctatttaaagttttacttcttcagagatgttttacaaaaaatggctaagttcggatgctctaatttcaagagagagaaactagagagagatgctctgagcttatgggtacttttgtgaacttaaaaagtgagctagtagagctctccttttataggaaggacgtcctattaaaataataataaaatattccaaaaaatatggaaaaacacattcaggctatttttgatcgaagatgatgttctaacggtgaaattgactgcggaggtcattcgtcaatttctagagctcgagttacgtctgcacccacttcgggtaagttgtagcttaaatttgtaactctcttgatggtaaaatttggagtcggtaacttcaaaagttcaattggagtgtgacacatgacttgataaatcattgaaatagctttgaaatgcaagttgaatcgcatcaattagataaatattgagtgagttatgatcgttttactaaagattgttttgctcccaccgcccatgttaatatgtgatgtcaacttggacgctgggccaagggaaaatagcgtttgggatgtaatttttgaagcctatgtgatattttgatatcacttagccatgtcaccagttctcagagatgttgttattctgcaaaaataggagactcgaaactacctaatttttgagtaagtcactttgtcggaaaaatgaaaatatgaagttgtaaatttgactcttctgaattcatagatctcagttactatgaaaatctagatgaacggccgagatggaattagaatcggataagtagaacccaacataccaggccatatatcaacctgggtgctctttttaatgcttccgggatgtcattttgatactttcaaggttcttgaaattgaggattaggcctcctaccccattttgaccattttggagagaattcttgaagaataatttgcattttagtgatcaaagattgaatatcaacctaggctctaagcccaacactaggtcaacttgggcattagggttagttgtgatgcccctggaattactgttttctccccaagtttacttgtatcttcattatttctaataaaggaaaaattctcagaacacctttttggaaactaattggaaacaatccaggttgacaatatgttaatatgggcactaggcctagtgccaagtgttaacctaggcgctaggtccagtttcaagcccttagaaagttgatttgctcggaagaatttttggaaaaattccttggaattggcccagattgacaaaatatcaacctgggcgctgactaagtctcaacctgggcactggtcccttattttggcctccaggttggtccgtttcttcctcaaaagcacttttatctctgtttttgatgaagacaaagaaaattctcgagatgaattttcagtttgatgcttggaagtggctgttgggttttatgc

SEQ ID NO: 221620 - DNA, 3056 bp, Cannabis indica
ttcacaatctgttacatggactttttttttttttactaaaagaagaataaacttcattaaataataaaatcattcatcaatacagaaatgaactcagagggtgcattgctcacactcaaactacgatcagccataaaacaagtggatcttgctaaatagtgagctctattgtttgcagaccatttaacaaactttaaagaaataagaaaatctttcaactcatccaacaaccttttgcctttagtaataattctaccaaaataggaatacatggtagaagagctacagatagattgaatagcaacaaggcagtatgattctacttccactcggctccactttttgtctttaatccaactcaatgctttatgtatgccaatagcttcagccacctcgggagatacaactcctcttaagcatttggctttggcttccaacagtgtaccagtatgagttctagccacacaagagtagctataacagttagttgaagagaatattgtagcatcggtattaatcttaattgtatcaacatttggtaaggcccaatgctcattaccatctttaggaattaacagtcctaaagatggatcaaaagttttatcttgagcataaagccattgattaagaaccgtacgtgcaaaaactacaacagccttgacttcaacatgattttgattccacactagttcattcctactcttccaaagtgcccaacaaagcatagccaccagctgtctactcattccactccatttttcaaagaccgaatccagccagttggaaaatgttccttccacaacagttgagacccctggttctaactctgtccatcaagctctagagaaagaacaagtgactaaaatgtggcttatagtttcattttcgagattacaaaaaaggcacaaagtattgacagccacatattttgtttggagttggaactttgtgggaagagtatcggtagaggcttgccataagaaattcttaagcttcggtggtacttttaaatgccaacatttttgccaaaaaccttaggtatcaggtgttgcaggttgctgcttgtcttcttgaatgttggcataggcactcttcacagtatagggtcccaagttttccttctttcaataccaaatatccaactctataacttgaatggggatgctgacaattaagttaatatctctctcattaaagatgtcatgaagtatatccatatcccattgatcattctccatagtcatcatttgggagacctttttatcaacaagagagacactaacagtgttcacataggggtctgaagcatcgggtaaccatgggtcattgaacacacttactgatgcacctgatcctacccgaattgcagcaccttttttaattagcagatgtgcttccataatgcttctccacaaaaagcttgggctcccacctatctcagctgaaagaaaagatccattgggataatacttggctttaaacacttggctcactagagattgaggttgtatcagcagcctccatccttttttggccaagagagacacattaaaatcataaagattacgaaagcctaaccctccttgcagttttggcttacacatgcgatcccaactcatccaatggatgtttttatcctttttggaagaagaactccaccagtatttgcacatagcgcactccatttccttgcttgtttcatttggtagcaaaaagacgctcattgcatagttagggagggctttgacaatagttttcagcaatatctctttacctgcctttgaaagtagttccccatcccaaaactgaatacgcttccgcactttctccttcaagaaccccaaaattatagactttttcctacctattatgtttgggaggcctaagtaagtgccattttcatcagcctcatgattacccatgtcaccacagatggtatctctaatatgaacttcagtgttgcggctaaaaaatattgatgacttgtcaggatttatctttaaaccagaagattgctcaaacacattcagcaagaatagcacattggtagcttctctctcattggctctgcaaaaaatatagctatcatctccaaagaacatgtgggagacagttagagccccacgagaaatttgaaggcctctcaactgctgtctctgctcatattactttagtaatgccaagaaaacttatgtgcaaataatgaatagataagaagacaatgggtcaccttgacgtaatcctctcccaagaataataaagccaaataaacgaccatcatgagaaatctggtacctagccgaagtgacacatctcataaggagagaagtggtatgattatcaaaccccattttgatgagaacatcctaaaaatagccccattccactctgtcgtatgctttgttcatatcaagtttcagagccataacaccatttcttcctgcagttcttctcttcatgtaatgcattatctcaaaagtaaccttaatgttatcggtaatcacacgtctagggataaatgcacattaagtttcaaatataacctggttaagaaccgattaaattctattggaaagcaccttagagaagattttgtatagtacattacacaaagagatgggccaaatttcagtcatcgaagtaggctatttcttcttgggcacaaggaaaatattagtgttagccaattgatctgcaaaagttccattttgaaaaaatctctagacaattgaaccacatcatggtgtcaaacatcccagaagttttgatagaaactcggactcatgccgtctggcctcgaggacttatctgttggagtatgttttaccaggatctagatttactacaatgtatgttatttaacatcctatatatgaatttctaaaacaatgtaaataaacacatataaagtttcagaaatccttacagtgggtgcagcggaatattaatggctccttccactcagatttctaacccttgtatcttgtctgtagcagagtatcaccaagatctcagcccgaatgtccttttcttgattctggattcttcacagcctt

SEQ ID NO: 221621 - DNA, 2373 bp, Cannabis indica
gaataacataatatgtagcaatttctaatattatttagataaattaaacatcatcaattactgtaataaacttgcatgcacccatggtttcttctaattaaatacattatgtcgaaattgacaatactacatatatttataataattcatcttgtataataataactcatgtggttttattgttggaaaggaagagaagatattcttaaatgatgtagaccacacacatttattaatatacataaatagatatactttatatatacatatgttttatacaaatggattagtgttttaggtcttcgggttgaaacatggggccacataggtggatatctctttcatttagaggctgtaatggtcttgcattcctctccgcaaactgtaaaatttacaattaaacaaaaattgtagcttattacttagtatttcaattaaccaaagttttatttgctgtattataagtattatatatgtcttacatcatgaacagctactctaagtagtctcacttgttctctggaaactgtgcttatctgagaacacattcgaaagattttaaaggtaatttatagataggaaactaataataataatattattaagtatagcaataattatatatatatatatatgtgtacccttttgtttatggcccaaagaactccttgagtgcaaggagggactgtgagtgagccaatgtatcgatagtacttgaatccaccaagtcttaactctctagggtcaaccactccttggtgtacctcttctttggtatcagctatggatgtcacgtgtttggtcaactattaattaattaatgtattattattctcagctaatatatttatatttatatatgaatttggaggcttattacatgaatgtataaataaaccttggtgagaaatctatgaggcttgccaattttgtagaagagagctgttacagcaattttagtttctccattgacctcatggctttcgtgaaccatgtgtagctccaagtcaaaccttttatatatttatatgccaacttattagtataaataagataaggttattataaaaaagagcaaaataagataaggttgtgttaaggtatatctatttatataactataaaattgtatagcgtattgtaaaaccacattaaatctcataagtaaaggaaaaagaaattaatgatatttaagtaatattggaagagtagaataggattggattggaaaaattcatcatgttattatatattaaagcgatattggaaaacgcaaataatcctccttgctagtatataatactagacaattaccttttttcaatggtgtaagaagaaaaaaaaattaattaccacagcattgtatttaactagtatttcttttaatttgttgttgttactagataatcaaggcactgattgatgagaattagtaagaatccagaggaattagaaacaaagatcaccttccgccattatacgagtgctcagagggtgagtgccagtggcattgtttaagcaagtaatttatgccgtttatcttaaccgatccagcatcaccaacccatacaaccttgcataagtaacatacattatacatattatgtttatgatgagaatatcgatatatatatatatacatagaataaactattatggtatagtttattatggcatagtatttggcaaaaataaataataaagatcaagtactttaattaattataccaaaccaaattgcccattaaaaataaatataaaagaaaatgaggaattaatttaaatttaatttctcacggcaatatcgtggcctctgttcctaatagtggcattagcaggtttgtagttcatctgtagttttccaaatttgggaaggactttaactctaagattcaatagatcaataggagattgcaacttcccatgcttacatgccctccattcttcctttaaatctccccaatgttgtggccctttctcactcccatccacataatcaaactcactctcatcctctgcatttatatgtcaatatatatatgtatatatataaaaaccatatcaatagtcagtacatactactatctatgaaatcaaatattgttgagattaagattatgtataattaccaacttcttgagctgagacttgtttttggtgcaagtagaaggaaattactattaagagaacccaagaaacgaagatgggtttgcttatcatttgattatttaacatgattataagaaacacacaccataagctaaatatatataaaaggtttactgccattgtttgttttgtgttgcaccaaagctcatgaccatctagccttttatataaataattcgtttccgtttctttaggtcaatgcta

SEQ ID NO: 221622 - DNA, 1276 bp, Cannabis indica
ctcataaaccaagaattcagttatataggcacactttatataaaatagatatcaatgttaattgttatttcatatttatcaattaataggtataatccaaataaatcagagaataaaatatagaagaatactaaatattatttgtattaatcttaattatcccaacaagttatctaatttcatactttaataaaacttatgaaagagaatattttattaaccttaagtaaacacgttatgctatgtcataaggtactaacattttaaaacatgtcatattagtatacatatacaatatcaaattaaattaaaatatatgagattcgatttttactttcactgaaagcgttatgccatgtcctaaggtgttacactctaaagtgcctttgagtggtgctttggttaaaatatgtactaacccaatctgtttcaagctcaaatgctactatgagtttggacggttgttgtgctactgggtctagggacgagtgatctaaatgaaacaggtggtgcagtggtcgagttttcataaagctttttggctggttacttttctccttataccgctgagttatatgcttgtttagaagcgacttaaatagtgttatactaatggcttgaagattgattacatgagagccattatcttaatgcaattcatgttactaagggaggaggttcgagtgaagatggtgatatccaacatttttttttgttatgtataatgttagtttttgttattttatttttcgagagagaaatattgtagctcataattagctgaactttgttttagagaggattttgatggtctctctgagaatgttattatgaatattgtattacttattggtgaggcaatctaattataataaaattgaggttttttcaaaaaatatatatgtaccaaaatattgttggactaataattaattatggcacattatttttttacacaaagtattggaaaaatctcaagtaaaccctccaaaaatggatgtactactggtacctgtttagagaatagtttttttagtttgatttctttatttttgttatttacatttatatatgttgtagctatatatatatttaaatacaatgatcactttgtagttatatttaagagcaattataaaattttgagtaatttgtaggttaaatattttattagacattttaactatttgtttatgtgcgtgataattaaatactgtttgaacatgtaaagatgaaatactaaagggtgcattttttaatgggtattacccgatga

SEQ ID NO: 221623 - DNA, 2405 bp, Cannabis indica
  modified_base (32)..(32): a, c, t, g, unknown or other
agagagagagagaagagagagagacagtgggngggggggttctgtttgtatttttaggttagggaaaagttcattatatattaggattttagttagtttaatgagccttatttttggattatttttcatttattatttaattgtgttggtttaaaataaacgatgcattaggtttgttataaacctcaacacaaattttaaaaatgttagttataaattgatgtaaagtatatcatcgatcagtgtggtttttgcatcaattttgagttgatcaatgtaaaaagtagtatatattgtcactggtagctgttgtactcaactaatttggcttaacaaaatgctcactgattatggatacccacaacaaacattgaccatcttttgtgacagtataagtgtcataaacatctctaaaaacacagttcaacactctcgaataaaacatatcaacatcaggtattatttcattcgtgatctagttgagtcaaatatgttgtcaatatctcatgtgctcacaactaaccaacgggtagatttattcactaaagctttagatactcaaactttcactcatttaagaacatgcattggtctttgtaccatctaaactgttctcagttgcatctggttacatttttttctaactctgagtaaagtagtttcaaattcatgacacaagcatactttttttgttcactactatcacctactccctagttttatattgtacaaaattgagcttgtgtcttctctagataaaaaggctacctccttcagatgtaatgggaagagctcttttaaaccatatattaataagtagtaggatccttctatattagtacttgtggcctaaagaatacggctacatctctgaaagagagtgaaagccatgtctgggtactatagaaaaaatctagagagtgtcataggtaaaaggcataaaacaaaaacaaaaaataacaacaaaaatatttgtttgacggagtggtctagaagatctttctcttcctgcaccccatgaggacactttacacacatttatgaagatactggctcttgtgtggttattctcattagagtttggtaagcttatgtgttacgaaaatttgtttgctaatgttgtgcatttcttattcttgctcagtggtttaattcacttcattgatcagatgttaactgtcctgttatcactgtaagagattgagtatctctaggcttctaattttttttatctctgttggtaaggtatgggaaattgttaaattttgttggcatatttgtagtcattagatcttcatgatctcattaactcatgtcaatatatatgtttcgatatatgtgccaaaacttacggtgaaaacaattctatttgagcgtgtatatttcattttgcaaagtatagttcaaaaaaaaaaaaaaaaatcatcattgctttttatctttgcatggttaaatattgtcagggtatccactacttaaagccaaaggagagtgaatcgttttctcactttactcttttctccaacaaaccctaaagtctgaagctctcaatacattttgtccatccaaaagactctctttctcagtctataatggagaatgttgtttccatgtcgatctccactgatgccatcaaccttccaacatctgtatctcttgtcgcatcagaagtcgtgactagtccagctgaagaagtgttcaccgacacccatccatgttcagctattgtcccttctcagtatacgatcaatgatcctcctagctccccaaggtctacatcccctccgtcttctatgtcgccaccggtcagccaaaagcctcgaacctttcaaggtaaggctcctcctctttcaaaaaaggcttctacttcttcttctctcactaagtcaatttcaaaaagagtcactcgttccacctcgagctcaaagtttcttgtgtcaccagtcaagcctgcttgtctgcctaaatctaagttgataggaccacctcatcctccttctaaggtttcatacctctccaaagcaaagaaaaaggtcagtcaaaaactaatgcttcaaaaagaaaatcatctagtgatcccacttatcaaccatctcccaaaaagaccaagcccaaatctattcctgtcccatcttaaaagcccctagtggtccgtggtcctcgacgacatcgacggcaactgggtggtcctgagattgggtaatatcaggagagaaagagatgatggctgatagagagagagagaggggggatcgagattacctgggtcagtggtcctcggcaacgataacgcctggctcggtggtcctgggcgccgacagatgatggtggtcttgggctggctacctacataatcgagagagagagagaaagagaagagggtatttgcaaaaatgaaaaagaaa

SEQ ID NO: 221624 - DNA, 1202 bp, Cannabis indica
aggaagaagtttctatattgtttgcacccacataacaactcaccacaatctcttttatctctcaaacacatggatgttgtcttctttcatactgacaactcacgttaatatacacatgatggtggtgccaattataaataaatcaaaaatgaggactcttaaatcatatttaataaatatatattttaaagttataattaatattcaagtttgctttgccataattaatattcaagcttgcttagagttgagtgtaagtagaaaaaaaaattgttaaaaagcaaatatactttgtttttgtaagaatttttcgggattaaattctcctaactatcattttaattgcacttaaccttctaaatttaaattttatcggtaaaactcaccaacctctacttctattgataaactaaatgtgttatctataagagtgattatgtgccaacatgaattatctcacatgtaaacaaatatacatgtgtcgcgttcatattggttcatataattatctatatttaaatatcaataaaaaaaataaaaaaaaaataattaaatgaaaaaaataactaaaattattaaaattattaaaaaatatatgtatatacatcagtcctgtaaatattatctctgcacaagattatcaaaaaaaaaaatctctcccctaaattattttatattttcttcttcttttgctttttcttcatcatcttctttacttcttgtaggcggtggtcgaatctggaaagagatcggtcgaatctgggtaggggttgaacaaatctaggatgagttcggttggatctgggttgagatcggtcagatctgggctaggctccttcaaacttgcttcgtcttggctcaatggtgtaaacaacatggtgcttcgtgtgtgggtaggttctaatgagtgagttggcaaaataacctttatgaaaactttcattagtaaaatgactttttaaatattttaattagcaaaatagctttcttttaaaattgacataataattaatataataaataaaattaatattgatttttctttatcattaaaaaaatatacttggttggactcccatgagctctcttcatcttcaattgaattctttattaccatctgagtttttatcttcatcttcctaccactactcaagtatttcttcttcaatggtattcattcacatttgacctaaaaaattcaa

SEQ ID NO: 221625 - DNA, 3620 bp, Cannabis indica
agtatatgattagtattatagagtaatctaatggtttctttgattttcgaaaataaaaaaaaaaaatatatattttccgcattttaaaatgcttacattgaagcgtagattacaataatattttttctaggctcaattgagtaacaacatgaccataaattctttttaaaatttaaagataagagagagaaagagagaaagagaaaaagataaagagaggggaagatggtaaggataaactggatctatctatgcttaattccacatgctgtacaaataaataaaaataaataagtaaacaaaagggaaaaaggaaagtaggtgaaccctagcaaaaaactgccctagatcctcctagaaacaacatggccactgatgccttcgggcttggacacccttctgctctgtgaggcagagttgtgcaaaataataggcctaacactcaagtgcaaaggcctaccattaaggggatagaaaaactaccctagtgattcaattaatcaggacgacgaggtagaagagatctcccctaaagacaattggtccactgttgacctctttagtggctcaacactaagcgagaaaaagccaagcgagaaaaggcaagaccttgtgaaaacgatctccaagaccacatcaatgatcagatccatgggtttgagtttctggataatgacaccaaatgattggaagagaagataacctccctaagaaaagcttgtgtggaattagagtggagctatatcttagtcagaagatgaagatctgaaaccctgcgttagacaaatcatagtagctctgttaccagaatattttaaaatgccccagatgaagtgttacgagggtaggatggaccctagggcccatctatccaagtacaactatttaatgcaagtggggagagttagtgatgatgtcaagtgcttgtgtttctcgctaacattaacccaatctaccgagaatttgtggaaaaggcttccttcaagatcagtctatggctcgaaggagttgtaatcaatcttttagaagtagctcattgttacaagggattatgaaatggaggttagatcccgaaccagcctaaacaacaagcaggcaagagtctaaaaaactttattcaaagaatgatggaggcaacaaccaaaaccaatgttagcaatgacatgaaactcatttccctccagtctgggttgaccgtaggctccttcccgtggagcaaaatacaaataaaaacggtctagacactatccaagtttatgtccaaggcccaatgaatcattaacctagaagacgcatatgttcaggcctttggagtcgcttcggcacctactccaccaaccactaatctgacttatactttgcaaaattcaatttcgacagtcacacttctcaaaatctagtacacaattcccactttctatagacccatttcctccaggcacacgcctacacagactaatttctctaggtttggagccatacagattggatgtagtgtcactcccagataagcaaagcaacaaacaaaagttataaaatcgaatatgagccattactataacaaaataagtgggaaaagaaaaaactcaagtgaggctccaaagaaaggaaggatcagtatgagcaaaaatacactgaatacaccataatgattgacactcaagaaaatgtctataaggcgacatgcaacgtggttcattacaagaagcctcccaggatgtataatggagggaagtagaaaagggaacaaagaaaaagatgtgagtaccatgaggaggtgggtcataccaccaacgagtgtgaccatctgaaggatgataaagaaacattggccagagtaggacacctcggccagtgggtggagattcccatcatctatcccagacagggtatcgcacatggacaacttgtctttctcggatagcaaggagccataaatcctccctagggagtaggtttccctcaagctcccaaaatacgacctccaactttacctgctccgccacctgttgatggctacatctcaactatctccagagggccacacatcattgaagcactcacaatgcataggaaagatatttgaacgagttagatcacgtgggggaagcatgtgtcttagtacagtccctagcctagtatcctcgaaggatggaccttcccatcactttcatagaataggataacagccaagtaaaatttcctaatattgatctgctagtcattgaagctcagatcacaaataagaggatgcccagagtacttgtagacaacaaaagctctgtcaaaatattgttcaaactcaccttccaagtgattgggttgactgaagctaacttgatgtcttgcctaattcaacttcaaggctttaatcgtgattccctaattccaatggggaaaatccaactcccaatcactctaaatgggggtgcagccagaagttccagtgccttcgcatttaaacattgtacatttgcagtggtagactgcccaactacctataatgctatcctacgatgccttgtattagtcaatttcagagcaattacttccattaggtagttttgcatgaagtttcgatgtgataatggaagtgtgggagtagttaaaggcaattataagagcattaagaaatattacaatgtctctgccaaattggtatatatggttagagaagaagttgaagagttgtaacaccctaacgcccaacttagacaagaagtgatccaggaggaacatgagttggttctccgagtaggggtagcaagaatgatcaaaccatggaggatgtttaggaagtcagcatcagcgaaatcggatcccaccaaagtcatcaaggtgggaagaaacttatctcagtggtgagagaaaaattatttccacaatgagaaagaatcaagaaatactggcgtggagccttgcatatatgactagaatcagactaaagaacattttccatgccttgaatattgatgaaaatgtgacgtcaattcgtaaaaaaggccattagatctggtacgtctgaagcgcaaaaagtggaggtcgataagttgacatcgatagacttcctttaagaagctttgtatcccgtctgattggcaaacccagtgctagtcccaaagccaaatacaacttagagaatgtgtatcgactttacggatctcaacaaagcttatcaaaaagactatttaccccaaccacgaatccaccaaatggtggatgccaaaatccaggtatgaattattgagtttcatggatatgtattctagttatagctagattaagatgcatgtagcaaaccaagagcaccctagcttcaaaattgacaaaagagtgtactattatgtcatcttgccctttgggctaaagaatgtcatagtaacttactaaaggttggtcagtaagatgttcaaagatgttctaggaaagaacatggaggaaaatgtggatggtatgttggtaaaatctgatactttaagagaacacaatgatgacctagaagaagcgtttgccatcattcagaagtacaaaatgaagctcaatcataggaagtgcaactttagagctagccatttttttatttatttattttttaatgaatcaatatttatacaatatat

SEQ ID NO: 221626 - DNA, 2371 bp, Cannabis indica
ttgtttttttttttttttaataaaaaaattgattataaactttcaattataaattttttatatatgtataatagaaaaaaaaaaaaataaaaggtctttttctaaaaaagaatgaaattagaccttagaaaaataagagcagtcttgtataatggcctaatttgtacaatacttcagttggctccgactcctctatcttttaaaaatattgtttgaaagaacattgttattgagcattagtggtgtccaataaaaaagtggcgcttcacaattagttaagtattaaaagttattttttaaaattatatggaactcgatatttaattacatcaagaaagatattaggtatatcaatagtattttttaacaattctctttaaaatataattcacatagataattcttttatatctattttagtgacaaaattttagaattatatattgaatttttaaaaatactaaagtgatgatgagaatttaaaaggattcactatttttaaattaaataaagacacactcaaattgtacatatttcttatacacaataatatataattaatttaactacataattaaaagtgataaatgatcctacttaaaaatacaaataattaatatttttttttctgaaaagacaaataactaatatttaatacaccatgcaataagtatgtgtaaatatattaacattaataatctttaaaattttagcaaacttttaccattcaaaaaaaaaaaaaaaataagacaaactttaaattagtaatgaatgagcgtgtactgtacatgaaatcaaatgtagataacataccaatccaactttaaattagaatcaattccaatttcattactttccaaaaagaccactgattaatttgccacatgctgtaaaaccgtaaataaatttccttttcatatcaataaatactatcagcattttttggcagtatattttcaaattattaaattaaataaactgcattcaaaattcaaacttttaataaattctatataactaatcttcctcctgttataaatgttatgtatatatgtatgtatatatgtatacactataaaaaataagtcataatatatattttttttaattaaatgactttattaatcacaataaaaaaatatttatgattaaaacataatatatagatataaattattattataatttagttttagtcataataagtattgtaattaaaaatacatttagtcacaataaattataatttatgtgactaataactttaaccagagattttttaattacaatgtctattttgccagcatatttttgtgttggtaaaagtttggtattgtgctggtaaaattgaatttatttttgattgtattagaactttgaccaacacaaaatgaaaaacgctggtaaaaatgactttttcgatcgcgtaaatgtgctggtaaaagttagattttagcccctgcaaatgtgcgctggtaaaactttgatatttttgtcagcgcagtttgtaaaatgcgctggtaaaagtaacttttaccagcacaatagcgaactgtgctgatattttttggttacataagaattattatttataattagtcatgacttttttatttttatcataaattttattatgattaaaagtaatagtcatataagtaaaaaaaatcactagaaaaagaaaaaaaacatttatgttaacaacgagtcacgtcaataaactattgccttatttttattaaaaaaaaaaactattgccttattttgtttttatatatattacacaaggtagacaaagaaattaataaattagttgatatataactgattaatgatattatatatgcatatgttcaaaaaaaaatgatattatatatacatgtcttttctttagttctgaaacctaaatatcaattttactacatcaaacagtacttctggatctcaatctcagctatgcgaggatcttttcgtgtactattatattacaacgtgtaacttaataaacttgtaaaagtacgtaccaatatatactttcaccaagtctactttcagtcaactttactagtcatcgatcctattagaatattttctaaggaaaaaaataaaaaaaagcttactaatgcaaattaagggtgtgtttggtgaaaattttgtttgtgtaattttttataactacaaaaaaacaatatactttttgttttctgtttgatagttgattttgtttttatttctaagttaaataaaacaaaaatatgtttcgtaattttttatttatagtataagaaaaagtaaggtgagagaaaaaaaaaacaaataacatatataagttataatttgatagagagaaaactactagctagcacgagtg

SEQ ID NO: 221627 - DNA, 3121 bp, Cannabis indica
attagcagatcgtttaacatgagagatctgtagctcgtgggaaaaaggatactaaatagtttacatcatttaagagagcatgaaaagcagaattacaagtagaaacagactttaaatcctcgaacaaccaataatgaatctgtttcaacttgattaacggataaaccaatactgagtagccaacgtagagcataagtcaaagcagtggcttccatctcctctaggtttgtagcgtgcctgtgaaagatttagagaaagcagctattataccccctgcagaactccctcaaaacagccaccgacgtacctaatttttacagtgggctttgtcataggctgcatcagtattaagcttatattgccctgctgggggtgcgtatccacggatcagtaattgatgttgctggtgcatgagttacaggagtagcagttggagcagtagcagaggaaacaatcgaaggagtagcatggatagattgatatttatcaagataggctgtagcaaatgctaaaattgcagcaggagatttaggcaatttaccatgatattcagcattgcgttcaaaccagatgctccaacaaagtgttaaaaactgctcaaattcaaaagttgaagtgtgagctgaggcatatagcaagaattcctcagttgtagacatagcaggcagtttaaaatccagtgttagatgagagaggcgccaaacctccttggccctggtacagagaaagagggcatgtgtgatagtttctctttgcatatgacacaaaggacagtaaggggtagcagcaatgtgttttcgatgtagttcggaagctacaggcaaggcattatgaaacactttccacacaaaaatacgaagcttagagggtaacttaagcttccaaaaattagtccaccaattgtcatatgtgtttgtacttccagtatcttgagaatccgcaaaggaagtagcaaaataatagcctgacttaacagtgtagttacccgagttggtaccattccaaattagagcatcatctgtgggaaataagctaagaggaatggagagaattctgtctacatcagcttggccaaaattagcattaacagcagtaagatcccactgacgatgccgatcgatcaaatcagcaacaagaagtgagttatccgatccaataaaactaaatggagtgaaatcagtatgtccagggagccaaggatccattttacaattgatggttgaaccagaacccaccctccatcgaagtcctttgacaagtagctctttaccccaaactatacttcgccaagttaaagaaggacatgcacccaaaccagcagtgagaaatttcccatttagaaaatatctgtgatacaatatccgactaagaagggaattaggtgattccaatagacgccatgcttgtttagctaagagagcttggttgaaatcaatgaaattccggaagcctagcccaccatgaaccttagccttacaaagtgagttccaatttttccaatgaattgaattaccagatgatgtcgatccccaccagaaattagccatcatactttcaatttgatgacacagagtgactggcaaacgaaagcagctcatagcatatgtaggaatagcttgcaccacagctttcaagagaacttctttgccaccagccgaaaataattgttccttccagctattcaacaacttccaaattttatcagttattccactaaagagctttgtcttatcacgcccagaaaaagatggtagaccaaggtactcttcatggcaaggctgaataggcatgttgagaagctgttggaagtaattctgattttgaagtcgtgtattgggagaaaaaagagagcacacatttatctggattaattgcctgaccacttgctcgatgatagatatccaaacacctgctatataaaacgggctgattggggattagctcgacaaaagagaacactatcatcagcaaaaaaatagatgtgatactgatggagcagttctcgacactctcaacccgtgaagagatccattgttttctttagattgcagcaaccgtgagagtccttcagcacaaattagaaataggtatggcgagagaggatccccctgccttattcctctagatggcttcaaatctccaagaactttaccattcaagaggaaagaataggaaacagattgtaggcagcgaaaaataaggttgacaataatggttccaaaacccattttcaacatgatctgagcaatataagtccattccactcgatcaaacgctttggacatgtctaacttgattgcagcatacccttgtgacccccgttttcgattcttcagcgagtgcaacaactcaaaagcaatgagaacattatcagttatcaatcgttgagacatgaaggcactttgatattcagagatcaccaatggcaaaaaaggctgtagtcgcagcactatcgacttagaaaccaatttatagagtacgttgcacaagctaatcggtcgatactgagttatgaactgtggcttcttaaccttgggaataagagtgattattgtgctattgaggagagtaggatcagcaccattattgagaacctccaacaccgattccgtgaccaaagaccccacaatattccaatagttggtgaagaacatgactgacataccatccattccagggctcttatcatcactcattgagtggagagcattatgaacttcagttgctgtaaaaggcccaaaaatgatatctcttgcattctcatcaagcattgttggaacaacttctaatattgagtttatggcatgatcatcaacttgctggctggtaaaaatggattgataataatctgaaattatagtcatcaaagccgattcactggtttgtgtatttcctgcagcatctttaattttttgattcgattgttggatgatcttgcattagcacgttgatggaagaactttgtattggaatcacctgatttcatccatgatatacgcgctctttgatgccaataatcctcttccttagctaacaaatcatcgagtatctactctgaacttttaagtgctgcaaaatgctcaggagctgtgcttgatgcattctggagtgctgcaacatg

SEQ ID NO: 221628 - DNA, 2631 bp, Cannabis indica
actttggttcatactcttttcttgctttcttcatagtttgacttcagatttggccttttccccttctcttgttctgagaatgacttacgttttatttcaaaacttccactttcaactatctaggagtgatactacatccggtttgtgccgctccatacataaaaaaaaaataggtttgtgtaggttcctacatgaatgttgatggtccatagactgtcagagtgtactgcattctgggataggaacttgtgaggcaattttagaagcaaaagcagtaggggttggtatcggagggaatccgaacgcttagtgataggcatcttccatattgataaaaccttgggcccttgccacaaactcggataatgtttcctcccttcttctatgcatttctccccatagtagggagccaactacaagtcaatattgcaggcccacaagttcatatcattagtcacctttgtcttagctaccgcctccatcatccgttgaatgaagttcttcaggctttcccctacttgatgcttgaccttagtgatggatcccatttccatgtcgtagacacaggaagctataaattgttttcggaaggcgaactacaaatccttcaaggaatggattgatcagggagccagtcttttccaacaatcctcagcagacttggtgagggtcaaaaagaagcacaagcccttggcatcttcactcactcttaccacttgcatcattttgttacttggctaggtgagtctttggatccgtgcacccatcatacaacttgatttggggaattttgaagttctccgggagtgaagcttctgtggtcctcctgacgcatggctttgggtcctcctcctcaaagtcggtgagggccctactttacttttaaactagcttcattagagcaatgatttgatcctttagccttttgatgtcattgtccatgagatctcatttgcagaccttgtcatttaaatgattcttgaggtcattatcacacgcccttgcctttcattttttgtcttttcatacttggcgtcaagacgccttcggagattactatggacccactgtcatcagaatattgttctttggtcccaccgtcctggtttatataatcactgggcatattttccttcccttgggctttggtactatcacaccagtcccttttggcgcaacaaggcctttctaggtagggcgtctgagtctgaaggcgtcggtggccttctgtgcctgagaaggcatgtttaccgaattcatgtttttttgaggaggtactagagctgtagggttttgagggtcacctactttagcttttcactagtcctgtaaaggagcagaggttccaccgttagcaggttttttcctattatttcctctaacacatttgttatacttgaaattcggctggcactttcgaggatgacacgtgtcaaccttggggaatacgaatcaatgaatataaaggcaattatgctaaaaaaatatattaatggaataactcattaaattcggagttaatagagtatatctataactcgctgactgaatagtcttaagcgagacaaagatgtacaaactattgattcacatattgacgagaaaccattttgcgttagaggacataatcgtaaggatgacatcgataatacatagtgaggcatcaacctcgcaatgtgtagaaaagcgttgacgagacatgtaggctgttagaacacttagcgtataatatacattatcctaagtgtaagagcttgaaatgcatgggtaactaatagcgagacatccatcttgctataagaaggcatactcctggtacctttgctaatcagctccagacatcgtttaatgagttccactactacgtcacgttagctctcttagaaaaaatttgatattcaaatgatgttggctactgaagttcaccttgtcccaagaactgcgattgtcagatggattgttatgtctttaagcacagaaacgacaggatttatgttatcaacctcgaaaagacatgggaaaagctttagctcgcagccagggttattattgctattgagtattcaagtaccaagcgagatgccccaggtgaggtacacattgcagcgtatataaatccacatcagcgttgacccattaaaagcggtttaaatcacaactgaatgattttcaaataataactgcatttatttacgtggagcgtaattaaggcccacaattttgagaaaatattattgtgggattcgtatctgaatgatattaactaccaccctatcacattataaataggggcagaatgtacacaaaaagggatgagaattcttgagagaaaagaaccctagtttgtatcagaaaaatctgaataagattgaatcgtggactgtgcagaatttgttgggctttatgccccaaataaaactctatttcaatgtaatctccatcatttaaatatcaataaagagacagaattattttcatcacttatttaatgtgtcatttagttcatgttatcatttatatgtttatttgatttagaaattcatcccaacccttatcacattaatattcttgtttattgtgtcgttagcacagtggaaagtaatcaagattatgtgattaaatatatattcc

SEQ ID NO: 221629 - DNA, 4874 bp, Cannabis indica
ttaaaatgcatcaataaacaatatattaccttgtgttttgtaccttaacgtatcccttaacattttcgttattaatatatactatatatttattaacttctattagaatttttattttttattatttattagatataatttacaatagcatctttaataaaatatgtaaaaaatgtaccatattttgccaaaaaaaataacttagtgatattttgcattaatttttagtattatacataattgtgaaaattgatttaaaagttatttttttttacgtttttttttgttattgaataattttaaataagtaaacctacactatgtcttgtctaaatataatttctttattcaacaattatttaattataatttataaaagtaaaatgtatgattataacacataactttttttttttatagaaattagctgaggcatgtcctccacacgcctagtttttatatatatatgtgtataaaagatgtgaatatttaatagttgtgccacctgacggtgatgaattggttaattatcggacaaagtaacatgtaaatggagaataggcatattgctttatttcttgtttgtggtggacaaattccaacgtatacgctgtcgccacacacaatatataactctatgtgttatcaaatgacccttccgtagaccgagctacagtcaaatccctgtgatctttatatgcatgtatatacaattaaacaacaagctgattcttcttttcctttgcttttataaatcaagtatgtagattacgcacaaaagcaaatccaatctaacagcacaaaaatatttggcttgattagctcttacaacttatttctatacaaaaatgctatattccttcgttacaatttatcataactcctaatgtttcttttttctaggtaaaataaaagaaattctaactttgatatcttacttaataaatttgattagtattggaaaacaataaactaccttttgtgacaaaaaaatatgataaatatcaatttgtctcttaaaaggagaaagtcttgctcgggaaatgcttctctggctgcattgaattatacctttagatttccagcccatccaatgtgttttttctcatttaaacaaatctcactacagcagtacttaaaaaatgctcaacagtttacccttattcactacacactaaaagaggctatcaaggcatacattaaaccgaaagaacctctcctttatttgaaatctattcttcctagccaagcacaagataaatcgatgtttaggaattaatattaaactgtaattagttaaattagttaatgctttgttattgtgtttgtctttactgttaataagttggtaatctgttatttaactaactaattggttagttaatcctcaccgacttaactcttgtaaactaagtaccataaaagcacttcctctgttttttattcaattgaatttgagaataaaatcaattcttttctctctcgttttctctcttggtttatctcatggtatcagaagacgcaacttcctccatggccagaccatctaccagatcacaagatggaattcttccatcaaatcttgagcatcatcagtccgagactccacctgaagacatccctgcttcgattcctccctcttccgctgcccctagtcgatctacacggcctcgatcgcagcttggtcctgattcttctgctccttctcccgttgcaccagatccctcttccagatccactcacgatcgaggcaccatcgacgacgtttcgagtccctattacctcagttctggcgatcatccaggccttgtattggtctccaccatcctcaatggcactaactaccaatcatggaaaagaggcatcaccatggctcttgctgcaaaaacaagacaaccttcatcaatggatcactgcctcggccagctgctggtaatcatcttaattcttggactcgttgcaataatatggttatgtcttggcttgttaattctgtctctgctgaaattgctcaaagcataatgtactttgatcttgctaccgatatgtggcaagaccttgctgaaagattcaatgaggcaaatggtcctcgcatctttcaattgcaaacacaagtaactcgtttgcatcaaggtgatcagtccgtcacctcctactttactaaactgaaatctctatgggatgaattgaaggagtttcaacctaacacaacctgcacttgtggagctatgaaagcttttcttgaccactataacaaaaaccaagttttacaatttttgactggtttaaatgagtcatttgcatcggttagggctcaaattctacttaatgagcccattcccaatctttcaagagttttctccatggttgttcaagaagaacgtcaaagaaccttaggcaatactgatatcccctcttttgcctcttcggttaagccttcaaatcccaccaatcccccaagaaacaagaaaccaagaccctcatgttccaactatggaaaaccaggtcatttggtcgaaaaatgctacttcttacatgggtttccactggttatggagacaaaaagaagcaagaaaaaggaaaagcagctgctaatcatgctactgccaattccaactctgaagatgcatccaacacttcggcttcagttgatctgtccactcagtgtcagcaactaatctctcttcttcgccaacaacttcaccaacatgctcctcgcacagaccccaacactgtggcagcagcttccaatatggctggtaaccactcttttacattgtttaattcttggataatagatagcagtgcaactcaccacatgtgtttcaacaaagatttatttcaatctttttcacatcatcaatatcccaaattggttacattacctaataataatcacacatcagttcatggcattggaatcattaaaataaactctgccatcactttacataatgttctttatgtccctcaattccatattaatcttttttctatagttgcctatattgataacacaactaattcagtcttgtttcaacctgaaatttgtgttatccaacagcgctatcagaatcgggtgattgggatagctaaaaaacatggcaacctctttctgctgccacatgaagctcctgtcatggcaaatacaagtcaatcctctgttttttctttacaaaataatgtagatcaatggcacaatcgccttggtcacccatcaatgtacatttccaatgttcttaataaaaagattgactcttttttctctccaaattccaatcaacattgttcaatttgtcatttggctaaacaaaaaagacttccattcatatctaataacaatttttccactaatgtttttgatttaattcatacggatatatggggtccttttcacatcattagtgttgaaggatatagatattttctaaccattgtcgatgacaaatcacgatttacttggacatacatgctcaaaaggaaagccgatgcacctacagttctcatgaatttttatcatctagtttgtacccaattttctactccaatcaaagcaattcgctcgaacaatgccaaagaattaaacttagcctctttctttgcttctaaaggcattatccactatcactcttgtgtggaaagaccacaacaaaattcagtggtagaaaggaaacatcaacacatcttaaacatagctcgggctctatgttttcaatccaatttaccattagtctattggtcctatatcattcaaactgccacctatttactaaataggacaccatcagctcttttcaaaggcttaacatcctatgaaatcctatataataaacctcctcaatatgatcatttgaggacatttggttgcttggcctatggatccacacttgtttcaaaacgacacaaatttactcctcgtagtcgtgcatcccttttcattggttacccatatggtatgaaagcctatactcttttagatatagaaaccaatattatttaccactctagggatgttatctttcatgaaaatatatatatttccttttttttccaaaacaccaaatactgatgttgatttttgctttcctcacactgtgataccttctcacaacacaatatctccacagcaaaataaccacatacctgccacggctataccagcaacaaacatagttgctaaaccatctgctcctattgagcaccatacaaaaatgccttccacgacaaccatcgatatcaacacagttgatacacaacctgcttctactgagcaaaataaaatcatgccttccacggctatatcacctataccagcagtccattcacctgctatatcaactactcataatgagcaaaatcccttactgccttcaatgactaccccagaaatcaccacagttggtacaccaactaagtcacatatacaaatgccttccacggctacaccaatactcaacagagttgacaaagttcctatgacttttgcaccaacccttcaaaagtctgttcaatagaccaaaacaggtcgaataacaaaaaaacatcccacttggatgcatatgtgtgccacaaagcctccacggcacaccctattgaaccttttctttcctacatcaaactcaatcctcaatttcgtgccgctgttctagcagcctactctgaaattgaacctcaaaactatgctgaagcctctcaatttatccattggctcaaggccatggacaccgagactgaagctttggaaaaaaataaaacttggattgtaaccaagttaccacccggccaaaaggccattggatgcaaatgggtatacaaagttaagtataccaaggaaggagctgttgatagattcaaagcacggcttgtcgccaaag

SEQ ID NO: 221630 - DNA, 1755 bp, Cannabis indica
aataagttttcttgctttgagagatgtcatcttgtcccacaacctgaattcacagtaggaatgatcggtaataatttgaataaagaaaaaatctaatggcaattttttgatattcttgacaaaacaaagtgaattcatagataaaactaaaaacaaggaataaaatgcatagtaataataccaattaccataggtgaaatttatgccacaagcaaacttagtgacctaaaggaataagttgggagagaacattaatagattagctactcaagcaaacatgactaggcaatcttctctattatccttttggaaagaatggaggaaaacagttcaaaagcaaaaacaggtctgaagaaaaaatcaaggctgaatgacacaatattattacctggtttctgaatggttgaagaactctctgccgcacaatacaattgggaaataatgccacaggcacaggaggtacctatgtgatagtacttaaaaaatgtaaaacaacccttgaaacatgatccaaataattgttgtgagcgatatcacctatgtcaataacataatctaaacacaagaacaattcgactagtaacaacaaagtattaaacaaagaaatggtaccaaagatcgaagaacaaggaatgaacaatgagacttaatctctttattgaaagaattaaaagtctgagaacaaaaacaatggagtcgagctcctcacataaaacctcagacacatgtgaactccgtatacaaccctccttcccacttttgttctctagactaacaactcagaaatgggtattatttttcttttttttttgaaaggttaaatttaaattagtatttcaataataagctgacccacaatgaatcctactcgaaaccatgaggttaaacgtgaccacaaagatcacatgttaaacctactcttctactcgaaaccatgatttggaacactaacactgccaaaagagtgattgaaacgctttcctctttcctctttcagttttcttatctcctctgccacaatacactgaagaagaagaagaagaagaagaagaagaagaagaagaagaagaagaagaagagtaaaattagggcagaacaaaagaaagttgaagaaggagaattagttaagcgattttcatgtacctgttgggactggtggggtagtagtggtaatggcagagtgtgaaatcggagctttggcagaaggaaacgaggtggctagggattctgattgatagaatgaaatccgagatttgatgaggccgagtgattgagaggggattggaagatcagctcccagtaagagcgacgccatggctggagctctgagctgtagagtagataagatattggaggaggatgggacgaggaggacagagcggaggaggaggcttaggatcaaggttgaagacaaagtggaatgaggtttagggatttggaagttgtttcttaagttcattaaccttaggccttttatttctcgttacttttaaaagctcacacatgttttactcgatatttttgaaccgacaagaataaggtctccacttttaattttccgttgctttatttttcttcagttttctttgtagtgtcatttatcaaatgacgctaattcatattttttaacgtcgttttataactgtcagatttatttttagacactattcacgtcggtcaaccctgtgaacagtagcgttgaccgacgcaaaaactagtttttgtagtagtgacttatccaaggtgtaagtaaac

SEQ ID NO: 221631 - DNA, 1432 bp, Cannabis indica
tgactaaatagtcacaacaaaaacaaaaaattacttgtgactaaaatatagtattttaatacaatataacgcgttttagatcgtggcctatactacaagccacaatctaataaaacgcgttatattagagtaagggaaaacacgttatttgaaaatttttaaatttgaactaattgcgacagttaaaacttgtggcctatactataggctaccatttaaaatcgtggcctgtagtataggctataggccactgtttttaactgtcagtatttctcctttaaaaaaattgcaattgttaaggcacgcttaaaaatcattaaaaataacactataggcgatagttttaaatcgtggcctatactttaggccacggtttaaaaacgttgcccatagtttttaactgtcagcaattctcctttaaaaaattgcaattttgaagccacacttaaaaactatcggcaatacagcacgagttttttaaaatcatcgggaatacccaattttcctaatggttttaaacactcacttaatttttttagcagcggtccccaaaaaaagtattttaagaccgtcgagaatagtaatttttgtagtagtgttcgtatattagtttctttttcttaatttacaactaatacaagaaaagcaacactaaaataatttaaatagcatcatacataggacaaaaaataaattatatatatgaaaaaaaaaatcaaatgaaggactaaatcatcttaaataattattatattaattaaataattaaaaatattttaggtatgtaattacactcaattctcatggggtatgagaattggagagagtaattgaggcctcccaattatctctatgtaattgtgtggccacacaaacaggtcaaactgtgtaattacctcaagaatagggtatggcaaaaagttaaaagatagaagagatctatattttcagttgcaggtaaagaggtaatcattaaagctattcttcaggccatacctacatatactatgagttgtttttgattatcaaagaatactgtaaagagtctccatcgaatggctgcaagattttggtggagatcatcggagcagaagaagaaaattcattggtgcaaatggtcttacgtatgtaaactgaaggataaaggagagttggaatttagagatttgagcatgttcaatcaagctcttcttgcaaaacaaatatggaggtgtatctgttttccttattctctatgcattaaggttttaaaggcatactattaccccaataaaaatattttggctgccaagtgtggcagtaatgatctttttatgtggtagagcttggtttggggcaaaaatattatcttgagaggttatcaatagagaattggtagtggtaatgtagtgaggtgtaacgtccccgcttcaagccttcattgggcccttac

SEQ ID NO: 221632 - DNA, 4730 bp, Cannabis indica
attttttttagttaaaaaaataatattttatttgcatgcatattttggcatcaagaaatagcatcagttaagtctgtgactaatagttccatgcatccccgagtaaatatgagacaacttgaaaattcacaattaaaaatatttttattttttaaagaatggaattttattaatcaatcaaacttcatgccattacaatggataaaatatcgtgtccctatatattaattatgtgtgtaatacaactcgtacaatatatgtttataaaaatgtaaaaattaatggacttagacacgtacaataaataaattatatatgtccaaaaaatttaaacaaataaaagatgtagagatatgtatatgtagattcactttgagtcagtactttactgctacaaccagtaaattcaattattgtgtcattttcattacagcctttgcatctttttgaaaattaatgatgtgattatttaataatattaatcaatataattattaatagcatgacaaatatgaaagccaagccagccaactcccaaagctggaaaagataagtatgacacagatgcatgcatgcatgcatgcatgactccaacgctggataaagataaaagtactacacaacaactaatactacagttaaagtatgtctccctctttctctgaatataatccaaataataataacctctactatatagcctctatcaatctcaaaagtaagacccatatagctaggcttataacgtttactatcttgaagtgggggctctaacccaaaaaaacatgcatgcatgcactgtcctcatcttaactcaaattacattgggatactacacacacaggtgtgcaacaccatactgtgccgtgttataaataattagcaatttattaaatcaaaatgtataatactcgatcaatattgaattatacactatggttaatttttaattattgaaaccaaaatacatcaaataagcctctaatacacattcattgcctatatatattaggcctagctatagcttcactaaggctttgagaatgtgttagtgtattcattccatgttataacagacttttactataccattgcgtttaggtatcaaaacgacacccatcaaccgtgaccatcatattccttcttcttgtctccaaatacaaagacaaaaacatccgccaattcattgggaaccaaaccaaaccaaaccaagttgtgtttattcaaatatttgtcattcattcaatcattcattcttgcaatgagtcacactttcttataccattactgcaaaaacaacatgggaaattgactatttgaccaacttgttcttatttaatgtttctcttgtcttcttacaagtggggtcacccctagacttatttaaaccccattttggggtagttgggggagattgtattgtatgtctctaaaactctaatagcataaacagatgaatagtactaacatatagagctggcaatgacttttgactttggaatatgatcttcatacaaatcagagaagtacaatagacactcctttaatacccttttttttctctcttttttccattatagagtatgtacgaaaaagaattagtatccctttcgagtaacaatgaagctgacttgaaaataagcaaattaaaaaaacagtctcaatgcactttcatactcttgctgatgtgcaactattagctataacgcttactcattttcttttttctttcttttttctgagtatgtacaatgactgtagagtgggggagaaaaaaaggagaaaaaacaacccaatgagtaatgcttcatgtcccacaaagaagaggaaaggaaaaaacagaaagaactaaggaaatttcaagatatgtagatggttggacaagaaggtattgggatattttctactgaggtgatggaaatcgatgatgtagaaaggtgggggtgataatacagttctcattactcgactatctttgggcctgtgtacggtgctccacggacggctaagccttcaggtaaaatcctctcttgcagccatgcgtaattttccttctgctcttcttccccttctggcaactttactccttcaactgaattacaatgcaaaatcgatggatgagagttaggacaacacttttctccctacacttttgagccttcagtgtaaaaagatttacctgaaaactctgaaaatgggaaatcatggtagtacgtgcagtgtcggccatcagggtcggaatatgggggaccgagtacgtctagcacagcacacgcagtcactgctgtgaagcgatgcatgttgcctccatcggctggatagagaatggaagcgttgcaaggggcggtgaagtcggagtcaaccttgatttttgccaaccgggcattaggagtggtgtctgcataacaaaccagagtacgttcagccaacattttaccttttcttttttcttcttttcggcaaacatatagaaaggacatcatcgaaaattcggacaaaaacaatattattttcagcagatgacttgtgctatcgtgtatatctatattcaacactttagctcaatgctcaaatcacaagttccgaagtttaaacactgaaaacttacagtttataaaaagaaatgatgaaacaagtatgcttatttcacttatttaaactacttaacataagctaaaaagggatacagaagaagtctccaagcatgtacaacaacttatgaaacacctacattccatcaacaatttgaaaagatgacagcaatatatgattaagttaccaggtgcagaatccccattggccaccgccgatgtgttactaggaccatcatccacccagtcgtacgatttgatgtgcattgtcccaaataagagcttgctaaaaactgtcattccagggtgattgtggagaggaatgacacccgatggcggcaagcaaaatatccccatctgcaataggagaacaataaaataagaggatatacatgaacaaacataagaaacaactgagtatattctttattccatagtgatttcccatgaataggattcacttacagagaagttttcgcactcatagaggtgaaggtaagtaattgctggtgttctgcttcttaacaagggattgaaataaagcaactctggagtcaggccaacatcctcaggtttcatatcatctgccataatagttaaacttataagcataaagctcaaacaagcttttcataaatttgttcaccattggatagctacaccaaaaaaccaaaagggaaaacagaaaatgaagcctaatctgaatgcccaagcgaaacagagttcataccccttccccctatgaaatgagagtagtgatataaaaaacagttatatattgtgtttattgtgcacatccacaaaatatcaattaaaaatctttgttttgttattcataagcatatatctctattaaaaaattggttaaggatagtgtacgagaaaacagacacacacacacaaaacaaggtatttttttaatcagaacagccaggtacctaggatatcacatacaatatgctatgtatatagcctacaaaacataaaagaatatataaatgcattgaatcatattaagagagccagagatatattaaaaaagaaaaggtttacgctacaagaccataagaaagagaatccgaattgaaataaagtgaataatcacaacagtgtaaagatgaaaccaaaatttgagctggagataaatcaatactactaatcaagaattatggtcccaatcaaaatctgtaaccacaaaaagtaaaaccctcaatctaaagcatcaattttttatggaaagatcaaatcccaagacaaaacccacattgacaaaaatattcacagtttcttaaattttctgtggaaagcttaatttaagattttgaatggaagaaatgggtgagtaaagcatacccaaaacagaacgaaggcgttgaatatcttcagaaggaggaacaatcccagttgaagcagaggcaaaaacttccttgcaagtctcgaatagcttctgaaccggcgacatcttcttctgtctccgccggctcttcctggttttgttatttgaattcgtcactttcggcaattcacaaaagtcctttcctttccgatcagccagagccgtctcaatccccattcacactcaaaattccagctttaattactttgtttctctgttctttccttaattaattaaaatgaagaaaaaacccaatacaaaattaacgatctcaggtattgaccccctaaaaataacaaaaacccaggattttcccgagaaaattacgattggtgggtggggcaactagaaaacgaacaaaaatttcaaattcctatctggggtacgaaacaaaagctcgaaacaacccggtaatagccaggggaagaaaaatatagagagagaaaggttgagtatatagagagttagagagataaggggggtaccgttttctagaagggttttgtacagatgtagaagagatagtaaaaagaagacaaagatgtgaaatttggtatctctgttgatgatggtgggtgaggattgtgagaagggggtataaagggggacaaatacaagacctagggttagctgaaagcaaaatacagttggtttttcgggagagaaaaccaggggccatgcttccctttccagtgggctattccaacagcggattttcctctcaataaatctctctctctctc

SEQ ID NO: 221633 - DNA, 2357 bp, Cannabis indica
gaagcaaggccaaccaccgtcactttgcaactagcggattgttccatggctcatccagatggtaaaattgaagatgtcctagtaaatgttgataagttcatcttcctaatggatttcattattcttgactatgaggaagataggaaagttccaatcattttagggaggccattttttgctacgggaaggactttgataaatgttgaaaaaggagagctcaccataagagctcaagatgagcaagccacattcaaggtctttcatcccatgcatactctggatgcaataggagaatgcttagcaattggagatatggatcctaacatgattgaggagttcaaattcaaaaatagtaagaaggggagaaagaagatttcccttaaagaaatttctaaggatcacaagccacgagaaagcaaaggcaaagcatcatttaaccttaaaaaactacccaaaaagaagagaaaggaaaataagtttagtagaaaaattcggtctcaaatgtttgaagttgggcaacaagtgattttttctaactctttaacgaaggctactcatggacgactagattcaaggtgtgatggatctttcttggtgatgtgagtataccccgatggggtggtggaactacgtgatgcactttcaagaagaaaattcttggtgaaaggccagggagtgaagttttggggtggtgaggtcaaccgagaaaagacctccatcactttgaaagaagcttgaagaaggactttgggtttccatggccttaatgtatcatatttgggcaaccagagagcgaaagaagatgattatatcaagtttaatatatattatgtaaccccttgtaaaaagaaaagaaaaaaacataaaaaagaagaaaaaaaaatgtaatatatattcatacttatataattacattatatatacatatctttttgttccctattgttactaatatttttgcaatatctatggtgatttattgcaggtacaaaatagaaaattgcagaaaaagggaatttgttaagtgtggtgaaaagcaggattttatttttagaagcaggaggttctaggatttacagcaaagtgtcaacatcgtttcaggattttgaagcagggactctggtggttaagagtccgaatcttgagggagttttctttttccttagtttaattattattcctggtcgtgtttgcttgtttaattagtttacttttattgttatctctagttgtttgtgtattaaatattgtgtggttagttttgtgttagtcatgttatttggtaatttttattttgtgttaaattgtaactgagaagtatattttatttattttagcttggtttagcgtagcactcaatgacgaaaaaatatccatttccctccatctgtgtatgtcttgatttttgtgagttgcaaatgccaagtttaagtgctattgggtccaaatgctggtctaggagtagttcattcaataaatgtgtacttttactatcccactgtttgttttaaatttttacaatgactaacaccttgagagagtttaagcttctagaattggttggtgtaacccttgaggcaaaatcctagctagttttacaacttagagatgatctaggccatccttggacgattgagcatttcaagctaacccgagcataatcaattgtcaatagtcaccctagttgagccgaattgcctattttttttttctttagcacccatcaaagtttaatatacccccatacacataatttttatcattcataacccaaacttaattgctaaaatgtatcaaggacaaatcaaattattgaggtagggaagtgagaatataaattagtaaaacgtggttaaacaaagttacattagagataatgatgtgatgtgagctgaggtggtgggagttgattcaatgtaaatataaagccctcttttgctatatatatgcataaaaatatagatgctacaactactgtcactgttaaaaaaaatataataataatagtagtagcagtatgtaaatgaaagggagagaaaaaggcaaatttaaatgtaagtttggggtgtaccaccccttactcatgagaacaaagtggcattttctctctttatctagttggtttgataaatatatgtatatatatagcaagagagttggagctggatttagtgatcattgtggtttgagaatgcatttttgggtgagtgcttgagagaaagagaaagagtccttgataaattgagattgttaggttataagccataaaagtattactattcatcctacccgaacctaagcctcacattacaaacctagtaaagtcattttgatctaaggtgtaaagctagactaca

SEQ ID NO: 221634 - DNA, 4175 bp, Cannabis indica
tctttgtgtgtggtggggatttcaggccaccttgcatcctcacatctagggctgaacattttgagcgggttcgatctggacctgggcaacccgcccagacttgacccggtcaacctgtaatttttttaaaaaaataatattcgggcaggtcaggttcaacccgatacctttcgggcgggttcgcgggttaagtttttaggactaccaggtttcggattgaacctgaacccacccgccaacccgcatattctatatattatatatttttttattttttattatatattatatattaattaaaaagtaaaaactaataaactaataaaccctaaacttccctttaccttttactatggatatggatgtattttgaaatattttagttttcacttttatcatgattcaagaacatgaagatgaagtttgatttgataaacaagttgttatattatatatgtttaatttaataaataaaaaaataaaagaaataattatttgaataaaatattaatttttttaaagagttgaccaagttgactgggttaacccgcccaccgaaacccgccaacccgacccctatccgggtctggattcagtttcgtttttttaaacccaaaacccatgaattcaaaactcgcaaacccaaaacctggtaaattcccccgatgttcaaccctacccacaccccaagatacctcctctagggctcaagatatgtaccccgtgttgcacccccacaccccgagactaactttggcctcactatggggccttgagttggggggtcggggtatgaccattttgacttaccatgccctaagatcgcccaaacctcataaacaccccgagctacgcacacacactccgtgacccaagcaactcccatacgaccacgattaccccgacactgggtgttaccccgacattggtgagttggggtacaccccgagtaagctttttgaactgtggccgagattggaggttgggggtgataccccaagaccatcatatgggggttagggtacaccgccctgaagtcaccccgtggtggttgggggttggggtacacaccgagcttgaagcatgccccctttttcttggactgaagttgggtcgatagtgggttaggggtggtaccggagaccaccacttgggggtcggggtactctaccccgaggtcaagagtttatcccgaatgtggataacatgttgtttataaactatctttaatgaggacaatgtgtgagtggcccgaagttggggattacaccacccccgaccaccatgtgggggtcggggtgcattgctccgtgacaacagtagcacgacttcatgggttggagacgttgttgctgtgttttgtcttcaggcaaatcttctaagatgcttcttgattcacaagagtaagatcacttggctgaaaaagggtgatgataatacaacctatttctatgcatgtttaaaaaatagaagggagaaaaatagaattattagtttcattaatgaccaagggcatttggttgatatttagcagatgttgtgaactattttcttgatcatttcaagatctatatggggactgctagctcagccactgatcgaattgactatgaatgtttgtagatgggaaatacacttgatttgaaccagcagcttggcctcattcaactttttacagtaaaggagatcgaatcatccatgttcagcatccttagttccaaaagccctggaccagacgattataactcagagttttttaaggtgttgtggcttgaaattagagggaaagtgagtagagctattctacattttttttttgatacaggtactattcctcatcaatttaatgagacatctattactctagtccctaaagttgacatgccaagcaaagctattggctataagcctatagcttgttgcacaactatttataaatgtattactaagctcatgtgtaaaagattggaaaaagtctattcttctaatgtgagcttgaatcagggagcatttattaagcaaagatcaatttcccataacattcttatattccaagatgtgatcaagaattttgggaggaaaagcttttctcctagatgtgcggtaaaaattgacctcggtaaaacgtatgatatggttgattaggtatttttagaagaactgcttaatggtctgaattttccatctagatttgtttgatgggtcatgatttgtttgaaaggctcttcttattcccttatgattaatagaagactacaaaagagtttcagaggtaagaagggattgaggaaaggggattcattatcccttttactttttgtaatcatcattgattacttcactagaaggctaaatctagaagcttcccagaagtcttttagataccacccactttgcgaatttatgaagttgattaacctttgttttgcaaattaacctcatcttgtttttcaaaggcttggtccaggctgttagtcattaaaaaatggctcttaatgattttatttcaatcttagggcttagttctaataattctaaatctatggtttatttcatggaagtctctaatgaggttaagcatagtattttggaagttctgagatttgaagagtgttccttccgtctcaattatttgggagtcccgttgagaacaaccaaatggaagaaagaggattgtgagcctataatcaggaaaataaagatgaggctacttacttaggctacgaggcaccttttttttgcaggcaaagctcagttgattcactcagtcttactgggtttgcgtaactattagatgaacattttcattcttcctcagagtactatcaaggagattgagaaactttgtgaagaggtttattttggggccttaaaggagttaaaagtaagattcacgtggcttcttgggaaaaggtttgcctccctaaaagttatggaaggatgggttttagagatggagcaaattggaacagagctttacttggcaagtatatctgggctattatgaagaaacatgaccttctttgggtcaagtgggttaatgcaatttatttgaaaggtaaagaattttgggagttcaaactccctcctggtgcaaaatatgtaatctgagaatgaaatttgatgagcaaaacttgctggctactggaaacagatgtaaattcaaggcctcaaaactgtataacagcttattaccgcagcaggtggtcaattataatgaagctatttggagtaggctcactctttccaagcatcgatttattttttgggaaatggttaacaatcaactgcttactcaggataagtttgtgagatttcatgtctatttaaaatctactgtctgcgctatttattacatagaaaacgaaagtcatgagcaattgttttttgcttgtgattttttgaagagattagttaatgctgtttttgaatgactgggatttacagcttggctgactgttactgagggatggatgtcctagattgctaaaaaaaatcgaaccagttcaaaaaaattatgcttggttttttttcagccactgtatataatatttgaaggaatagaattagatgtgtacatgataatttttctttcactgttatgaatgtctttaaggagataaaatatgttactaaatacaaaatgtatagtatacaaaagaaaaaattaggtcataccaaggacaattgctcacttgattagttagttatatgttactaaatatgttgcggcatatatacttaagtttaatttccagttgcaaataacttaagtttactttttagtggtaataatacctaagttatacttttagaactttgtaggtacttaatcattaaatgttaatttattatccacatgttattttcttattagtatatttaaactaatttttttttattaccgccaaaaaataaactaaggtatttatttacaactgaaagttaaacttaaatatttataccacaaattactctatacaaaacgaaaaattgagtcataccaagctaaggacaattgctcacttgattagttaattgtttctgttggttagtgtttaggctggttgtggtagccattggtgtttgtatttggtggtttgataaaatgtgttctttgataaatatatttttaaatgtactcatttttacttttagaaaaataataagtataa

SEQ ID NO: 221635 - DNA, 4812 bp, Cannabis indica
tttttgatgggatgggaggcatacttttatatggatgatgatgcattgtgcaggctcaaaagattgatacttgattttgttttaacttaattgacttacccaagtgatcaattcatatgaattgggttttgtgtgtgcttttgtaactctaaggtcctttgttgcattggactaaatgtttgggattggattggattagattgtccactccccacaatttgttccatgggttaaaatagtgtatttttttaattatgtgttttttttactattgtttaatttctagttcttttatatttatttttatattgtacataaatcttaataataatatatatttttaatttttattaaatgtcttatttcatttatgaatttaaagtattgtttagtagtgtttattttattaaatagtatataattatattaaaaaggaactatttatacctagtatacttgctaattgtaataaagagtgttatgatcttgcatttatcctaaagtagcttgcaaattttgtagtttggtgttatcacctattgtcctttaaggatttccagtagattgattttcaatactaggggaagtttgctcagttcaagtactggtggttctagcttcttgcatacccaaagtgaacttggttagagggattgtcactcctactcctgttgattaaggacccatcggaggttgaggaatagtagggtcgagatctgaccttactagatctcttcgatttgcaggaatttgcacattaggatttatgactatcggatcagtcgtatcattgggattatcccttcttgtagttacaaccatcttggcgtgtcttgaaaagacttaaaacaaaagttgtattcttttcctctcaatgaaagtactaaaatattgatctcgtatttagccaacgataatgcgtcaaattaaaacgattagaaataattaataacgataatgataaagataaagaaaaaagaacaccgaagttgttatagtcttatagaggtttaatctcgtgatggtggtactatcctattttccttttacttatattgacttgtgagaagagaattaagaagtttttgatctctctcaaaagctcttacaataatttttaagtttttatctcttaaatctatgtttgttttctttccgattttcctttacctgaatagtgaaatgactccactatttataagaaagaattatatcaaaccgatttcttaaaactaataagaatttaaataagaaacttgtttactttccttaaacaattaaagcaaaagggaaaactaagtaagtttcattttatatcttatcaatatgaaaatattccacaaaattagagaaataatcgtggcttgaatcttcaaagatttataggatgtatattctgaagatattttcttcgcatttactctgcttggtgcatgcgagttgactgccggtcagatggtgtagcatactccgttcgggcattccaagtttcttcttcaaatcatttacttataagcaataaattaatctggacgacccatcatggagcgtgctgttcgcccatgttatagaatcttttccacttgtcaccaagacgaatgccatatcacctcatacaaaaattaggataataagccaaattaaaattttccttgaatgctgattatatttggtggcctaaccattctaaatgtattaataatgctttgaagacatattcctatgattaatgttattatttggtactcttttttctttggaggtttttcctaataaatttatccttgagattttcatgagacattttttttaaataagaaacatttaaattttatgtatttttttgaaccaagaaaataaatcattcattaactttcagcaagtacaatagatttaagagcagccgaagcattaagctcagtaaaaatataatctgacataaaataagactctaacaaaataatgaacaactttatttgcagatcacttaacaaactttaaagaacaattattaagagtagaaattaaaaatataaatttcattagcatattggaaaatagtacataatagaaaagttgtgaatcgcaaatagggtttatttatactaaaagacaaaatgctaaaattatttcacataaattggcttatttatttagctttaaggcgcaaagtaaatgcttgaagagctaaaagaacttcttttaacctctccttagaggattgatcaatcaaattgccatcactatcaaatggcataggagatttgaatgcattcaagaaaaactcaggcttgttgatgaagtgaatgtctaggtaaattccgatttgacgaagatggtattgcgatcgaccgcccccgaaatcccctccggcactcacaatggctgcagctttgtcaccccaaacattcggtggcctagatgcccaatccattgcattcttcaaaggtgctatatatatagtatagtatatggatatggagggaaatattaagtctacatatatacatgatttttaaactatagatagagagaaaccctagttgtttaaatgggttcctacttcctaatagattagagtttaatatcaaatgatagcctcttctcaatattttggtaataataaagcaatattgtcaaaaagagataagaaagaggattcttgcggctgtgatctaatgcacgtgtaaagttttcatttttctttttaagaaattttcacataatatttagaatattttgtcaaattataagactagatttattttgattatacatgattaaagtaaaaaaatatacaaatttatgtaaataaaaaagtagttcaatttacacttattggttgccacacaaaaattaaaaatcattaatttactatttctttttttggacaagtaactaatccaacaatttaaagcaataactaataattactgatttttgttagattaagcaaaggtgaataatataataaatattattgtcacttttcatatatattttttttaatttactgtttgattgcttcattaattactgtaatagttttagtagtctttatgtgcattcctcaatttttatatagttattatgtaaatttttgtaaaaatatatataaaaaatattttaaacggtaaaaaacgaaaaattctaaaaataacatttaaataataataaaaaatctttatccactcattaaaatccaagcaaaataaaaaaatgttataatgaagaatgaatcctctgaaatgccatttcaacttttttgatataaaaatattttaatggtaaagagattgagattgattacccaccagtgacggagtaattgtactccggtgaggcaaagagaaagctatcagcttcgagaattttgcggcggaaagcttcgacgggcggcggataagttccgtggacctcgagatcagtgttgagcatgggcaaaggcgagatatctatgtactctatctctaataacccattgaaaattgggtccttgctcaactcaatggctgcaattaataaaatattcgaccatgaatttatattaatgatctgattcaaaaaataataaagattatatataagtagtaccagaagtaataagtccacgatgaaaggaggctttacgaagagaaccacacaaagccgctactttgagtttgattattggtttctccataaattcttcttctttatttatcacttgataattgatattgcttttctaatatgtatgtatgtatgtatgtagagggagccttttatattcggacacaaacaaagtagcaatcatagtacctcgctaggaaaaaaattgggcaactttaattttttttttttttttttactaattagtattatagtgagaatttttttttgcataaaataatatatatttgacacgtagactagattctcagataaaaaagaatgacgtagaattagcaaggatagagactagcgagaatgtgtgaccgtaacaaggtcgtcacacactctgtaacatagtagagtaaaagtaggacgacgagaaattatcataagtcgcgcatatatcaattatatgtgagtatcccccccacacacgtaaagatcgcatctttaatgacgcatgatttcaatgatcaaccaatgtatgtgacaagtcatcttaaattcaaaaattctatgttgtcagtacatgaaacgcccaatatacaaccggtatatataattgtaggcctcactattaaaaaattggattttcttgacaattttaaacagtcggctattgtattgtcgtgagtctctataaccatcgcctattcaacagtccaaaacttatagaataaacaacagtggaaaattactggtaaaaaaaatttgtcgacggatgaaaaccgtcgcctatagtttaaagtataggctaaggtgcaaaaccgatcaagcaaaagcacaaattaaagaatatatatataaaaacttttaaaacatgtgaagagtttgaagaaaaaaaaacaaatatatacctaagaattcttaggaggagaaggtggtagctccgtggtagtccgatggttgcagaggcagtggtgggtggtggtggttacatatatgttgtttttgttttattatttgctaatttactttgagtattcgtcgttctaggtgaatattcgcacttctttaagtaagtatccttgtttatcttgaatattcgtaacttttggtgttgtctatttttgtccaacaattagtgttttttgaatttttcgaacaccgataaaaaaatagattaagctaaaagaaaatttgtttagaaagtaaata

SEQ ID NO: 221636 - DNA, 1967 bp, Cannabis indica
tatattctgttaaaccgagaaatgccgttagatagacacttttaatatataaagatatatcaacatttagtagaaagaaaaatttgaggaaaaaaaagtcaaatactagaaaaagctaacaacagtaaagagaaaatatagtaaagaaagcaatattgtttgtttcatgaaaatataaaaggcttttttcagtatatacatgaaaaatgaaataatattatagaaaatacagtgaaactcactatttcaatatatatatacagctacaaataaaaaaaaattacaaaattacctcttccactcaccatacaatcacaggacccatgcttctcatcttcaaaaccttcgcgtgctcaaacgaggacgacaatagcaaaactataataccctaaggtttaataattgaactagcaaccctaacttagtaaattatgtatctatgagaaattatattattatattttaatatgtgaaagtgttatgctttattgcattttaagatttcattggtgtgttaggagtatttttgtaattttgatacgagaagtgtaaaatcgtaattttatgatacactgtgcttatggactatattattatatagtacatttattctgtctatctacagatattttctgacaagttggatatagtcacaacaaggtattttggattgaaccgagttcgaggcccaaaatacattttttagaatttatttatgacatttatatgataaatgagaaaatgtgattattatgatatgtgcgggtgagctgaatggaaaaattgcccttgtttatatgtgtatggatatacagtatttgggcgttatgggcattttggtctttttggccaattagctaatttcaacaaaatcaaactttcgttcaattgaaaactatttttttgggttttgaaccccttatccgacccccctctctctctcacctctccatttgtaatttcaacaaattttgaagaaaaatgcttgatttttgatgtggctttatgttagttcttgtgcttggatcttgaagagcactaggtaattactttgatatcctctatttactttgatttctttcaagtttttattattgatattttggggttcttgagattatggatgcatgttgttgagattaaggggaatatttgtaaatataatatgattgagctattaagattgtgtttattgcttctaggttaatggggttgacttttagggttgaagcatgttgttaatttctgggtatcggccttaaatttttgagttttcgctttgaagcttgtgcaatgtgtgcaactatggtgtttgtgttatatgcttgaattttgttgttgtatttgattttgagctttgtgtggtgctcaaatgaatacaaatgttagattggtgtgcttttaattgaaagattagattatgcctagttttgattaggttttggtatgaattgtgttgattttcgagtgtttgaaaagttaacaatttttggggttccagggcccgtcgccgcggcgtggcccagcaggttggggccgcagcggcgaggccctacttttcctagggattttcattttctcatttttaccataacttttgactcgggactccgttttgaatgttcttgatatcgttggaaagctcgttttgggctctatatgttaatctataaatggaatgaaaattatgtgtatatgtgaaagtgaagttgggattaaccctatttgtgaaatcccgagaaggtgtgactaggattatcggcgcttgctcaagaacacccggggatttggaatctccacatacttagatcattaggtgagatagtaagctagcacatagagttaagcgcaatagcgctcatgtatgttattatgtgtatgttatgtgagaaaccaagattagagttattaccctaaaataagcggatatgtggtctaggtttaattactctatattattcaagtga

SEQ ID NO: 221637 - DNA, 1633 bp, Cannabis indica
ttatagtattaatcaatttgttgtttttttttataagatctctattttatttaaggattcttcaattttcattctctttttctctataacaattgaaaatatatcttttttgcttttttttattagataagaaattgtataattgattttttacaatatttattaatttatctgaattcaaaaagtgaaaatttatattatttgaaaaatatatatataaaatataaaaatttgaaatttgatatttattattaaataaaatatacaaccatgcaaagtgtggtttgtttcataataatatgtcaatgatttcatccttataaataggtattaatttctctagccagctagagtattattgttctcatggattgaaaatgagtgtcgggtagtacttctcttgatcattaaaacaagaaatttaatctatggtacaattacacactaaaaaaaagagtattaagggccaaaattttaagaacaataaaaaattgttccttctaatttattattaggggcaatatccattagttgtctctaataattgtcctaaatttttatttcaatttatatatttggtaggaacaatatttaatatttttaaggaggacaagtcacccctaaaaaatggacaataaatattttattaaaaagagtaataaaaaaagattgaaaataatagttaataggctagggatgctttttaaaaaatttagggacatttcctaaaatttatttttcatttattatgattaattttttaatcatattcattattaattttcttaataattatactaatgagtaaattacatggttaattcaaaacatactaatccttagattttacaaactttgattatatataaaacaatttataaaaaaaaatagtaataaaaacctgaattttatataaatatataagcaagtcatactacttaacaatagtgaagaccacattaattcttattcttctttaagagagtttcataagaagattaaacaagtggataataccaatcatgaactcttaattattctaagaatgttgttgttgtctctttacacctattaattctttcaaatcacattatggtgcaagccttgaatgctttgcttttctttttcttcggtttgggtagttcaaggacaactctcattgcagcatcaaagactcctttcacattctgtgtatatacacaagatgagtttattaagacaacaaagccaatttcatcagaaagaagggaaaaaaggttttatgttttcaaacctgttgtgttttcgagctgcattcgatataagcagatgctccaataagctttcgcaattcctctcccttaatgtgatagacatgttaaaaataaaaaagaaaaaaaaaacgtccaaataattaactaaactattatgtggtatttggttggaaggaatgaaaacatagcagtgagaatgggaaaaagaccaaacaaatgaatggaatgaaaattgttcctttcctttctattctatttcatacctccaaccaaacgctaaatattgtaaagagtaaattttctacctgagttgtagtaattggaacggtattaggatggtctataaagaattgcgggtcatcccgaaggtctagctcgac

SEQ ID NO: 221638 - DNA, 2025 bp, Cannabis indica
gaatttttgtctgtataaaaatctcagggttttgttcttaatttgaactttcttagggttacccttttcataacgaaaaggaagacctaaaaatttgatttttttaagccttcccatcattttttatttgaaagggccctcatttaataggatgttaatgattttattaatctgtttctcttgtatgtatacatttgttaattttgcttactgtgtttgaacttcaactaatgtcatattccttttttatataactttgtactcgaaatgaatttttcatttaaagttttttctttaggtttttaatattttcagatgtgttcatgctcatttttgtattgcattttagtttagtgtttatattttatattttaatttccttttatgaaaaaagaatataataaaaataaatttctttactgtttgtttttattgagatttagtttttaattcaaataaattatagatttttcagtaataatataatctgaattataaaaattgaatactattttttttttgtaaataaaaaagagtatgatatagtagtgcttgttatatttatttatatatgtttgtattatattaaaatatttaaagagttatttaattttactttttttggcataataggaaagaaagtgaagatgggacgtggaaaattaccactggaattgataccaaaagtcaaagcaagaagaatgacatttttgaagagaaaaagttgtctaatcaagaaagcttatgaattaagcacactttgcaatgttaaagtttgcttaatagtctatgattctatgaaccaatcctcagatcctatagccacgtggcctgagaatcctcatgagattaggtctctcatcaatgattacaaaactgctatggctcaaaagccagactcaaaaagactccataccatagcagatttcataaaggaaaaaatcaagaaagtcaacacagagatagagaaattagatcaaacttccactactaatactccttcaacatcaacaacaagtttcagtaataatcaacttgttgaatttgtttctgatctggataacaaaattgaacaagtgaatgagagaatgaggcatttgattcatctcaaccattataacaattttggtatgcaagatccattcatgagtagttgtagtgttcaatattgttctcctaatgatcatcagcttccttattacaacgataacgagcctcaaattctactacaacaacagcatcaaatgccttggatttatgatcagtctagctcttcttcttcttcaaaggctcctctatttaccttcaatccaagcttgtcgtttgacatgagttatcattacaacaactgtgacccttttgattatgcaattgatgagtactataatggtaataatcttcttctagaagatcaagctaatcaacataacaacaacattgtgttggaatctgaaagaggagtaggagcagggctgcaccaaaatgatcagaatggaatgatgttgtctcacaatcctcttatgcctatgcaacaccaaaattacaatgtgagccaaacactactgccattgatgcctagctcgacggttgacactgaatggcattacaatcaggctattccattatgggatttgtccccacattgtgatttattagagaatttaatcatgtttgattagctttgtattttttttttttttaatttttgtttatctgtctctatgatgtaataagtaatgatattttgttattatggtactgattttttttaatttcaaatacaacgaaagattaaaataattaatttttgaggtactcatttttaattgaaacaaattttgatgggcttgttattgttttgatttcggtaaatttattcttcctcctttctttgtatgaccatctgaaatgatcaaaagaaacaaaaggttatcatttttaagtttaaataggcaatatgattacataatttgattaatttattatgtaattaggaactactttatatttgtataggttgtattt

SEQ ID NO: 221639 - DNA, 2471 bp, Cannabis indica
agggagctgacatgatatgagtcaaaatctctgaatgtgattagatcacactcgtagcgttgagtctctggaggatgctctgcaacgtccaaaacttctcctcttggcttatgtcgtaaagacctttcatttctttctaaggcctttatcaaattcccagccaagcttggcctccaatcacgatgttgagcctttctacaactagcgcagactggagaggtacatttcctccaactgtagcttcaggtcgtacatacagttgaagagtagaatgcttttttttctgattaggaattttatcttgtctcacaattgattacacttatttgtatcatgactataaccattgtgataacgacataacttgttcacgtccctcttccccaactctttaaagggaagagatttgcgatgcatcgccattgactggttcgtcgtatagatctctcttggaactaagagaataaagtaggtggtgaaacaaggctcatactctctcatggacctggctccaattttagctttctttccaccaagggagttaccttgtttcccaccatttttagctctttttcctccactcaaagctccttttttcccattatcctgtgctccagtgtcaagatttggggagtctaggatcccttcttgttatttttgagcccttttgcttttgtgacaagtttttcaagctttataaagtcataggccctattaaaaagccattcatagtgtaaaatgaattgagacgaaggtcaaaccacaagggactcatctctttaagtctggctacaagttccataacacttgtgtcctcgctaagtatttttttcttaggagctgtctcaaagaactgatgaatgtagtccttgaggggtttatcttcttgttttttcacatcaacccaatcattaagttcaatttggctctatcgtgatggagctaattaaattccaaaagcatccactagatctttccaggaatctcttgatctagggggaagcttaaggtaccaccattgagctaaacctgtatgtgtggcagggaaaattctgtacctggcattgtctcttactccttgtagatcgatctgcactttgaagtaatggatgtgagacagccaatcttctttcccagtgtactgatgccagaaaggattcttgaacttaggagtcattagtagtgctttgattcagtttgagagcagtgagtgactctctgtctagttaaaactctaacaactttggggtcgtgattcctttcaccaaggtcgctaggttgtcaaactctatcatgtttaaattgtgggtagtgtttcgcgccccaactggaacttttattacttgatagggtcacccctagaagctcccccttccactaactagtttttggtcaaagtgtaacacaggtcttttagctcccaattagatcatgaactctagtcaacataggtctagttgttgtatcctgatcacagagtcgtgaaggcaacactacgatgtcttcaaaatgaaatttgggtcgtcttgggatgatatactgtgggagtggttatccagagcattgtagtgactccttccctcaaagtagtctttaggtggatcacaagtatagagagaaattaactagttgctcatgttcaacttctccccacctatctaagggaagtactcatattgttgatcgttggggccacgatcacagtaaaaacacaatttacccctctcatcttggaaatacttctaagtatgaagtggcttgttggtctttacttgttggatctcataacctcttgttttgaaatagagtcgttaattctctccttcgatgtgagtggtagttccctttcccttcgtagggtctcaaggtctattgtcattagagcgatatcgagaacctggtggaggagctctattagttttcttggaagtttatggtcgttccacattaggtagatggttgggggcactcgagtttgagtctattcgggctcttgctcaaagtttgcttccctccgtggagtctcagcacttgttgcttacttagtacttgcacgactaccatgtgtggtagtaccattccatgtgttaagggtttccccttaagtacttatttccatgtagccagttggctgatgggcaatctctccaaccaactcgaaaagacccctgttgggggtagccccacaaccagagtgataagcctacataattcgttctcataggttagctctttaatgttcctgcttagctcattgactttcaatgcttcgtcagttctccataaaccagttttgaaactattcatattgtttgtcgagagaatcttgaagttgttgttgcaaggtagccacaggttggttaagctgttcaacctaaggatccgcattcttaggctctctaatccacacgtggttccccaggtgaaatctgctcatcaatttttgtgccgagagtagttggtggcctttg

SEQ ID NO: 221640 - DNA, 3045 bp, Cannabis indica
ctatatatatagtctaacaaaagatctcaaactgataatcataattatctgtgtgattgcatctgtcttatttgttgcatcactatcatttatgttttggaggaggaaatcaataaggagatcatcattatctaattctgaactctctacaatcaactttctttcaaaggtttcttaccatagtttacaccaggctaccaatggattttctcaaagcatgatgattggaattggtagctttggctctgtgtacaaaggcgtacttgatcaagaaggaaatgaagttgccataaaggtcctcaatctaaaccagaaaggagcttccaagagtttcattgctgaatgtaatgcgttgagaaatattcgacacagaaatcttgtgaagatcttgacatgctgctcaagcattgatttcaatgggaatgagtttaaggctttagtgtttgagtacatgacaaatggaagcctagataagtggttacatggagaagaccaatcaaggggtttgaagttttttcagaggctaactatagctagtgatgtggcctctgcaatatgctatcttcataatcattgcgacgatccaatcattcattgtgatttgaaaccaagtaatgttcttcttgacaatgaaatggttgcacatgttagtgattttggattagcaaggctgatcattaacaccaataaaatgtgtgaaactcaaagcagcacaattggaatgaaaggaaccattggctatgcaccaccaggtaataattgaactctacacagttttctttctacaaaagtatagataagtgaattgagcttagtggcaaagaatcaagaacattgatatcacaaaaataatgcaaataggaatgaaatgactaattatttacacaaaatttgacatactatctaatctatttttaatgcacaacacgcgaaccctattaattcattcttcttttaacttttgcagaagttggatgtacaaaatcattaatttctagatgttatctttttatacaaaacatattttaatatagaattttatatttaacaatttatatgagatgcagagtacgcgatgggcagtgagccatcaaagcaaggggatatgtatagttttgggatcttattgatggagatgttcacaggaaggagcccaactgatgaatcattcaaggatgatctgaatctccataactttgttcagatggcattgccagaaagagttgatcaagtagtggactctactcttctaagtggagaagttgtagaaaccacaacgagaagagaaaactacaataacaatagaggaattggtgaaatttacacagaaggagaaattaacattagttttgagaacccaaatcagataagcactaatttgtggaagtgcttgattttaatcttggagattggacttgcatgttcaaatgattcaccaaatgaaagaatgaacataggcgatgtgatcaaggagttacaacatattaaaaattcttatgtgagacttgggaggcaagaacatagaagaagaaccagaccacctaactaattggtaatatactagaacatatttcacttgcattagcttttattgcaagttcttgtgaattttaaaagagtattaatatattagaagacttatttcacattgacttacagtattaattttgtttaaaattttttaaatacttttccaagccactatgtcccacacactaacatgtcatttgcacagcaggagatgggaactttattgaaggagcccagattaatggtgaagatctttcgttctatatagtatatatcattttgagaataagcttaagaatttatcatctaacttgtatctaaattttagtatttagcacatatatgttacttgatttttgtccattctgttttgttttcatttgttatgcatattgaatattttgtaaatgtaatcaaaatgttttacatgtgttttatgctctaagttggtaaatactttatgcagtcaataccaattcatttaacaaattaaaatgatatttaagaagctataaatacatcgaaaaaataaaaacaaaagacatgggctcaatgataaattaagatacataacaagaataagcaaacactttgatcaagtctctcaacttctctcctcccttcgtcattcaatagcaaatggatactttgttcaaatgaaagaaagtgaaaaggtcattcattaccaaaataatgtgttacaactttagtataccccacacctttctggctattataaattgtctttttcaaattgaaactgcatttgcgtggagggtctttatttgttaggtgtcttgtactgtcaaagaaattttgtatcgatgtatttcttccattattttctgttctatccacaacactcaattaaatcaaatatgctccaacgtatcaattggtacgaagactttgtggaaaagaaaaatgtaaaccatatactgatactaagatttaataaccaatctccattttcatatataactcttgctacaacatatatatacatacatatttttacagttctttagcaatgaaacttaagagccccatcacttgtgctttttggcttgcttttttgttcctgttttcggtgttgtcatttgatgtcgtgatgagcaatgcaataggaaacgaaactgataaatttgctctgctcaaattcaaagaatcagtctctaatgacccttttggagtgttgagatcgtggaatgattccactcacttctgcagctggaatggagtcaaatgtggccacaagcatcaaagaataacaggcttgaagttacaagactacaacttgagaggtactatatcaccttacattagaaaccttacatttttgaggtttatcaacctaataaacaatagcttctttggtgaaatccctcaccaagtttgccatttatctcgattgcaaaatttgagtctcagttacaacgagttagaaggtgaactgtctacattaaacttgagttattgtttggaactgagggagttacatcttggacatactag

SEQ ID NO: 221641 - DNA, 2180 bp, Cannabis indica
tgaagattggagcaagacaactctaatctaatttttttttctttctcacatcttttaatttttgatttttatatgtcttctagaaatattattaaggatattttattgtgataatgaactaaattctatttagggtttctaattgaatctcttgaagctttattatgaattaatggaattttgtttatttcttcttcaaataagatttattcaatttgtgattattgtttatgtgattgatttcgtacctcttatatgctatttatgatttcgaatcaaaatttaagaagtgaaatttgaatatgctaaaattgaatatacatagatttcaatttagaatgggagtatcacattggtctatgtgatttagggttatgttcattgcttcctattgtttaaatttctcataaaaatataaagaatttacattaggttgaattttatatttcttaattttaatatttaacacttttgcatgtctttcatcttagtgagaagaattatatgtatgcttgcattaataaataataaagtagattgtaaaggagattaaaattcctaatttctcatttacatttattgttcttgtttttcattaaatttttttatttattatttttaacaatttcaattcgattgctggatagaaaataaaataagttattggtacttgataatcaattttcgtgagaacaatatcaatcttaatcgaattaaactacaaaagtaattacgtatacttgcatagctcgtaatttttgcaacaacccttaagcatttatttatttatttatttatttttggtttaagaacccttattaaccataatctaattcatttggggggtttggtacatggaaatatgattaagattaatcattgaaactattttaataatccattctctcaaaatagtccaatttgtgttggattatttatccccactattggattatttttccttggtggattccattgtagttctaatgttaataggtcaaaccataattacacacattccagtacacatagagctcgtttgataggtcgtatgaaagtcatattatattaaataacaaataacactatgtttagataaaatattttattatattaattattactactacaaattttaaaacaatgtgggtccggggtttggggtacgagtctgggtctagggtccaagtcggggtcgggatccaagattcaaggtcaggtctgaggtttgggtattgagtttgaggccaagtccgaggtctgagtttgggtccggagtccggagttcgagtccacaagtcaatactaagcacattattatattatattgtataatatactattgtattgaattgtattgttgtgatattctagtacgcaaatctacgtaattgaattaagtaatataataatgaataaagtatcattttcacgaggattatagttaattatcaaacaattgaattcataattctatttagtgacaataataataagaagtatatactaaatgaaaaaagaaaacaaataattaaaatgaaattaacaatgattaaaacttagactgattaatttcaattaaatctactttatatagtttaatataatttaatttttaaattttaatttttcgagtttgagtctaagtgtgggtataagtctaagtctatgtccagatctaagatcggggttcaggctttgggttagtccgtattctcgggtttgggattcaagattggattcgaattcaaatataatttattttgaatgataagatagaataattcatgcgagtgctatttgtaaaacaaaagacaaggcagagcaagaattgtaaagaatctaacagaaaattagcaaaatctaaattctgattatttatttatatcaagtcaccaatattacaaagctaataaaagaagttagttagagcatcaccaacgaggcttcaaatttggtgatgacgtggaaacgaccctccaacgtagttgcaaacattacactaaattgccgtgtgtgctacagtgcacgacatatatgctgtgcactgttcacacgacatatatattttttttttatatatatataactaatttttgtatatgtctatattattaattgtatttattaaattacaatgtgtctttttaaaagtggtacattgatgtacttttatttgt

SEQ ID NO: 221642 - DNA, 2486 bp, Cannabis indica
gattgaatgcaccagtccaggaaattgcacccaccagtagccacgttaccagtcccaatgccaacccgatcccaggcttgtttcgctcttgcacacagaataagagcatgttcaattgattcttctgcatcctggcatatgggacacagagtttgtacatcaactcttctctgcctcaactgttttaaggtcggcaaacattccttacccgcacgccaaaccaggtttttaaccttgggagggatttttagcttccaaaactttgtccaaaacttagtttgctcatcctcctgaggttgccatctgccatttaattgttgaagaagcttgtaggcactcttgacagaatagaagcctgatgtttcatgaatccaagttaatctgtctctgccttgagtactatgcaaaggtatgtccagtatcagattcttgtcccgctcttcaaataaatcatctaagatttccttgtcccaactcccacccccagcctccattagattacacaccttactattcctcaaaccgggatgagtagacaacacaaaaggctgttcttcactaggcagccatggttcatgaagaatgttaatctcttccccattaccaatgcaccaccgagtttcttttcttaccagctcttgcgcttcaagaaggctacgccaaacaaaactcgggttgttacccaactcagccgaaaggaaagagctgttggggaagtaccgagctttgaaaattttcgtgaccaaggaattaggacgagtcatgattctccacccttgttttcctagcatagaaaggttgaaatctctcaaagaacgaaatcccatgccacctttagccttgtgcatacaaagacgatcccaagagaaccaatgaattccattttttgccttattagacccttgccaccagaacttattcatggttttctccatatcacgggtgatatccaagggtaacaagaatacgctcatagcatagcttggtagagattgagccactgttttgagtaacacttccttaccagctcgggaaaggaatttcatttcccacccctcaactttctttctgactctttcttttagatagcccaaaaccgctgacttatttctgcttaaagtactaggcagccccaagtaaaggcttccttcccctgctataaccattccaagcagagtactgatgttgtctctagtatctgaagctgtgttggtgctgtagaaaattgaagactttgaaaaattcactttttgcccagacgctgcttcgaacttgtgcaagatttccttcattcttgaagcttccaacatagtggctttacagtacaggtaactgtcgtctgcaaatagcatgtgggaaatgcgaggagctccattagacaccttacaaccatggatgaggcctcttctttcatatttttggagtaaggccgacaggccctctgcacacagaataaagaggtacggagacaatggatctccttgtcggatgcccgagtgggaacaatcggtccgacctcgtgattaccatgaaccaccacatatttggccgaagttacacacttcatcaacaaccgaatccaccatcaaagccgagtttccttagcattgcttccaagaatggccattcaatcctatcgtaagctttctcatgtctagcttaagtgccataaaaccttctttgcctttccttttccttttaataatgaagcacttcaaacgagatcaaaatattatctgagatgagcctacccggtatgaaagcactttgagtgtcagctacaatagcattcataaatggcttcattcgattaaccattaccttagtaattgttttataaatcacattacaaagagcaatgggacgaagttgagtcatgtcttccggattcttcttttttggtatcaacacaatattagcctcactacattcattcccaaaatcccctgatgagaagaaattccgaacctcccttaccacatcacggccaacaatactccagcacttctgataaaatgctggggtcataccatcgggcccaggacttttgtcaggatgcatttgaaagatcgcttttttaacttcttcctcagagatgggctgccgaagctcagcatgaacatagtccggaaccgacttgtgaacacaatcaagaacttcatggcatgatgaattagaagcttgaaaaagggatgtaaagtaatcaaacattacctgagaaaggccatgctcccaatccacccgaaccccattctcatttttcaagctcacgatttgattattcctcttcctagttgacgccgccttgtgaaagtaattgctattttgatccccctcctttaaccaaagttgctttgcccgttgcttccaaaaggcttcgcgttgatcaaggacccgaaacagctcttctttggcttctttgtgtctttgaatggaagccaaatctcttttagatgccagccgttgtatctcctttttacaacgct

SEQ ID NO: 221643 - DNA, 1397 bp, Cannabis indica
aacatagtagtattgttaataacaatgacattaatagttaaatattagtgtaaatgagatatgatcaaggccaaaaaatgctaaactaaaattggcacaattttcaaaaccacattctattagttattatatattagttatgtaaataataaaaaaaaaaacaaagtaccaatcaagacaaccaaccattatttagttttaataaaaaaatatacattctaggacaaaattagctagtgttattttttattataacacactacaacctagaatgaaaatttatatttttgtactttgtcctataatggaaagaatctcttcatctttatcaaaaaaggatctctccaaaaaaatatataaaatttaatataattcaataatataaagacatgttattaattagaatcaataagaagaaaaattaaaaagctaacacaagaaaaaatggccaaactagacatgaaaaagccaagctacgaagaagatgaaggcgttagtcgttatggagttgtatgtgttaatccaaaccctaacaaaggcttctcttcgatgctcctcaactggttcgagaacctcattgttaggtttatgtacaactcttcttcgtctcaccactttctcactggtaactatgcccccgttcttcgtgaaacccctcccgtcgacaacctccctctccttggttaccttccggtttgttctatttcttccttcatgactaatctttgcatagtaactcattaattatcttgtttttcatcaaagtaaatttttatgctactacaaaatatacattttattaattaataactttttcacgccaatcataaaatttgactgacgtgataaaaagatgcatatttttgcatcttttaaattaattagtgtttttgagttttgaaaatcatttcatcaagttatacaattttcattattattgacattgctttctttagagttaaagtttacgaaaaagtttcttcaatataacatgttacgaaacacaatgtatttaaataatcaagttcggtgtttaaatgtatcacaatcattactcgtacatatgtttacacagaagtgtttaaatggagaatttgttcgagttggtcccaatcccaaatttgctccaattgctggatttcattggtaaatatattttctttttatatttgaattaattttacacttaaattttaaatgaaattaattaattacaaaattttcattaattttgaggttaattatcgtttaatttgttgtatatatgtgcaggtttgatggagatgggtgtgtgtgattctttgctgatcaatataactttaatttataatttcaaaacattatattacttggctaataattttttcaacattattgttaaattaatatttggtaaa

SEQ ID NO: 221644 - DNA, 1349 bp, Cannabis indica
aaaaacaacatatgaaaagatggggcttcacttgaaagacttggttcccggcacttagctagtatgcgacttctccagtcaaagcattgctccacttggacaaatctggctaccacttacagtgggacaaactctgacaagcacaatagtgaaggctcaattcctagtgatcgacgtgccttctatctttaatgtcatgctaggccgaccacccttatatgacttgaaggctgtcacttcagtgtatcacttgtgtgtaaaatttgtaacaagaaatggagtgggctatttgaaaggaaaccaaagaatgaccatggagtgggatatgagaagacacctcgagcacactcaagaatctgggaattgtgagtaagttaaagtcaaaaccaaagaatgacacgagaatgctacaaccttgctatatccaaggccaaacctccgaccagattttggagaaaggtaaaggcatcacccaataggaatttgcccaaggcaaggatgaagatatagacccaccttggggagcctaatacaaatgttggatcggtggaagaataggaaactcaaaattggtaagggtttgttgctcgacataaaaatagctttaataaaatttctaagagcgaaccttgatatttttgcctggtcacatgaaggcatagtcgggatatgccctcaacattgatccaaacttttatctcgtctagcaaaaaaggagataattcgacaaggaacgtgcacaagaattaaaagaagaagtataaaattgataactctatgttttagagttattttgatatctttaaacttgaatttcaaactaaatagtagagtaattagtgtctattttatgtgattgtatttagtttatagtgtctttgtagtaaatagaaatgtgtgtgtgttattaagtgttagatagacttatgttgttgttttcgtgtgtattaagcagaaaaaaaaaggttgaaatgggtattgggaagtgtttgggacaagaagaaaaaaagtaggataatgcttgttgctgactgtcaatgctatagtaattatcgcgtagcaattggcaagcccagtaagtgaattgtggcagaaattcttgctggcgttaatgaggaataaatgatacttatgtggtaaaaatgtgtataatgagtcagccaatgtatggaaaaagaaggacaagtggacaatgacttggatttccaattagggtaaactttagtaccctaaatggggggcaggcaggagaatatagagatatagatggtggctgcacttgaatgtaggaaggagtacgaattttcagaaaggaagtacagaaaaaaaaaagaaagagagtacaaaga

SEQ ID NO: 221645 - DNA, 3234 bp, Cannabis indica
ttcatctacaaaagacaacacacgagatgagtgtttggccgggatatcgaacagtaaacaggaaaatatgccgatcaggagtacccaatagattaaaaggttgaaaaatgtacaaaaaataagtcaaaacccagaagtctgaaatttttgggtttagggttaaattccacgaagcttcgaatgatcaaggtgaaagacggacaatgtgtgattaaaggcaagcatcgtaaaccctgaagtcgtacgaactattacagagaaaatcacaaagttttaaccctaaatattctacctatcttctacaacaagtcaagaacgcatgttgaaacccagaaattaaacatgaaaagtaaaaaagagaaggagattgaaaacttactcactgtttgacgcctaagtgtagtccagacggggctgctcagatgcctatggtgggaatctcacgacagacttgaagcaaaaatccttttttgctctatgtttatttaatagggaaatcagtaaaagtaaaattttgaggaagacccaaccttattttataggcaacatggtaaaaaaagttaatcatttcaaaatgcctcaaatgcttcgattccctcccaaaagcaaaaatagggaaatcaaaattaatcaagtgtaaccgtcaaagcgtgatgagaacaactgggttttgaggcactaattaagtcacagcattaattagctgaaaactgaagagacgtctggtcagcatcacatcgaatcacaaacaggcgcacctgacacgtgtcacccattcaaatgcaaaggtagctcggatgaagctacacgcaacttttgaagtcccgtacagacttgggggcaatgttatcccaattttggcactctcatgtggcatcacgtattggtgacacgtggaatcgtcttcacatatctgctcgaaagagatgtgctgagcagagcatcgcatatatctgcacggacgaggccttcatggccggatagtggatggtctgaacagcgttccaacacttaattagcagctttaacacttgcatcatgagtaacagaagtaatccctataattctaggatcatatcacagagatatggcaaggtgtctacatcctttaatcagtgtattctgtatttaatgtgtaattttgccaattatagacattgtaaacagaagaaaacatttttcctcaaagcttatagccctataaataatgatctactctcactgggcaaaagatcaaaaaactaatctaagaggataaactcaaagatttcattgtaaaagctctaagaaaggaattacttcattctttgttcttaagtcaatacaaatcaaggggagtaggctattaccgaactgctcagggctgaacctcttcaaaaactcttgtctttatttatttcactatattatatatattatactacttgtcgcttacaaaaaagactcattgtcgttggccaaaagcgaggtcaacacgctctttgttgttatctttgtcgtagaaagttgtgttgttaattctttggtttgctgctacttagatctgtgggcttttgttctttcatgaactatgtctgaatttgagtttgtattgttatgttgatattagggatctgtttctttgttaaaaataaaattaactgtcattcttgatttgttattttatttatcaatttgtttcatgaaagtgatctgagtgtgtttcttaagtatttatcatacccagaattcacttgaaaagccctttcttgatccttcacaatcatcaacacagtttgattctctataagtatttgtaatatactgactattattttctttacaattttagatataataaatatataaactgaaattgtttgagtgcgtctcgattgtttgagtgttgatcaagtaccttaagtatctgtttttagaatctatagattgataaccttttacaagaactatattggatttttacatttcctaggattcatttggtgtgttcttgatctatgggctcgttttaattacaagtttgtattgatatcggcaagatagcttataattcttttggtttaatcaactggtatgtggcaagtgcattgagtgtttaatttggtttctaggtagtttatttatttgttaatgtaatttctttttagttgatgtatgaatatattgtattgtcattggttttgattataatttgtaaagatacgcggtctttttcttcttcaatgtaatcctttaatgcgttggtgttatttgttaattttgttttcaatatcagtagatgattaatatgtgttttttgaacaggttaatgtacaagaattatctaatttgattataatattttgacaccatcttgttctgaaagtgttattccatttctgtttcttagtgttgtagcactagggactgataaaacgaattttgaatgtactaaaagtgtattgtgttttgcagttgaaatgacttcagtagttgctaaggcaggtagttgtagaagtgattatgcagcaaaattagatggagtaagaaggaaatatacttttaaaattagctgatcagttgtttttagatttagctaaaatgcacgggagacttgataatgtacatattattatgtatttactgttatataaaatcattctgaaatttgataatgcaggtggggaaaattgcatgaaaatttataattttcctttttctacatttatatatgcttcattttataatcgacgtaataggtgaaaaaaaatatttcagtaatctatgtgtcaattttaaactaatgtaataagtttttagtgacggtttagaaatgccacaaataattttgcgtcatttccaaaccgacgcagaagataaaaaagaagattgcatattttatgtcggtttttaaatgtagataattgttttttgcgtcatttcaaaaatgatactaataaaaaaaactatttgcaactatggtatatacgtcggttttcttaaccgacgtaaaattctttaaatgacacttagaaaccgacgtgaattatactttttgtagtagtgtatatatacactatatattatatataagaaaggtagaagaagatatatatatacataaatatatgtatacactcactcacaaccttaagtgtaaaatagtggagatcactatgacttgaacaaggaattacacctttgtcctaaagcttatttcccctatctctaagcactaagggaactctctaggaa

SEQ ID NO: 221646 - DNA, 2417 bp, Cannabis indica
tcactgaacttcatctctctcaaccaaagacccctattgtctggtgtgacaacctgagtactgttcttcttgctgccaaccctgtgttgcacgccagaactaagcacatcgaattagatctttactttgtgtgagaaaaagttcttcgtcaccaagttgaagttaaacatgtgcctgctacggatcatgatggtctcaccaaatcaatatctagccaaaattttcctcgatttcgaaccaaactcacaatttccagtccttccaattatgagtttgcggggaggtattagggagtcgttattagtctgttattgtttgttattttctgttattgcagagctgtcttaactggttttttagttattcagttggctcttttcattttctccagtgatatatatgtcactttgtactctgtaataaaatcaacaataatggaaagactctctttcaattctcttttattatcattctctgtcttttctttcctttgttcttgttcatctttgattctctttctgatctctttcattgtgacccgaaggaacaacaatcacaacaacctgagaagatgaccagaatcaatcaaagtaggggctgtttcgaattcaagaaaaaaaaatatagaaaaactactacaaaactgaaattcacccggaaatctagtttaatttgcgtaaaactaatgtcctgacttcagttttcaaatccatgaaatgtagatctcaaaaagttgaactggagttctcaaacaatccaactcaaatataatctgaaaaaattacatcaatattgtagttaaatatttatcttagtgtattttcttatttttcaaatttcaaatggtaaatttgttcatattaaatcatgaagagacagatagaattacatacgcgaaaatagtgttctaacttttaatgtttcataatagttgcactacagttgcatgaatattttgctaataattatttcgtctgatgcaaccttcggccaaccacctaccaaccttcgtctgatgcaaccttcggccaaccacccagcaaccttcggctgattgaaacctttgtctaatgcaaccttcggtcaaccacccaccaaccatcatctgattgtgaaagtgatagtgtcagaggtattttggtaattttattttggaaaatcagcagtgtttttcattactccaataacttttacaacttatatacaacacatttttacaaaatgcctaaaattagcttttttatgagtaacagtatttacaaagcattaaaccattctaaatctatcttataaatattgtccacactttataaagatatttttgtaaataaagtgtcaatttgtatttttcatgtaataatttttattataatttagcatggcaattaatatggacatgatcattataaagatacaatcaataaataacaaaatttctattaagaagacacactcacgatcataaacatgatctaatataattatatggcatattttttaaattctatacatatataatcatgatgttttaattaaaatatgaccaatatcattatagggtagacttttaaaaatcaatatatgatcatgatatttatgttcaaaaaaatcaacacattatcataatctttaggtataattaggacattatagagaaggtggtaatttaaaaattttgtatcaaactcttatatataccacctgtatacacacaaaactaattttttatcaaaataccttaatgtcattgacattaagataagaaaagaaaactattcaactatgaatctcatttgttatagaaatttattttttgcggcatctcaccattctttgcatcacaacggagcaataaataaagcaacaaatctcaaatcgtaaattaccatacataatgttcggtaacaataggttagaatcgtatatgaaaaataaccacctgtttaatttttttagtattttaattattattttagtaataagatatatgatatatatatatttacaagacatatataaattagataataattttaaaatcgtaaaatacaaaaagtattgcaatttgaatagagaaataaaaatatatttgatttctataactcaataatttgtttaaaatcattattattaattttttagttaaacaataatgttattattgtttattatatgttatcctaattcaggtttgaaatgatattaataatgttttatgcttattataagtggtttagaaatatttaataatataaaatgtttataaaaacacaaaataaaccatagaagtgaaatttaataaataaatattaaatggttttattatttaaaataaaaagcccgtaatatttattaagaaataaatatttatttgtgacagtcagtagtcccgtgatccgtaaggggaaacaccgggt

SEQ ID NO: 221647 - DNA, 1401 bp, Cannabis indica
aatgactaaagagttatgtcagcactctggtagtaacatgggacgaaaattgacaaaaaactttattcgcaatactataaatagctcgataattaattgtaatgggttacaaattaggggacacaaatgtattttcatttttatcattttattttaagggaaagatcaaaacttcaatcaatagagaaatcaaaggacaaagtcaattacaatgcttatggataagtaaaagcaaattattctcgagggagagcaaacaacaaggccaataaactgacatatcgaggcacatacgtccgtagtcaagaccgttaaaaagtaccatatcaccgtaaatggtaggtaaggaaacaaaacaaggatacaaaccctcaagactctaacaagagaaaagcacgaaataaaaaacaacacaagccaaaataaaaccagtaaaaaatagagatataaaataaaataacaaaaaaaagcaacaccagaactccactaaagaagaagagctagccaaccacaagcttcacccatttggcaccagagaaaccacaaacttagaccacaagtcaaccacaacaaagccccatgccttgtcagaagggttcaaaaacctctaccaacccaatcatcataacaaaggatgaaaagcacaccccgaaggctattgcctgagacccattgaagtgcaccccgacacacccaccacaatctcgtcactgaggcacaaccattatcgatcaagaagcccaaagcttcgccattccccacctaaggcacctccgaaagaacccaccacctgtcgaactccccactcagtataaggaatgcgactttgctggcgcatttggccaaatgcgccgatgaaagttgtcgacataaaggggctaataaagagccaaaacttttacaggttcactattgtgttggcaaagttgttcataccagcacatgcatttagtgaattgcgttggtaaaagtctagaaagaaactgccttatggcgcgaactgtttctattagttcatacacctttgtcagtgcaattatgtgccaacaaaagtcttaaaaaatggggagaatttttctcacgtgataataatgttataatgttgaaatttcggtagaaataatgtagtaagaaaaaagttaaatttaaattttataataagtgaaataaaaatataaattaattatatatgatattaatttaattataataataaagtgatattataaattttaaaaaataagtaatttctagattgaataataagtcaaataaaattataaattaattatgggtaatttgcagcataacctccttataagtggccaggtctttgcaactaacccccaattctaaaattttggtgataaaacctcctaaacccaagttctgttagcactt

SEQ ID NO: 221648 - DNA, 1911 bp, Cannabis indica
ttttaaatagaaaacttaaaaaaaaagtcacccgtgaatttctcataaatcaagaattctgttatataggcacactttatatagaatagatatatagatatatttatattttatgttttagttttttagttatttcaactctgttagtgcaacaaaaaaagaaaaaataataaaaggttaattataatttttgcctcctgaattttgatatataccaaatcatgcctcctgaacttttaaggtcgttgaaaatgtcccctgaactattgagattgttagatttaatgatttttttttccaattttagtgaaaatgtctaacatggatgaaagttcaggggtcataatttagtacatgtcaaggttcgggaggcatgatttggtagatatcaaagtctgaggaacatggtttagtatataaataattactgaaatagtaaaattgaattaaatttaacaaaagtctttaaatctaacaatcttaatagttcagggagtatttttaacgaccttaaaagtttaggggcataatttagtacatattaaagttcagggggcaaaaatcctaattaaccaaaataaaaccattttccattccttaatagttccgggttcaatacaagctaatacggactatttgttatgtattaaataatacaacatacattgtattaaaaattttggtcgtaataattaatacaatacattgctttatctaaataaagtgttatttattatttaatacaatacgactcttatacgacgtactaaacgagccctaaataaattactaacgatgcatatctttacaaccctttgtgttttccttcttgatttggctgctattagcttattaagcaaggaagagtttgagcaactcgatactataaagtggacgatatgacactgtcgaaataagtggatttatgacaatatatgtatgacgaatcatagaaccacttttcattacttagaaaagactttcatctcaaaagtttacatctacaaacctttatattttccttctaaatttgacgttattaagcaaggaagagcttgggcaactggatattattacgtggaggatatgacactgggtttatgacaaggtgcttattgggaaggaacttatggttgattgggctttagattgtctccaacgctcgcaaaagattctcccataatgtctactctcaatggagtgcacctggtttggatgtagtttaggtcaagtagaaattaggaaaatttgaagactttactttttaataacatttttttttttaattttaaatttagtttatggtatttttacaaatgtttacatttttgtggtttcaaatatatcgtatttttgtaataaaacttttaaatactatattttataatttcttgtgtttctccatttctgtcacccctgaaccaaccatgaagtgcgatctctcataggaactctagattcagcttattccaatcgcgttgcatccaaatgcgccatttatgcgctttgtgaactcaccacgaatggtacggtttttatgctgaccattaagttaagatttttgtcataccgtcggcgactctctagtcatcaaagccttaaatgcaacgaagttgagggattgtggagcagtggcggtggcttaggctaagaatttggagagattgtggttggcgaggtgtatttggggattaggtgtaggatgcttaagttgattagcttgaaatggtgttagggttggggattttagagtgggattgattgttgttcaatgtaaggaaatttgtggtttggatctctctttcttgtcggtaatttcatcgtttttttgggttgagatttaaaattaaattagtgaattataatgataattggaagaaaatggcgagttgattaatgcttttttttttt

SEQ ID NO: 221649 - DNA, 2220 bp, Cannabis indica
ggaggcgtatcattgccctactgctgggtagaagaggatctaggcctccagtagctacgatggcgtttgcatcccctcctctcccagtttccctctgctccaggtattactctttcttactcctctatttaaggttctgcagtttgtgttgtatttacccttctccagtctctctccctatttttgatcatctttctgttttttccttacacctaaaaatggctactttccctatttcccaatctacccaattactgctgaagaagcccttgtccatgattttgaccatgtctccatccaccccgaaccccaatcccagtcccactgcttggttgttaaggtttcgtccccaaactctgaaagtcaattggattcagaaagccatgaatgaagcctgggttgctcgttgcccattttctttctctgaataccacttgggacttcttctggttcaatttggctgtgagggtgaccgtcgaagagtcatggagggccagccatggcattttgatcgatccctcatgatctttgctattcctgatggttttgataccatcctcccctcccaacttcgctacattcctctctgggtccaggttcattatattccttttggttcccgttcctatggcttggctcagtttgttgctgatacgattggtgacctcattgaggtccatttgatctctctgtatgattctgtcagtccgttcatgcgtgtccgtgttcttcttgacactatcaaacccttgcaccgtggcatgaatgtccatttcaggaaattgtccctcactaagtggctcaagtttctctatgagggtatacaaaactactgttaccattgtgggaagcttgaccacactttcaataagtgtggtaaatttctccatcattgtgatcaccacccttttcctcccagctttagctataaggatgtccttcgagcccctgccaaatccatttacaagaaaagtatctttgaactttccacttctattccttttgaggaacaaacttccctctccaacactggccatcccactcttgaagaccacactgaccatttcactgttccaaccatggctgaacccactcccaccacggtcacttcccctcatcccactccctttaccacttccaccatggctccagtttcttccattactacttccaccccatctccacccatgcattccaccatccactgcccctcccaatccatccttttatgacttccaccactaatccctccaccaccaaaggtaaggcccctatgtaccccgagacctctctgccatttctcagcagccctcctttatccagtctccatattaatgacactccttctgctcctcctcccaccaggaagcggtcttttgccaggcagaattgtcaagttggttcttcggttcgcagcatgctgaaacgagctcgtgcctctcactccgactttgcggttgttccatccatgtccaaaaatgaggaaacggtgggtgttgctcagcaaccccgccgagaaaaatgagtcttctcagtcggaatgctcgcggtttagggagttcccgagcattccataacttctccctcctttgcaagcaacatcagcctcagttctttttgttatgggaaccaagcttactatgtactccacttttgtttctagggctaaactgtattttgctaatgtctttgaagttcctagacttggtttagggggaggtctacttttgttttgaaaggatgatgttaatgttaatattttgtcttactccctccaccatatcgattgtatggtttctataaataatactacttttcacttgtcttgctattatggatccccgtatgtttctaacaaacaacattcttggactattttgcatcgcctttttgatgttgcccctttgcaaccgtggcttactgtgggtgattttaatgattatctcgggtttaatgatcgtaacactcactgccttccccctccccataccatgtattcttttcaaaattttattggcaaatactctctttcaccgctttctttttctggaaaccgattcacttggaagcatggtaccactttagagcgcttagactgggccattgttaatcaaaaatggactaatttgtttcctatggcttccctccatcatttaggtttttttggctcggaccaccgagctctaaaagtgcttcttgaggatattactaatatgtttc

SEQ ID NO: 221650 - DNA, 2862 bp, Cannabis indica
attcattgttaatgctcgaggaatagaagctaatccagagaatattcaagcccttctagatatgaagtcaccaacataagtgaaagaagtagcaaagtctcactggtcgaatagctgcactaagcaagttcgtgtcaaaatcaacagacaaatgcgttactttcttcaacatcctctagggaagcaaaaagtttgaattgatcgaggagtgtgaaaaaaaaataaagaactaaaaaagaaacttgcacaacctcttatcttatccaaatctctggacagagaagaactaggaatctacctcacagtaaccaattatgttgtaagtgtcgtgctaataagagaagataataacgccaatgtccggtctactatgttagcaagaggttaattgatgctgaaagttgataccccttgatagaaaaattaacctattgcttgatcctagcttcgaggaaactaaggtcgtacttccaagctcattcaatcttagtgtagaccgatcaacccttatcctgaatcttacaaaagtcagatacttttggccggctaattaaatagcaaaatgagctaggacagtacaaaattacctaccagctagccctgcacaacaataaaaaggccaggccttagtagattttatggttgaatgtacaaaaaaagagatagaaaatttaaaaaataatgtcgagccagagagggaaaaagaagaagaatacccactagaagaagaatttgaagccaaacccatttggaagtaacatgtagacgggtcatccattgatcagctgtctagagcaaggatcgctcttatagcccttaggggcaacctttgcacagagtagtcaattttggattcacattatccaaattaatgaagcagaatatgaagcatttattgttgggttaaaactttctcgagaggtacgtgctatgtatttaaagatcagtaatgattcccaattggtagtaaatcatattttgggagaatatatgactcgagggagaaaagatgatggaatatctcagcaaaatccaagacttgctcacacaatttaaaagaaatactatcaagaaaattctcagagaagaaaatggaactatcgatccacttgcacgattggcaagaaagacagtcaccaataaatcaaacttggttctaatttagttccttaaggagtcgaggatcacctgcacgaaataaattgagatggtggacagcataccaaattggataaatcaaatagcagcttaccttaacacaggtgaacttccaaacaacaaatatgaagctcaaaaaaggataagaaaagttgtgcggtatctaatcgtggatggtgtgatgtacagaagaggtttttcaatgcctttgcaaatatgtgttagaaatgaagaatctgcacctctcctgtctggagtccatgaagggttctacagttatcatgctggtgagcaaagcttttccaatggccaacaatgattgaagattcaaagacttacgtgaaaatgtgtgacaaatgacaaaggttttcaaaggtccctcttgcaccgcccaatgagttgacacaaatgcagagtttgtggcctttttctatatggggaatagacctaatcggacaactacccaaaggaaaatgtggagtttagtatgaagttttggctattaattagtttaccaagtgaacagaagctgatccactgacaattatcgcctccaagaaatttttggattttgtgttagaaaacattatatgctagtatagacttccccaaaaaattattttagacaatggaaaataatttgacagctagatgttcactgacttttacaaggcacatgggattataaagagcttatcggcagacgcacatccctaagaaaacgaacaggtcaatgacgtcaataagacactgaaggacactatgaaaaaatgacttgaagaagccaaggtaattgggttgaagaatttcccaaggtgttttggtcatacagaagtattgaatggatgataatcaagaaaactcattttgctatggcttatgattatgaaacaatgtttcccatcaaactagagcctccatcccattgaagattgacgtacaatcaagaaaccaaccatgtccacctagaagaatcacttgatgaaatttaagaaaagagagacttagcaaatttaaagttccaagctcattaacaaaaagtagctcgataatttaataagcaagtaaacgcaagaaaattcttcatgggagatatagtgcttaaaagggtgttccttaatactaaagattgtgcaacatgtatgctcgagcctaattgggaagggccataccaagttactaaagtaacaaaattaggagcatacaagcttggttggtatgaggaaaacataaagctaattctagtaccactgtattggaatggcgaatatctaagaaaattctaccaataaatgcaaagagtttggggactacatgattgcataatggttaaacatcattcttaagtgatggacttctgagtggacctctttcaaaggttcataaaaaatggttgatgctcaggtccaatgaccacgttctaaagcatatttcatcttaaaaattattcttcagtaataccttttggacagaatataccattcaaaagtttatttgttttagttagctaagatccgagtagatcatgtaatgtctttttattcagtaaatgtaagttacttttaagtgacaacacataccgaccaataaactgaataaaaccaattaattatcattcaaattatgttaagttttatatttttataagttgtcacatcacatcctcaaaaccactcctttatactatatatatatattgatttg

SEQ ID NO: 221651 - DNA, 1041 bp, Cannabis indica
tttaaatattaaatactaccaaatattatttgtctaccatctcatatccaaacaattaattcgtattcaatctcggccactcctaattcatatatggaactatttagttacaaacgcacccttaattttatttccttattcaacttcgtaaatctcgggcatacataatattatcgtcaccactccctagtccctagtacaaccagatagttcatctcgaccgtctattcgttcgttactaggctttaatgggatcaaaagaaatcccactttttctctaatcaatctttattttggttttgaatattaccatttataaacttttatttttgtagagaaagaaacaaaggttttaataccatatactgaaattttattttttttactgtggaacgaaatttttttcaaaaatattatattttttacaaaaaatattatgtaagttttacattgtgtactgtgttaagttttcacagttatttttttagttgtacttttattgttttaatggtttcattttgttgttttacggttattttataaaaagacagtatttttataaaaaaaatccatcttacagtaaaattgtaaacttttgagaaaattcagagaaacaaatatattcaaaacaagtgaaatacaaacagaaagagctcaatgtatctcgccaatttccgattgatcatgtggaaggcctctctttcctgggcctgtgaagcccaaacaaaacatgggcctttgaaacccaaacaaacaaatatattttagctttttgaatattttcatacccaaaaaaaagtgaaaaaatataaaaataccgttaaatagaaattataaaaatttaaatatttttacagtttctatttacaaacagactaattatgtttcatatttttttttgtgttgcaattttgttatttatacttgttttgatattatctttttgttattttcttattgttttcatgatatttttatagaatatcataaaattgtaattaaaaaataaaaacggtagaattgaaaaaaaaaattgtaaaa

SEQ ID NO: 221652 - DNA, 4677 bp, Cannabis indica
gataactaatcaaattgtaaagagttttatttagggcataaaacccaacacttctctaatcttcctttagtcccattagggcctttaggtaacccataatctttgtccacccttttaaaagagcagtctagccttgcctcaaagcaatctgctccctctctacagtctccaaccttgccaaaatggccgagcatactgattcatgagcctctgaggtgctgggaatagatgatgacggggcaagaggaggatcctctgatggtggatacgctgcaggtggtgtattgtctctaaatattcagcctacatctgcctactcttccaatattgaggcaagcttctgggcctagctacgcagagcatcttgagttggttgatcattgtcacctaacactagtttctccaagtcaacaaataaaggcccctcaccgccggtgatagtcttcacgaactattcctcatttttctggggacataacatagagtacactatcaactgaaaataaaaaccaatataatattagaaagaaattaaaataaaataaatatgactaaatacaaagcgtaaaaaacttacattttttgcaaacaatcttataacttcatccttgccaagtgtggtcttctccttactctcccagttaaccattcttggaaagcaatgcgacatcctcactgcatattcattgcccaactccaagatggcctcataggcctaatactgcaacgtcccagtatagtcgtatgatgagtattttgcctccttctcagaaactcccttctcaatcttcttatgcatccaattcttaacctctataaaatctttgttacaagtttccatcaacttgttgaaggagatctttccccatggatactcatagaagaattcaaggttatcaaccatccttatcacaaatggaggaacaacaatcttctcctccttaccagttgatggacaaattgtcattgaagtacttgacaatcaatcgatttgaacttcctttctcttcgatttcttgttttgtaggcctgggtaacaagttcaaccccatcaccaacgtaaactcgacctggctgaatctgcatctcttctttgcaaaataaaagtgtacctcatctggcttctcagatttgatcttgtacatgaataactgatggatcaatgctctcaaaaagtttagcaattttctctcgaagaattgttttaaaggggattccttcaccttatcccataattgaaatttgtcaaattttgccttaatcctcagatagtaataacttttgccatgccaagtgacacgaccagtttaatactttgagactagaattataaggcgtggtggtcttgaatcctagagaaatgacacaggaaaatacaagttagaaattctgcagcgaaatatctcacaaatatcatgcctatatcggaccagtatcagacacacaaacatcaaaataaattgaaaacacaatcattatcggtcccactattagtcccactatcgtcctctatcggacctacatgtttataaaaaatgctattgtactatcggacaagaatcgtcccatattagacccacaatcatacatagagaaatacaatacaaaagtacaaatgtgggacacacaatcgggcccatcatcagacccactaccatcctacgtcgaacagagacacattttataaaaaaacataaaacatataatcaatctgagtcattattggaccttacatcatcctctatccaacctaagactttatggtttagtatcggacctatgtcgaacctatatcagcctctatcagacctttatcttcaacctctattattatctcatatccacttacattggacctatatcgggcctatatcaaacatgcatcaggcctaagctaaaacccaagtttttcttgtggtaacacagacacgacccaaaacaaaccctaaatctaatcaaactcacacataccacagatcaggcattacaaaataataatgtaccctaaatcaatgaacagttaaaagataaaacaaacaaatgcataaatttttaaaggagggattcaaaacttaccttagacatctctgtgcgtggttgtggttggggtttggatagtcacggtggtcctcatggtgagatcgagtttaaatggtggtctagccgtgattttgggttgggacggtggttgtggtaggagttttgggttgggatgctgtttcgggcgaagagagccagagagaatcaagggagggagagagacgagttggtgggtttttgagaggggttattttggattttagggaaagtgtgcctattctaacaattacatgtaactttagttttcctaaccaatttcaccttaaaatatgcatggaaaatcaaatttccctttatatttggctacctttgatgggcttaccgtgcaaagaccatcactaaagagtgatgggaggccatcgctgaagagcgatgggtatcagctcttttatggattcctacatggtgagatgttagaagaactactatacaagttggctagtgagagcacttatcgtgttttggtagaagagccaactccaagttctcattgtactcaccaggcttgtatgcatctttattgttatcttgtaactcggtgcaaaccttatcagttgggtccaagcatgcttgctgcatgatctttgttgtcaaggaatattctttagggaataagtctcttacgaagaatttctttcctcgatctatttgttgaagagcctggtaactctttatgggtggacatgccccattgagttggcttggtctcatctttttcccttttgtcatgggattctgctagcaagatgttgttgacttctagtcatagtagaccaaaagtatgagagcagacttttggcagattgggctagctagggtacagaccaggtggccagccacgttggagaattgtctggccatttgaaggagactatggccagccagcctgtggagatggtggctggctaggttgttgatcttatgtccggctagcttactaaggccatggtcggccaaccttttggaggccaagttgatgttacagtttgatcccttctgcactcagttagctttgcccctgacatgcttgccgtagagcctttgtgcactcctgtcaatagctattcaacttatttcttggtaatgtttcttagaagtggtattgggataccacatttgtgcgttatgttgtatataatttagcaccttgtagccattcccctaatccctgccttctaacaaggtttttgtttggaggtatgatgttgtaggtgtatccatgttggttgtccaacatgtttgttcctttttgaatagagcttcttagttctttgaagaactaagcgggtaccaagttttccttggttgtcaaggcgcaactggctagtcaaacgagtgtgtcggttgttgcatcgtctttagggacttgccttttagtacaacctttgagttaacttaacaagttttgatattagctcaagtaggtcatcaactttttggattaagctgcatattcacccaggacatgacctatgactagttaagagtcatggtgtatgtctaggtgttcagtttgcgcttcgtgtgctagcttgaggccagcaattggagtttcatattcaacctcattgttagaagctttgagtctgacctttgttgcctcatgtagccattgcccccaggtgctctgagagtcagacctgcattaggcgagtggtcaatgtaccttttaggttgagttgtctgctcttgctcttgcttcttctctggctcttgcttttctcccaaaccttgatttctcccaaaccttgagagatttggggagatatgcttctatttttagctatgaagctggtaagagcttggcctttgatggccatgtttggttgacagggggccttaaaatggccaagtctttgtggttcacttgagtggttggccaggtgcttcaggttttggtgacacctgtcgccatggccgattagcatgcattgctttgggtgttttggtaggagagtgaagcaagtgcacttctcctccttctcccttagacttcatggcataagggaatcgttgaattggcctttatgttggtcagagccattgttgttgcacttgcctccaatattctcattgttggagaatcaacaaagatcgtctgtgctgatcgacacataagacaacacttggggcaatatgatgccctgtgtctgttcaacaccgacttgccctattgtttgggcttaccgaacaacttcttctaactttatgaagccatcaacttcctcaaggaactccttcatgtttctcatagagatccttctgatatctttccagaattcattcagcaataggatgcctctgagtatggctgtatatcggtcttcttctgtcacgcctttgaccttggtgacctcagccatgaacctttgaatatagtctttcaaaggctcatctcatctttgctttattttgacaagatcctccagttgtgaaggtatttctcttgaagcaaacatagttgtatgtgatgattttgagactatgggtatgggattacatagttgttggggacttgaatggattgattgggagtacctatattaacaaagtgcatcttgtttttcggtagcccat

SEQ ID NO: 221653 - DNA, 1637 bp, Cannabis indica
gaaggagaaaaagaagatccaggttcagatcttggtgaatgctctgctacagaaaggaatcaagggctagagatctgaacggaaggagtcatattattccgctgcacccactgtaaggttttctaactttatatgtgtttattttcattgttttagaattcatattaggttgttaatccaacatacttgttagtaaatctagatcctggtaaaataatttccaacaagcttatgataggatgagttggggtttcattgatcatgtgctgtcttgttttggtgttccccaagagtttcaaaattgggtttctcagtgcattactactacctccctcaatatttgccttaatgggaaatctgttggtaagatcttcccctcgtgcggcctccgtcaaggtgaccccctgtctccctatctatttatctgggctgcgaaaatattgtcaaggattctggagaacgcccgaaattcgggaatcataagtggaatcagactgagtaggggggccctattatttcccatattttctttaccgatgacctcattcttgttggaaaagccaatgtggaggaggccaagggtttctgggattgtcttgagaagttctgcacttggtcgggacaaaagataaataaaatgaagacctccattttctttagtaagaatactcccactgatattaaacggaggataagggagatgttgggttcaggatcgccagagggtaatgttaattatctgtggcttcctttattcagattaagacaaaaggatgcagactttaactttattctggataacctgactgcgaaattgcatggttagaaagctaagactctctctaaagcagggcgagcaactctaatcaagtctgtgggattatctctacctctgtatgctatgcaaactaccaaactatccaatagacttgccgctaagattgatggattggtgcgcgatttctggtggggatcggagaagggtaaccacggacttcacctgaaagcctgggacaaaatttgcctccccaagtctttaggggattgggcttctgaaaatttaaagaaatgaaccaggctttcatcgccaagtgggggtggaaccttctgacaggaaaccagtccttatgctgccgtatacttgaagccaaataccttaaaggaaagtcctttcttgactgcgaaccgaaagcctcggactcgtgattttggaagaatgtggctaaatctagagctatcattcgcaaaggtgcctgtaagcggatggccgatggtcaggatactaacatttggttggatccatggattgcacacttaaaaggctttactccccatccaaatgggcgggtattgaatagggagataaaggtagctgagctccttttggataatggtgggtggaatatccaaaaacttaacggattgtttgatcaggagactatctcagccattctgaaagggggcattcctactggcctaggaaaagatagttggttctggactttggaaagtagtggtcgtttctcctgcaaatcagcctatttggcccaggcaatggatagagcgagtccaggcgaggttgccccctcaatgtggaacaagctttggaatagtaaaattccagagagactcaaggt

SEQ ID NO: 221654 - DNA, 1659 bp, Cannabis indica
cagtgggatgcaagaaagagaaatactcagacttctaaatatgtctggcttcacaagacatccaacaccatttaaataccttggcattccaatatgtgccaaaagaatttcagctgatgaatgcacgggtttagtacagaaaatggttgcaagaattaaagtttggaactcgaggaacatctcttttgcaggtagagttgttctaatcaactctgtcttgttgacagtacacacttactggtgtcagcttctaatcttgccaaagaagatcatatcaaaaatagaaaaggtttgcaggaatatttaatggaagcagggtttagctgagggccctggcagtgtagcttagggcaatttgtgcaaaccaaaagatgttggaggtctaggattcatgaacacttcagcctggaatgaagcagcactttttaaacatgtgtggtccattgccaataagaaagacaatctttggataaaatgggttcatagtgtttacattaaaaatgaggagtagtgggagcacaaagctcttttgaatagcagatggtattggcggaaaatagttgaggcaaaagacaaagtgaagcaattgatgtgtcccaatacatttgcctctaaaaattataaaagagcagcaggatagaagttgttgcagggtgcttttgagcatcctttctggtgcaaagaggtctggagcaggctcaatgtgcctaagcacagttttattctttggttggcaatgcaaaaccgattgaagactaaagaaggctagcaaaattcaaaatgctggaggatgcaaattgctctctctgcaacatggcagcagaaacattagagcacttgttctttgactgcaggttctcccaagaagctctgcagcaggtgaaattctggcttgactggaggataaaatagagtagcttgtagggtattattcgaagaattgagaggggcaagtactcaaaattcaaaaaacaggtttattgtgttgtaattgcagccctagtgtattcaatttggctaaataggaacgaccagctttggaattcaaagcttgatactcccagccaaatgctacagcaaacaaaatggatcctaaaacatagaatatcatgtgtaatgccacaaaaagtaacagagaaagataaagtttagtttgaaaatctttaatacaatagctatatatacacacttgtatagtatacacaaaggccttgattaaggtgcttttagtttgtaaatgtttgtttggtgtaatgaaattcctgattcatcaaaaaaaaaaaaaactacccttcaaataacaaaattaaaatttaatccattttcctctcattcccttcactctctttgactctttctattctacaaactcacccacacacattcacctttgtcgaattcttcatttggcggagcaccattgacaaccaagtgtgtagagcaacccaaactccctaccaacataattcttgagaaaaacaaatttatttagtaattattattggattaagttatttttagttgtatttaagttgaaatgaatagatctacacatatcaatcttttattttggttgtgttgttcttgaaatttgagctgtcaaaattttgcgctttttgattaattttgttttaacgacattttgcgatacttttcacg

SEQ ID NO: 221655 - DNA, 1599 bp, Cannabis indica
ggtaaaataatttccaacaagactatactaaatcaaacaaggactggttgatttagggaaggtcagaacaaaatatcgataatcatgttgattttgggactagggttttaaccttaaataagttcaagcattgcttgaacttgatcaatctcagaagttagtatacagagattcttggaacaccaaccaatgatggatgcattatttcttcatcatcttcattcttttaattcgaagtaactaggtagaatttgtggtatagttcctccacatgaaaaggtctccacaaacgtcatttctagaaagttgttcactcgcagaagccagtccctgaaggagtcttgtggaatgatagtcaggtcaggaagggtattcccagatggccatcatgtccacttcgagtctagccttcaggatagctagcttcgttgcgggatagaggtgtagttggctagttgtccctcctagaatggtagtcctatccggaagcatatcaatgagtgtccttgttctgtgggtccgaaagcttctatgtttccaaaggctctaatacttaagttaacatggagactatgctcaaagaggagttggttaagttagttacttctaactaatttaacaacctcatttcttgtagccactaactttaggatcttgatcctaaggttataaatactaccttgacttgttattttcaagacacgagattgagagctcagttcagattggaattgagagtttgatagagaaaagattgagaggtatagagagaggtacagagaaaagagatattgggtttgggttttgtaaggagaatcttctgcatatgtatctaagtcaatatcagttagttgatcttaggtcaatagatcttaatcctgatatggttaggtttgatctcaactgtattatttatgttcttggagtttttcgttaaagctgtctaatggattggcctaatacttacatcttgtgaacatggtagtgcaattgagtgggagctctaatcatagatatgaaatctatagcttccataaattatagaagtgaaatgatgatttcctttgagcttggcttaatagagataaatgattgaggcctcattttagtaattatattagtttactaaaatattatttataggtagctaagtattttaaggataaaatacattgaagggtataacgggttctttatccacattcgatgtagatcatctatagaagatctttgaatatttagattgatacaatgggtaattcaaatagcatctatttttggtaatagtgcgttcaatgtaattaagagttcaattccaaatctacagtggcacaaggaggaattaataagttacgaaatttactttgtaaatttcggtctacttattgtaaacttgatcacataggatcatagtcgacacactagttgagataatacttcttgtagactcagataattgattttatttaatcaattataattctaaaattatagatgtcttatttatgaattttcactaagcaatggcttaattgtgaagaaaagagattttgggatttatttatttattaagagtctttgtaagatctaattaataaa

SEQ ID NO: 221656 - DNA, 2808 bp, Cannabis indica
ggcataaaacccaacaaatagattacattaggattcttgaaactacaaattataggataattaaattttgataatcgataaattgagattcatagtttgaaataggaaaattaatactctaggtttttactttctgattaaaaatcgttgcttgtctatttattttatatttactttattgcttgattcttaattataatttactttgggttatctaattaaagtataaaattaaagagtattataattagttaaatttaataatcaatccttgtgggttcgaaaacctttttagtattaaaactttactataacaacactgtacgcttgcagaaaaaatagtgtataaaaataatgagataaatttcagaaaaaaaaccttctaagagctatagaaagaaagaaccctaaacaaaaattaagaaattaatttacgatttattgataaaaacgaaaccaatttttggtcaaaacaagtatcaagccaccctacccaactcaaggctaatgggaaaatttaataaaaaaatatttacgaggtgtataaatttgttaagtcgtcaaaaacataattggagttgtttaaaagaataagtcattacttttttttcttttacacagaagatgatctcatgacgaattttttttttattactttttttggctaattaggaatttttactcctgaattttgacgtgtatcaaatcatgttttttgaacttttaatggcgctaaaaattcccctgaattattgagattgttggatttaaaaacttttgtccaattttagtaaggaaagtatagatgaaagttcaaggggcatgatttgatacatgtcaaaatttgagaaagtctgggagtatgcactataaaaaatcttacttttagtcccaataaaacttgtggctaataaaatagttgtgactaattacaaatcaccattcacatattgtgactaaaaatattagtcataaaaagggtgaataccattttagacattgtgttttgcaaaagttaccaattggaccctctattttgttaaatgacaaaatggaccctatatttttcaaaatggtaaaaatagggaccctaagtttaatttttaataattttattttttaatataaccaactttgagacaatttttaatacgaacagatacagaaaatgtaaccaattttatcataacataaatagatcaaattattattaagttttattttaataaaaaaatagttctggtccttgtaatatcgcagaaaaaatatgatgatatttaattggacatattttattaaatatgtgattatgtggcattagagtaggattacaatcctacttaagctagttaaaagttaattagtgaaataagagtaaaagaataaacaaagcataatttattaattacagaaattttgtcatatatgggggtattgcaataccattttcaaaataaaatattttcgggttcgacgaccttgcgaaactcgacggagtggtcagaattgtcacgacgcttgaattatgctataatgaattatgccgaactagtttagaattctaagttatctttttggcggtattagctagggatgaccgaaatacccctaagccttaacctatttaagtgattaagaaaaagggcaaatgagtcttttcttagttggattttgtccttttatggttaatttgtgctgaaataaaagttaattataggtttatattttcttagttattagttagataaaaaaaatgaaaagcttagtaacttagaggaaaatcaagaaagacccacacatctccttcttcctttctcttccttcgaaacccaaggaggcagcaggagtccaaccaagttatcttcaatttcaaccaattctaggctgagctaatcaaccttagttgctgtacaaagttgaggtaagttattcatctttgttggtggaatttcttaaggtttaggtcgagttgaagatagggttttctttaattttggggctgttgtgctaaattggaattagaattagtttttagacttgatttagagattgtttaagtttagtttggttagatttagagctgttagttttgtgttagaggaatttagggttttgagctaaatttttactcaattatggtggttcgcttaaatagataaattgttgtgaattgatgacttgaatacattatttttatgatatggaattattctggaaggtttgagcaggtttggtgaagaattagttgggttttgaagcaacaaaccaaatttttcgtttctgcagcaaggaaaactggttaaccagtttctcaggcatagtaaaaccggtcaaccagtttttccagtaggggaaaactctagttttagcctcaaaaccggtttccgctcggggtatatttcagagcttagattagggtattttagtgatacttgaattattctaatctagtgggaagttagatgtccagtttcagagattagggaattgattccagagtttgggtaagttgtctatcgagttttgttgtcgtgacataggacccgggatcgtcgagcgtaattccactcaggtcggctctcacgcctggtttctggactgaggtaagaaaagtgatacaaccatatatggttaaataattaatgattgtgattggtatagacttgaatataatgaaggtcttgtttatgtgcttgttatgccttagctgtgatcgagggttggaaacaatcattactgttataagtgattactcttgaaatcgcagttaggtttcttacttatcgtttgctttatcgggcaacgata

SEQ ID NO: 221657 - DNA, 2244 bp, Cannabis indica
aattaggtgagctcgtgccaaaacatggcacccatgtatcacatctcctaatcagacgagtgtgtgccctatcctggtaccaatatattgcatcacctaatcaggtgagtccgtgtcataggttggcacccatatatgtcactacagctacctaaataggatcactaacaagtaaggaacttaataacggtttcagtttatagtcaatgacttatcacggttgtcttacaagaacaacccaaatattgctccctggtatccatatatcacattgcctaattaggcaagcccctgccataacttgacatccatatatcacattgcctaatcaggcaagcccatgccataacttgacatccatgtatcacatcacctaatcaggtgagcccgtgccatatcttggcaccaatgtatcgcatcgcctaatcaggcaagcccatatatcgcatcacctaatcaaatgagctcatgccatagcctggcacccatatatcgtatcactacatcacttaatcaggttagctcgtgccaaaacctgtcacccatatatcgcattgcctaatcaaacgagcatgtgccctatcctagcaccaatatattgaatcacctaataagttgagcccgtgccataacctggcacgcatttatgtcattgccgctacctaaatatgatcgctgacaagtaagaaacctaacaacaatttcagtttagagtcatggttgtctcacaagaataacctgaatattgctcctcggtatccatatatcacattatctaatcaggcaagcccatgccataacctggcatccatatattgcattgcctaattaggtaaacccatgccataacccgagatccatgtatcacattacctaatcatgtgagcttgtgccataatctggcactaatgtatcacatcgcctaatgaagcaagcccatatattgcatcacctaatcaaatgaacccgtgctataacttggcaccaatgtttcacatcgtctagttaggcgagcccataattcgcattaccattgcataatcagacaaccaacaatcgagaaacctaccatgccatgtagtacattacacttttcttacctttaatctagattcacgcgtgtctttcaacccaagaggaggaccattcccaatgatctgactttgtgtcataacaacggtaaactaattagtgtgtatcccaaaacactacttgatactcacataagacaacctcaagttttctaccaaaatccatggtataaataccctaaaataaaacttatattttcgctctaaaatgtataccatattgtggagctcgttacaagcttcaaaacggtatatagaacatccaaatggacacctgagtgaaaagttatgactaaaatacaatttttgatttccccaaaaataccagaaatggcaaactgtttggtaaaacggttaaccatttcctggcataaaacaattgactatttgtcccaaacaaggaaccgtttcataacaggggacgagaatcttgaatttcacactctctgaaacacaaccaagacctatctaaatcattccaaacttcacaggacacatatataccatctatacaatagtcccaatgtaacagaaattaaaaatgagcccttaaatggaaaatgccattaatgctcgagctttgagctttaaaaagctcaaactctatttctaactcaaaaccacctcaaattcagcaagtaaatatcaaaactaatcccatggcaacccaaaaacaattccataaagtcacaattcccacaactactctaaatcacatagtcaacatatagaaccaaactttttcaacttaaaatgaaaataaatctttcccttaagctcttcctcttcaatggttcactatccaattactatcagggcttgaatcactcaatttctagttgaaaattaaagaaaattagatggtggtggtgagagttttgtcgcaccaaaggaggagggtttcattctatttcttacattttaaacttttaaaacacatgttgacggtgagaactcctcaactaagttagtggttggaaaacacaaagttacccctaaatgtgatgagaataaagaagcaaggatctttgaatattgttttctctattgaatttaaaatttgagttacaccaagtgattttccaaccccctctcacacatgtgaggagggtatttataggctctaatgacctagagtacaaggtggtcccta

SEQ ID NO: 221658 - DNA, 2219 bp, Cannabis indica
ctttacttggactagtttactttggggtagagatcttcttaaggatggacttacatggaaagttggtgatggtagttccattcgtacattagaggactattggattcctaatgtcaaatatcttaaatataaaggtgaccatatacctccttctgaaagagtcaacttctttattaatcaaaatggtcattgggacttgagtaggctcacacaatattttgatagtgatattgtttctaatattatctatgttcctattgggggttttggcaaaagtgacaatttgatttggaacggggatccctcaggtatgtttactgtaaaatttgcttaccacctagtcaacacagtcttttttcctccttccacctttgatatcagttctactaattactggtggaagaagttttggaatttatgtctccctcctaagcttaagatctttggttggagagcattttatcacattcttctaactgcatctaacttttttttctaaaaaagtccttcctactccctcatgttttccatgtaattgtctaaccgaaatagtaactcatgctctcctagattgttccaaagcgagagaaatttggaaaacttcttcccttaatcacttttatttttagcataagcataaagatattcgtgattttattttgtctggattttctactttaaataaagatgacttcatgctgttgttgtgtatattgtgggctatttgggaaaacaaaaataaaaaactctttaggaagtctcacatgtctgctattgatgtagtgaactagatcaatgcttatattgtggaatataggaatgctcaatccaagagggtggactgtaatcaaaagattaatttccagggtttggagcaagataagcaggtaaatgaggggttttatcagttgttcaatgatgctgctatcaactcaaatagtggaaaactttggcttggggcggtaatcaaggattggaaagggatcatggttgttggtctttcgatacctatggcagcgaggataaattctaaaatggtagaggctttggctcttagattagggttactttggtgccacaatgtttggctgcctcttgcaaaggttgtaactgactctaagctgctggtgaacaaagtgaaggaaaaaagaaggatttctcagtactttcagacatagttgatgatattaatagctccttgtctctcttccctaatgttgctttaaaatttcagcctagaacttttaatgttcatgcacattatatggctaaaaaagtattagggcttgatagggagttaatctggagaggtaattttcaagatttagaaattgtaacttctgctgaatgattactcatgtagttaatttcgtcaaaaaaaagaaaagaaaaggagaattaatttgattcattttcattttaaaatttattaattaattcaacgccaaatcgagtctaataatttaatagaaaaggaagacgagcccctcaaggactatatctaatggttcttaaaggcagccgctaagactaaaagacttagcgagaatgcaagggtaataacacttgtaactggactcaaggagatgagtcatctgtcgctcgaccttcgtctcaaggaaatatacaccatgaatgacttcttcgatagaacaaatgactttatcaaggtagaagaagctgtaacccgagccaaggtgtaacaccctaacccttagggacgccacgtgtgtgtttataaactagtttatgataataaacaagtattttagataaaatgtgatttaataaaattttactaagtaatctaaataataaaaccatggcatagtcccttttctacgattggggatcccctatttaaaatattacaatacatgtcattgcagtttatcataaatatacgtttaaaagttcaaaacacttgaaacacaattcctgacaactcagcaccacttgtcggataagctgatatgtacacttgctggagaagattcctgactcatgattgtttaaacatttctacctattacatgcaccacatagcacttgtgagtcacaaggacttagcaagaaaagtaataacaataatcatataattcaccacacaataacagcaagtaaactcacatcatcaaatcaaataatcatacattactcatatatttaaatttgggtcagtatagatattcaagcatgatgaatgtcaatataacttt

SEQ ID NO: 221659 - DNA, 2093 bp, Cannabis indica
aataaaatactaaacgggtccccttcagagcgagaagtgtgatccctgtccccgctccgtttaacgttcagggacaaaaagtaatccccgtacgtccccgccctgttccccatttagacggggaattcccgccccattaagagcgggtccccgcgaggcccatctctacaagagaaatgtgcatccctaaatacaagaatgatatattattaaaagtatattttggtctgaggtattatatattttaatttaaaaattaatataagagaaatccctactcaatatgaagcacatattagtatagtattgatcaccttaaaaagtcaaatgccaatgctcaattccaaaataaattcttgcccaagtaagcccatatgacacttctcacagacagttagagtgttcaaccagttacttttacagaatctataggacccgataagttgcctaaactgtaaaactcttggtggttgtaagtatggaagagtggtatattctcccgccccttgtgaaaatttattgggctccttttttcgtgccgcaagcttatcttaaatctcacattagagtctctctctgttgaatctattggccatagctaaagattgaacagaggtgacccttatgatttaggctatagcctaagaaggtacatggagatgacctgaattgcaacttatgtttattgtagggcctgatgtttgggaaacacttgcagccaaatgtctttagtttggtataatctggttgaatagaaaaaagtttttctatgggagaggtattttgcaacacaggagtagggagtctattagacaagtatacagaggttcgaaatgcctcatcccagaacttgagaggcattgaggcttgggcaagtaaagtaagaccattttccacaacatgttgatgtttgcgttcaactaaaccattttgttcatgagtggttgggcaaggatgtctatgcatgatgccaaactgtttgagaaggtcaataaatggtctgaactcacctccccaatcagtttgaagacacttgataggcattcctaattggagttcagattcagccttgaattgagtgaaagtttcaaggcttctgatttttgtttgagcatgtatatccaggtgaacctggaataggcatcaacaaattggatgtaatatttatatccattgctagaagtgtgtatggcaggcccccatagatcagcaacaaccagttgcaggggtgctgtgtagacagtatgggaaatttttggaaatggcaatttgtggattttgcctaaacaacatgcagtacatattgaaagaggtgttttattactgaattggatgttacatgattgaagtacagatttgacaatcctttctgagggatgtcctagcctattgtgccacaactcataattggaaacttgagatttattacaatttgaacagacagtagcattgttggtggaatgctggcacagtgtggctgtgttgacacagggagaggcatctgttggagtgagttgaactttgaactgggaagggttaaatgtataaaggccattctggtgtttcccagtgaaaaggactgctcgactgacctgatctttgacaaaacacttgtcagcatggaattcaaagaatacattgttatcataggcaaatcgagacacactcaacagatttttagttatttcaggcacatgtaagagattgtttagaacaagaggatgagaagaattggaattaataaaatatttaccaatatgttcgattaacagacctgaaccatctccaacatagagttggtcttgcccatcatattctgtgcatgtagtcttttgcacatttggtgtgcaatgattcgttgcccccgagtctggataccagcttgtgtcctcaatttgatttgtctgtacaagattagcttggtttgtaggagagtttgtgcctggaaacacccctgtgaagcttttatcgaatctgtaaaagcagtcgagtactgtgtgtctaattttatgacagagttggcactgcactcgattggctggtgttggatatctacctcctctgttgacagtggaaacaccacgactgttagt

SEQ ID NO: 221660 - DNA, 1910 bp, Cannabis indica
cacttaattttgtatcacactttataatagcatatacattatacatatgtgcccacacaagattttagctaaaaaaggctttgaggatacaatgagtatatgttctttgaagggtttgatgagtatttataaagtttacaaaaattatacttaattttctttttcctttaatgaaagtttacatgaattatgaggtttcatcttaaaattaattggtatgagaatagtagcccatacatcttatgaataatatttactatttaattttaatacattatcaatgtggactgtgcattccaacctataaaactataagagtgctgactaggtgaggtgaacacctaatagatataacaaaatgtgggcaaacccattaatgtccaactttactatactgtaaaacttgaaatgtaaatgcaaatattaattgaattaattaaaacgtgtttcattccatcttggccagttggccttgtcacaaaccaaactagaatgacgaaaattaaaatacaaatacaaatacaaatacatacacacaaacacactttacgtactcacctcactttcttattaattttctatcctttcctttttgtttttgcttaaataattaatgtaaatgttcttagaatttatataaaaatatctaagtttaattttcagtatcaatgcttaaatttaatttttagtaataataatactaaaattatatttatgtaaatttgtaagtatatgcttaagttttcttattggtatatttaatatgaaaggcttaccaaattaattaaatatgtgaattaatatgaaagacctaccaaattaattggttgatctatctatacatatatgaagtagctacacaaattaactcaacctacaaaattttccagtcctacttaattttcttatatgaattcagacctgtacaaggcagcctctaatggcgaaatcggccccttcaagcaaaatcacgatgaacttaatcttgtccaattagtcacccaaggaaagaatacagttttgcatctcaatatcatttctgaaaaaaccactgacgaaagcttcacaagagaaatgctggagatgtgtccagcattgttgatgcaaactgatgcaagagacgagactcccttacttgtggcagcaaggtgtggtcgtgtctctatggttaagtttcttattgaaaaatgtggagacgaacaaatggcgaaattagagatgatgaggatgaagaatatagaaaaggacactgcgttgcatgaggctgtgaggttcggacatgatgaggttgtaagtatattgacaagagaagaccctgatttctcgtattcagctaatgaaatgggtgagactccgctttacttagccgtcgaaagaagctattggtgcccggaattggttgatgaaatactgaaaaattgctcgtcgttggacactggtggtcctaatggaagaactgtactgcatgctgcaattcaaacaggcaaagaaggtacttaatattatccactatatgctaaacacattattttgagcaatgcgcatagtgcgcaatatataatatacaaacaatagttctaccaattttaatagtaaatattaaattaaaatatggaagattcaattaagtctcttaatctaaaattctttactaatttaatttgaacttaaagaacattaattactttttttttttgtttttttttttttttttttaagtaaaaaacagcaattcaagtagtaaacttgaggtcacattagtaatactagtaaagcttgtttgtggtatgacgtaaatattgtgttgtattagtattaatattagtattaattaatagaatattatgtttaatataaataaatttgtattaaaatgtggtataattaagttatactatattttcaataaa

SEQ ID NO: 221661 - DNA, 2643 bp, Cannabis indica
ttttagtcacaatatttattatgactaaaactaattagtgataacttgtaactaaacactatgttttagtcacaaataactttttgttgtgactaaaagtcatatttagtcataaaaattatattttgactaaaaaattgtcactaaaagtagcaattttttgtagtgtcaacttattttcaaaaatatttaaaataatttatagtatcaatacaaaattcaaacattgtaagcatgcatgcaaaaagagacaacacgagttcaattgaatctttaaactttattttaaacatcttatatttagaatttttgaaaaatgatgagatatctgcctactacatactataatatacaatgttatgtaaatattaaatcataactttttgaaatatcaaaaacatcgatgtccctctaacggtaggaaaaaaagtagcatccctactataattttatcttatatataagaatatatgtatatttatataatgtaaatgtaatgccatggatgcaaatatattgcataagatatataatatttttgttcaagaaagttcgatcgagcttgtctgaagaccctcgtgcacgcacggaaatactgtatgtagcctccaacgtcgaggtttctcggccagctttcttggtgcacgcgtgcggatggtatgtattgcatgttattcgcaccaaatcgatccaaaatattttaaatttttcaaattttttattttttttttcatattttttcatgtaatttattttttgattttttgtgtaattttttatgtagatttttattttttaaatctcaaatctaattatcaggttaaaaattaattttgtttttgtttattaattatagatattagtatattttaaacttgaaaaatgatcatttttacattttttgcttaattagttattttaattttaaaatttaattattttatcttatttttaaatttaaggtgaggcattttatattttagatgtttcaataaatttttttataaaatgaccttatttgaaatttaaaaatatgatatatttttataaaataatctacattattttgaaaataaccagatatttatcaatttttcaaaagttttttattttatttaaattaaattataaaatcaaataaatgatatttatttatcattttattttattagacatttaatttaaatttgaaaaataacataaaagttagttgataattttgataattttaagttagtttatatttaagtttgttataaacctaatttttcaattataggtttaattttaaattaattatttaataatttttcaaaataaatatttgtttattttggattttcaaaatttaattaattatttatttaatttaaagtaaataaatcatataattaaccaactatccaatgttgttacatgtatattttatttattttttattcaaacttattttataaaatttagtattgttcgatctaaattgttatggttaacttgttgacaaatccaataatctgattttaaccatagtccaattgccaatagatcaaataaataatttgtaatatgtaaattttataatcttctttcatttgtgtgtaaatctagtaacacgatagcataattcatatcattgtgtgtatctgtgcctatatatttgctttgggcctagatgtatataatgaacccatttcattttaataattaaaatggactagaactagattttttttttttttgaaaaagaaatggactagattgctaaaataaaaatatcacttttgatagttttatttaagcccaattagtactgggtttattcaatgaataataattatttaattaaggttaaatttctctcttttgggccttgtgtgagagttagggggctatttgtagtgggtacaatacattgaacccaaccctccctcacatgaataaccccaacagtgaaggctcatttgccttatttgaataattgtaataggttaattatattagtttaacctaataaaattgattagcaacataattaattttcaaaatacatgaaatttatttttcatcggattattttaaaattaatttaagaaaaacacacttagtttaatgaacttaattcaagataaactatatgtattttgatgtatttaattaaaaaaaaggttataactaattagatttttttttagaaaattagttatttagatattctttgaaaatatatttaagttaaaaatttattaattttagatcaacttaaatttggatattattcaaattaaggtgattagttcaagatacttaattttttatttaattaaatttttaaaaattatttaagttgaaatattatttattttataacaacttaaattaaatattttcaggtatttgttttattatattttaaattaattttgaaattatatatattatatatatatttagatttttcgaaatttaacttgaaaattaaatcacaatgaaaaattaattttagaccaacttaaattaagtaatttttattattaaaatatatatattaaaataaatgattaattaaaaatatattttttaaataatgagctttaatcataaggacattcgatctctattattggtcctacatagttcttgttt

SEQ ID NO: 221662 - DNA, 2704 bp, Cannabis indica
aatttaagctcattgcaaagcatgcttattaatccttaccaaattgaaggaaacaacagctatgttccaaatgaattgcgtactaaaacaatgttcttagccatgtagtaccagtaactaacagaacataacagcgcgacatggaatattcgaaaagtaaaataaaaaatgggtttcattcaagaagagcgagtacctcagaattcaaatctacatggtgagaagaaggcgtccctctcattttccaaagcaggtggtttctatcttctctgacccttttcaaacaactttctctcaactaaatcccacagatgtccacaaacaaagagttttcagcttatcattcgtatccccaagaagaaggtattcaaaattatacattttcaatatcaattgaacacaaaaattgaaataaatacaaataactgcaatgtgtccagaacatatatatatatatatgtaataaacatttatatataaagagatagagagagatgaaagagaaaggaaccttgtgtttccatgatccatagttattaaaaagatgatgggttttcagagaagggcgaggttggagcattgttttggctgaatcggttgctgttgaagcaatgttctcgtcatgactcttcatatctgtaagaattaagagtttacgtacgtaattttcatcccaatctctctttctctctctcaaattaatcaaaaagaaatcctctctcgccattttcaaagaaaatgaaaagattcaaaaaaaaaaaataatgggaaagaaatacttgaacggaccttaacagacactggacgcttaggcgcggaaaggtacggagagggggacttccgttgatgggtgggttgagacttgagaaataagaaggccggctataccgccataaataagtaagtttaattttagtggaaataaatattaagtttaatttttgaagaataatacataagttatatttttcaaatctagagttatcaatctattattatccacgtgttattttcttattggtatatttaaattaattttttcttaaaaaaattaataatttaaaccaatcagtaattgccacgtgacaatttaattaacacttaacagtcaaatacttacaaaagttccaaaattataatatttagttattataaccgcaaaaaattaaacttttattcgcaactaaaaattaaacttaaatatttataccgcaaaatattctaaaataaatataagttttattttctatgaaaaatttaactttctatacttcaacttcaaccccttatcccatacaattctcacatttaaaaatatactatttaaacaagtgattctgaaagcatcagatatgctttcacaacaagattctgactttttttattttcagcttggatgatatgggggaacgaaataaagtaattcatggtcagaaatctaaattgttgagtattattgtggttcgaataaaggaattattcaaggatggcataaaaatgcagtttctaatactgtcaaatgcacttctgctacaagttgggttcctcctttaagaagggaaattttaaattgaatgtcagtccattaataaaaactcaacaactattggtattggagcaacattgcaaaattcagatgaaaatataatagcatgtctttcaaaaccaatattaagtatgtattttatttctatacatggatggtacaatatatatactattggattcatatcttaccttgaaaatatattagtcattttcttgttgaagtcgtgtaattgaattatatttagggtaaatagcgacataagtattcaaagttttatgtttgtaagcggcataaactcaatgtttctttttagcggcataagtacccaatgtttgtaaaactgtaattttcttccagttttgttagtacagattctgttttgaatttattataagatcatttggaagtaactgatactatatatttctatctagacatgatgataaaaaatttaagccttatatgtgccttgtttaagacaatattaaagtctgcactgacaaaattagataaaaaattacagttttacaaatattgagtacttatgctgctaaaagtaaacattgggtttatgccgcttacaacataaaactttaggtacttatgtcactatttacccttatatttataatttgaataagcatgagtttagcttataaattattagattcaatagagatataacaaaaatagatattagtctttctatcattgatgaaaaaattgtcttaaacctcctattattataaaccgaagggtgttcacccttctatatacccatttaattctataatattatatctatttaattttgtataaatttatttgttttcttttcaataatattaactattctattttatatttatatattacttgttcatatattgagttatagttattttttcagtcaatatatttatgtgtacttaaattataattctattagttatttttttataatatttattagaacctaatatcagtatgtttttgtgtggttttttaaaggtaatttttcggtggttcaagcgaaatgtattgcgattgtgatggctttggactggattttttctctaggctatattgttcatatagttgaaactgattgccttacagttctgtatgcttttaggacatctccaatggagaaac

SEQ ID NO: 221663 - DNA, 2608 bp, Cannabis indica
aaaataaatatataatgaaatattattataacatgtataaaagttttaattgtatacaagcaatcttatcgtaagagtatacacttttatatcttaataaccacgtgatctaaaatcaatgataaaaaaagcttccctactggtaaggaacttatgctaagtcctaccatagtcttgccctatatatatgggtatactcttaatgggtattacccatgaatgggtaatattaaaaaaagttgagtttttatgcttaatttttctatttaattagaaaaatctctcattttttcattatatgggttgtggttgttccatcggctgaaaataaaatcataataaaacaaaattcagcaaaaaaatgataaacaaatattgagttttacttaaatattttttatataaacttattttttgatatagtgtaaaaagatgtatttttttgatatttttttaattaagtagctaatttaagcgtaaaaatttaaatttttcttttattattcgccatcggatcaaaatttaatggcttaatatttataacattaatatttatagttaaatttatttagtacccatcaatggataatacccattaagaagtattccatatatatatttgacgtaatgagtgataatagtaaatatgaagaaattaggaatcatactactattaaaaatctaaaaattaaattaaaaaaaaaacatatttttaatcttaaacttaaagtatacaatatatatagtaagaaatattaaattaaatatcaaaataaagtttaaattataattacattaattttattaactttaagattaaaatttattccttaaaaaattagaaattgttagcctagaaaactaagtctgagtagttatattgttaattagttttataagagtttgttaactctatcatcttgatttcttgtatcacgtggcttgtaaatacaaatatagttaatacagagttcaagtttttgctatactttattcttactctttgtttgtgctctgccttattctacatggtatcaaaagtttttgactagcgtcaatgtcttcatctacctctgatcctacttccgctcctgctcccatggctacttcccttgcttccattgctgctcccatggttactgtcgctgctcctccgtggaatcccttttctcattctcttagttcttcgcttactacaaaactcgatcgtctcaattttctctcatggaaatttcaagtgattccaacagtcattagtcatgatttttatgaaatcttattcacaggggttcctccaccctaatttttggttaccggagctccaaatcttaagtatcatcaatagcgtcgcgaagatcatctgcttctttcttggttaagatcatccatgtccgatgccattcttgctttagttgccaatttcataacctcattcactgtttggagggctcttgaacaaaaattttcttcacagaccaaggctcgaggtctccaactcaagggacaattctctcacattcaaagaggtggtctgacaatttcaaaatatgttgacaaagttcaggccattacaaatgcccttacaattgttggttcccctgtttctactcaagatatcgtcctgcaacttctcaatggacttggtcctaaatttaattctattgttttaaggataacttcaagaagtgatgctctatctattgaagaagttcaagcattgctgtttttcccatgaaggttaccttgaatatcatcacgccatgacagatttatctatccaaatgcatgcaaatcttgcatttggaaatggcagatttgggggttcttgaccattttctaactctcaaacagctcaagttgacaataaacatcttcctattgttcatggtaaaggagttggtcgattcaacaacaccagagttatttgtcaaatgtgtttgcgatcaggtcatacaactccagtttgtcacaatcgctttgacaaaaattggattactccaaactaggtggctccaacaattgtgctgatctcacaaaattggattttgattatgatcctcaagcacactcttccaccatagtccaagattttggagatgatcattcatggtatgtggatacgggtgccacaaatcatatcgcatttgacagcacaaatcttgacacttcagttccctatcaaggccaagaaacccttgtagtatgggatggtatgaagctcttaatttctcacataggatctgctacaataccatcttatttatattcttaccttttacatatgcactcggtcttacaagttttaattgtcactaaaaatcttgttagtgtatctaaattgactaatgataataatgtatttttggaatttcataaatactagtgctttgttatggacaaggaaacaggagatgttctggtcaaggggaagcttaaggatggtctttacctccttggtgatgaacctggtcagccaaagtcctctctgcagtgtcatttagctacgactacagctgttcataatcattcttcttatactccatcatttacttctgtaaatcaaagtgtagatcaaaatgaatcatgtactaattcagctatcaataaa

SEQ ID NO: 221664 - DNA, 1882 bp, Cannabis indica
tttttttgtgttgcaatattaccgcgaggctcaaatttggttaatgcaaatttgcgttaacattttggtgttttcaattagagcctctgtgaaaaagctcagaaaaaaagccttctgacataaaagtaatagactgacacccaaagactaacaaccctcaatgaaggaataaatcattgccccggaaaagaaccattgagtccttagggatctatcaagtcatcgaatgaacagaatgcaagccccaagagacccatattggggccccttgcttgacggaaattggatgagaaacaatcgtccactccctaaccaggttgatgaggatggcgcttacgacccaaccagatacataccaatcgtggaattagaaaactgccatcttaatcgtcgattggaggaagtaaattggcgtaatgccaagttggagagtgaaataggtgcagtaaaggcagcgcaggaagatagtacccaaaatcaagctgaccttgggaaaagagattcttgaggcaaacctcatggctcgaagaccaaggggtagaggataacccagagatatatttagaacactcaggagatgcaacttgtgggaactgaggagaacctagagacacagcctgagatacgtggaacattagacgaaaattgccaacccactcttcaggctcaagagaatgaaactcgtgcaaatccttataggaagacaaaggtgaatcaaaccttgagtggaagggcaaggtttgaccacaattatgacaagagggatctacaaggacatccgaacctgaagaagcgtgacctccgtcaatgactcagttcaaggtaaaaggattcattccatttgcaaatgcatgagttggagaataagttcagagggcatcaagtcacgaaacccaggagacaactggggcatgatactataggaaaacctgatttggaggcctcgagattaaagaaaaaagatgattccaaaaggctactcaaggatgagaagcccaacacgtatattcctctttatgccaaatatagcgagctcaacgaaactcgggaaaaaatctacctcgcacatgtataagaagccatttttggcgagccaacacctatgaaatatgtgaggcgcaagagggatccaaataagcggtgtgaatatcatggtgatattggtcataccatggaagagtgtcatcaattgaaagatgagattgaaggtctcatatcgcaaggacaacttcaacgatatatgaaatggcaggaagatgcctatgatcagtttgatttgtccaataactcaagcgactgaagattataaccctcttccgtgagaagaagggaggctttggttatctcgagagggagcgggtaacaagaattcaaggggtagttactccgataaagtaattgtgtaaaagaattgcgacgtgagtagatatcggcccactgtggttgccatatcaagctgccacatggaaagctggacgttaaccagtagcagttgtagacaaacaactaaaactaggattactttacttggaaccccaatatatgccaaggattgaccatggatattgaaacaaatgtgggagtatgtctgggattgatcctggacatcaaaacccgttttatcaaaaccagatgctcctgaaagattgataaaataagcaattgaactggggaagttcttttgagattaacgattgtaaaagacattactgatgaaaaattttaaaatccaattgtgaataaaataatcatttctttcaaacaagtaattataaagtgtaaaccctttaaaattacttgaggggcatatatgtatgattaaccgaaattgatctggaaatacatagtacaatgcaaacccatcgtttcaaaaaaaaaaggg

SEQ ID NO: 221665 - DNA, 3712 bp, Cannabis indica
gatgttgttgatgatgatgatgagcatgatcattattatgaaaacccaaatctctgtttctaactataatcctacgatggctcctaggccttaaggatttcctcaattgggcacctttgtaatccctccttgaacgagataacatcctcttcctactcttatagtgatcattagaaccataatcacacaaatttccaataccttcatcttcatcagtactactgctagtacttttatcaaacacttcgaggtcaatttgccgtcttcgtcttcttcgtcttcttttgactcttttgagtttgacccataagaaagtgcataagtactcacaagaacaagcacaaaatgtaatacatgaccatgtcattctgcataggcttcggcaaacacactcgcatatgcccaatttgtatgttaagtacatgaataacagaactgcattatccaaacaccatgatcaccaaacccaattataattaattagtaaatttaatgtagttataatgttagtaatttaacaaatttctctaattaattagtaatattctgactcaccaatgtagagcagaagaaatactaagaccaatcttagcaaattggccacacagaaattctcgatgtaacaaatgaaatcccatgttttgccacatactgaactgatgtaataacaaaatatattacagattaattaatagtatcaacaatgaagttcatattaaatatgtacaaaaagttgtaataaagattattatgtgtttatttaataacctgcaagattttccggataggaaatctaatggggaagcaaaaaggctgccaaaaacttttccaaacccagaaaagaatgattcaatcacatttcccatttgatcctgatcacgttagtaactgaaaatgaagaagaaaaagagacatatgttacaagtttatatggtgtgaataataaatagggttgtttgtttggaattgttgacctggaaaataagatagacagaagagaacatctctctttgtacttcattttttatgtttttcctttgtttatctgaaaataactgactctcgatggaagtaagcaaccaaatcaaactgcccttaaaattaaaagattatttcccccaaaatttaatggatcaaccataactgggcagtgggcattgccatctcatttcccattctaaggcccaatattgccatcgtttggcccagttcaattgcctcaaccaaatatggaaataggttttgagaaaatacacacattaaaacaaaatggagagctatctcatctggtagcatttgataccattatattatttttagatttttttactgaaaaaaaaaataatattctcgccataccatgacatgaatccatccattcctgaactggaccatgaatccagacctgcggatccccgatttgaacctagacctagactcgaacttaaaccttaacccaaatctggatccgaaccctgaaccctgaaatacgaacccaaacctagacccgactcgaaccctggaccccaggctcaaaacccagacctgagctaggccctaggtcggggttcgaggttcgcgtcctggttcgagtcaagctagggtctgggttgagattcggggttcagggtctaagtccggtgtccaggatccgagtcaaattccaatgcgagtctagggtccgagtctaggtctagagtccgagtttcatggtctagttatgtgagcaaaaatataaaatgtaatatgttagaaaaaaaaatatttttaaaaattaaaaattacattttgatgttttccattttttaattttttaaaactcaagtgtatttttaaaaaatttgaccaagccgcccctattagtttttaaaagttatttttttctgtttttaaaaattaaaaacagtttctaagttatgaagctaaataacccctaagtttctttcatttatttattttatttttttgaaaaaatcatgcaattcaatcaactaaaataatagcatgaagtccaatcgaaacataaaaaacataaaaaatacaatcagatgaagaaaaaaaattcagcatcacagttaaccttaagaacatccaatattaagtttcatctatcgcttagaagtcacaacagtaggaactgttacaataagttcattcaaccttgtagcttgagcacccaactattgtgcaaagtacgtagctatactattaacaactccctccagtcgcaaacaacttgttattcctaatcactaacaacgatttgatcgaagaacaaaaaaaactaacaacaaaacaaaaccatatcacacagacaaaactaaaacattcataaccatgccacaaaacataataaactagagtaaatgtcattttagatcctgtgttttacaaaaattatcaattgaaccatctattttgttaaataacaaaatgaaccatatcttttctaaaattgtataattaggaacctaaactaattttttgttaaaataaaacttaataataatctaatctagagatgttatgacaaaattgattacattttctccatcgcattaaaaattgtctgaatgctggttatattaaaaaataaaattgttaaaaattgaaatcagaatcctaaaaaatataaagttcattttgtcatttaacaaaacaaaagacttaattagtaactattataaaatacgaattacaaaatgatatttagccaataaactattatagcaaaattcgtttcatttttgaagatattcttgcagagcataatttggcaacgtagctaaaaataatagcttagcatacgagaaatgttgcaaattcaaataattttttttaaaaaaaaaatgctattgaaaatagactgaacacaaagaaaaatgaaattcctaaatgtatatgcattcgaaacgaaatttaatggtaaattagaatgcaatgtccgggaagaaacatgcaaataagaacaagttctgcctccgaacaaatcttactaatgagaaacacaactatatcaattgaaaatacagtgcttaaatcattatcagatcacattaaaacaagtcgttgacaagaaaatagacccccctctccccttgctcatctaaaaggcattatagtttcccacattccaattggcaagctacaaggacattgggaaactgaccacctaaaagaaatttggaaggctctgtttaacatattcgcttcggccatgtagcaaacctcaatccattcttcccttcaagatcctctcggtcacttctgtcggtgttctgtgaaaatttaccaataaaaaaaaataattatgtgttagaaaagttaatacaccaatagctatcatttcaggtttaagttatacatgatactaatgtcacaactaaatctgaaccgaactggatgatggtagatgagacagacgaaagaatgaactaatccaagcaagaaagatgaacccaaaaatgtgctcaacaaccttcagatatctactttctgaagatatattatctatcatggatctattctcatcaatcaagaagcaaaaaagcaaattacagcaggcagcagtagaaaagcaccaagtttttatgttacagaattttgagaaacatgctgctttgtagtaactagtaatgaagaatgtagtttagatgggcttacacaacatagacgtggcctcccatccactcaaacaatctcggtcaactga

SEQ ID NO: 221666 - DNA, 3104 bp, Cannabis indica
gtgatcgttctcctactccaaaaaccgtagtgcaacaccactattactgtgagcagatcgcaggaggcgttatcttccttccaacaagacatatattgtgtggccacatgttgctgatacccttccagttggccgtccaagccaaggtaactttggcatcccaattgctgttctcgccgtcactgttgcacgacatacacatcagtatccgtccaagaagaggatgatggcccgcacaaagtagcaatgcggaaggtcagtgcatctgatcctcacgtggcccagctcgtcatgctgccaaatgccgaacaaggtccgcccgctatggaggagggagatcattagggggacattgaggtccaagagattaaggagcaggatgacgtccctcctggcagcccttccgaggccaaagaggaaggagtggctgaacctttaaacttcggagggtataataaggtcggggagttagtgttcgtagagggtgacgtcttggtcgaaggggaggactacgtcaccaaggagcttactgaagccgttccgcagaagaggaaaagtgccttaggggccagatgggtgagccctccgtctagtataagtgaggcacatatgaatatcttggataaggctaggtatttgggcggactgcagtaaaaagggatgtgtgcttggtcgggtgctcacactaaacaaggggcaatggtgccttttcacccgtacttcaagagggttgaggaatattttcgcctttctcggactcagttcactgccaagggcattaagtacttgtctgcgctgttcgtcctctacgctattcgaggatggggtgtgccgtcgccacacgaggtcaactggtgtttagacttgaagtctacccctaagcagtgcaggtcggggtacttctatttctctcagccagacttcaaatggctgacgggcactatggagaaggatgttagcaagatcgggggttttattgacaagtactactttgtggaaggaatgaataccacttatactaaattctaatagatcccaatatactgccgtccaccgctcactttggcactcagggacaaggctcatgagattgtccaactgctagatgctactcggaatatcactttgttgacctcagaggacaactttgtggagtacaagctctattcggcagactttataccccagcccatgaaggggaagaagaagaagtccagggcttactggggtgagagagctgggcaagagaaggagctcattcaacttacgcgtgaggctaagttgaaggttgatgctggagccaagtattctgctcaggaatattttgagcaaggaaggaggctcaagaatattctgagcaagagaggccgctcaagaggaagaaaaccctcccgactgggcagaggcccatcgaatactatccagattagagagcctcatctacatgctcagccatcgacccctatagagggaaagggaaaggccgtcctggaggagcgagaagactcttttgatgatgatgccccatttgtacttgtttgggcaaatgctcctggcagcgtgcagagtacttcctcttgcatttattttctttgattatcatgccttcatttattttgtgctttcttctgactgcattatttttattccgtgaagaaatgtctcaaaagatgatcaaggcactgaaaaagagagtgtgggaagctcggcttgtccctccagccaagaagtctaaaggtggtgagactctgtccaaagagaaggccccagctgaagtggtcattgaactttccgaagaacaagctattgtggaccctcctacctcgaaaatcatgaagtccaaaaattccctaggagggagtttggatggatctgagcaggcaaaaggtggacccgagctgattagaagcaggtctaaaatgattaaggctcccaccccacctttaatattcaacatggagaaaaaaagaggaaagacatgttcaatcaatatgtgagcaggtcagtccctgaggtgaacgagccgctgtctggggtggacaatgatttgtctttggagctggtcatgggaggagtcttgaaagaactttgacgggtaagtcttttctgactttctttcatccttctttgtgtagttcagattttaatgcctttttttctacacagacttgtttgaagatggcgtgtgcctattcccgagctaagtcggctgctgtcaagaatcttgccacttccaacacattgcaaagggatatggacttaggaagaaaggaagctgcagatgcgaggactcaacttgagactgtgtggacggaactcggggaagtcaataagaaactcttagctgctgagacaaaagttgtcgagttgaccagacagctgcaggagacgccgtgaaccgagtaacaagaagctgatattacttctttgtcttgggacgttaccagtcttcaagacgaaagagagggtttccgaacttttctccacaggttggaggatgagaagaaagccaaggaggaagaacttggagccgaggtggagaaataaaagatctgagatggtgaggcctgaggagaaggtaaatgccttagagacagtgaaggccaatcccaaagcaaactttgattatctgggcttccaaagacatgtttctcgactactacgctgctcaggcgacctatggggatcccgaagtgaccatttccacctctcctaccgatcaaaatgttgaggctccttccacctagaatgatgatcctcccgccccttcaaatccagctgacccgtacaaagagcccgggactcttgccgtctaattgctttctttttattatcttttttttatatgtctgcttggccaataagacttcttttgagacaaggtgactgaccaagcggtctttaaacttggaatatatttttcattctctgaactactagctgatcaggcagcctttaatcccggacttaaatgcttttgttattcttaatgaatttcatcctttgtttattatcattatgcaattgtgttcgttttgttttttaccaaatgctttctacatatataggttccccccaagtgaccgagcagacgtatgactctt

SEQ ID NO: 221667 - DNA, 1550 bp, Cannabis indica
aaaaattactaattagccattatattattaataagaaattcatacataaataagaaagtatatttgtatctatttattgaccaaaaagtaccttattagtaataggggaattactgatatgccacgttttaacttttttttattttattttaatttacggttttattttggtattttctatgtgaattttgattacaatttaagttgttccattaattactacgtgtgtacctattaataataatgttattttcattgttatgagctatacaactaattatattatgttatatgtttttggagtagcaaagagattggttaaatctagtcctcctacgcgtccaggtggaatgaagttgcatagagggtcaagaggaactgagagaagactgttttgttgctctgtctgatgtgctcacttgcttttgaatggtattttatttccttttaacctccctattcttttatgaaatttttctaagataaaaaaaacagtatgaggttaggttggtcggaccagtccaattacatgtcattttcagtagtcctacgtactcaaatattcatgtgatagtaggcaccaggataattatgaattactttgtatgtcgagagtcatagagctagtttattggcatatttcatcaataagtttcatcacacattttagacaatatgaaacatacatatatatatgaaacatgcacccccaaaaatctactgtatatttatataattttgtcctacttttttttttcttgtcaacaggaaatccagaattattttaaggacatgattcaaaatgtgataaaaacaaggaaaaaagaaactatggcgcatcacgaagaacaagcaatagaaacatttgctttattatcaaacaaaaaaaaacttttttataggctattccatgaacatggtactctatatgtaactctattaatgaaaaatattatagaatgctcaatactataaatgtgtcatgtcatggccaaaaccatattatatttttttatagaactaaaagttaattgaaaattaagaaaaaataatgggaaccacaggagggatcctccctttgacaaaaaccagctctacgagtagaagttctagcactttttgctaacccatcagctattaagttgtctaaacgattcatatagcggattaaaacattagagaaagtaaaataaatcacatacttgaaaaaatgtactaaaaaaaaggccaatctagagcactcttcttatgattgagtgcctaacgacaagttgggtatcagagaggataacaaagtgatcctaattttagttccttgcccactgaagagccaaaagaatggcaacgagttccccttcagcagcacaaacagcatgtctaaaactagacatactctcccaagagccggcaatggcattcttcttataaaacagagttactagaatatcaacatctaagcttttgatgtatgtgggttgtctttttgaaacaatatggtttgcaagaaactctatgatccatatgggaaaaaagaaagaaatttaagaagt

SEQ ID NO: 221668 - DNA, 2753 bp, Cannabis indica
ggtgtgcaagctaattatgacctgcactacccccaatctcttactttgtcctgcttaatggagttagtcaaaaataaaaaaatctacctaaaaaaaggccttagacacggagaccctctctcttcctttattttctaattttgccatgaggtcatgtctaagctgatttctaatgagaaatttaaaggaaatcttcaaggtataaaggtctcaagatcggatcccccaatcatccatctcatgttcaatgatgacacaattctttgctcatacaaatgagaaaaatgaaagagtgtttcatggttgtagcaaaacctacgaagcttgttctagacagaaatgtagtaaattaaagtcgagtattttgttctctacaaacatgagtcagcatagaaaaaatgtggtcctcaaaattctagaagcgcgaaagagttcaaaagaagaccaacatctcggtaacccttttatcttcaagcgaagaagtgagaagactacaacaaattaaaagataagttgatgaagaaaatggaaggatggaaacttaaacttctctcattctctagaaggattactctagttaagtttgtggtgatgaatatccttttgtattcaatgtctacttgcaaagtctatctttcaacttacggagaacttgatgctctgattaggaagttttggtggacaaaggtattgagaaggatagatataaggcaacagtaaggtgggacaagttgtgcctccctaagacccattgtggattgggatttagacatcttgaggacaccaacaagtttctcctttctaagttggcgtagcatgtggccaatggtttggaaagaacgtggatgaaatgcttgaatgaaaagtattgtaagaagaagtattcttgggaaattgacatgaaaggaagtgattcacccatgtggaaggggatattctctggtagaggtattttttgcttagggagtctggatataccgagaagaggggactcaattgatttatggaagcaaccttggattctatagcctaattttgaagagtttcttgatttgacagagaaggttaaatccataaacccctctctaaaaaaaagtagcatatctttcctctcaaggaaattcttggaatctatatatcctccataatcttttttgaaaggagcttggagatagaattggtactattccttggttctcggagcttatgtaggatactatggtttggaagaactccactgatagagttttctcggtcaaacatgccttcatagaagttcataggcttttagcaggggaaagcaaaatatttttaaagttgatttggaatcaactgattcacttcagacttacaacaatgcttttgagggttgttgtaggaagtctcccaacaagagacaagttggattttatcaaagacaaatcttgcttattttgttaagttaatttggaaactccaattcacctttttcgggagtgtccttttgccaaagccctctggttttatggctcttatttgattttgcaaactaatcgaatgggattagagatcttagaaattttagaaggtttagctggtggagtttccagtgatctaagattgtgtttcctacattttgttgggtgacttttgagtaaatttagaaagctagaaatgaattagtcttcaaaactaattcaataaatatctcttgtgttagatctaagattctgatgtgatttgaagaagcagtcttagtgcaaaggaaagtacctggatagaaagattttgattggtactggaacaatctgcttgatcgatgcctcgtggaaggacagattggctagtgtggttgtggaatggttcgagaggagtaccgaccactagtaggattgcaacatttccacctttttctttagatgtcatatcctaaaaaatgcaccagatagcctttttatcaaatttctacgtaggtgatttaatttgaagatataacagatgcaaccaaagaaacgaaagtgactaactttgggtttcattattttccataatttctcgaagagtgatacaaagacaagctttggttgaggaagcatgttaatgatatggattgttgctctcattccttcagcccaatatctacatgacacattctttgcatgtaacatgcttcgacagacctcaacaaggtgtcaattcttcctttttgctacactattttgttgttgtgtatgtggacacatcaaataatgacatatcttatacttttgtaagtattggaagaactcatcagatgtatattctcccccattatcagtgtgcatgcatcaatcttttcttcctctacttctccttctattttttctttaaattccttaaacttctctaaagtttgtgatttttctttcataaagaaaacctagacatacttggagaagtgtctattaaacgtaaccatgtagtgaattctgttgtttgacgattgcttgactcatccaaagacatcacaatggactagctcaaaagaggttgcgggcttgaagttcaactcattgtatggtaattgatgcaccttcccatactgacatcaaacacaaacaatgtcacttttgacattaagttttggaagacctttgataaccattttctccattatcgcatttaacttgtcgtaactaatgtgtcctagtctggcatgccacaagtatggtgttttattcgtttaaaccttatctacgtaagcagtctcaactaacatagcatagatagattct

SEQ ID NO: 221669 - DNA, 2298 bp, Cannabis indica
acaccagcagtgtgcaccagcagtgtgcaccaacagcagggaatcatttcttgattgtggtcctacatcaaattcacaaataccgttagaccttttctatgtaatgattggattttattgttaggatattctctctgctgtacaattcaaaatgtaacagctgtacaattgtcattggccaagtgtaaaaccttttctctataaatcaagtactctggctcacaaaatctttgagcagagttttacacattttattattaccctaaaatttaagtgacatgtttgagtatatttccattgaccaagaacttgatgtgcaacacacacaacatcagcagccgaacaagtgcgattgttccaaaccaactcattgtgagctttccaaattaaccagttaaccattaaaatttcttcaataacatcacctttatatatcgagaccaagctgcaacaaaccagtcatggaaattagtagcaatcgatgaaggtagagccacgacaaatctgttccagcaagatttggagaaagggcactcaataagaaggtgagaaacaatttcaacagctccattacagaacaagcaatgagattcgaccgaaacatgcttgctttgtagttgaacacgagtcgccaaacaacccgatagagcaagccaagcaaagtgaaagacttttagggtgattttaacttccaaaagtgcttccacatattcgaagcttcatctacgaaccaactgcctttcgccaatttttcgccaattgaatgtcctaacaagcaatttttatagagtaaaaaccagtaggttccttacaccagtacatgtatcaccatgaggaaaatcactaagaggaatactcatgatgtgctgaacatcccttgagttgaaaatatcatggacaacatcaatatctcattctctagtgttggtcttcattagctgataaactttgtgatgatgtaaactcgggtgagtagaagtgacataaggattgtcatcagatggcggagccaaggcgtattgagagtatttgtctttaaacctgagccaatacgaatcctagctcctgccttgaccgggtcatgggactcgaatatactttttcatatgaaactaggattgccccaaagagatgtcgacagaaaaccaccttaaggatagtatcgagccttataaacatggccaacaggagattgctcatttaaaaggaggcgccaaccttgtttaccaggaagcaacaaattatagtcatgaagactacagaaccccattccaccaacatctttatgtttagttaggtgcttccaactcatccagctaattccacgggtgttattagaagaagtgctccaccaatactttgacatcatgccctccaatttagaacatgtctccagaggaaaaagaaaaataaacattgcataagaagacagagcttgagcaacaatttttaataacacttcgcgacctgtttagataagagtcttccttcccaactctaaattcttttctgcattttttcgttaagaaagcccaagattttatttttatttcttcccatcgtaaaagggagatccaggtaagtacaattttcatcagcaatccccatattaagtaaagaatagattctattttttaccatgtttgttgtgttggcactaaaaaagataaaggacttgcgaaaattgacttgctgccccgaagccatctcaaacaattgaagaagtcttatcacattagacacctctctttcattaacacgacaatatatatggatatcatcagcaaatagcatatgtgaaacaacaggatctccattagccactttacaaccttttagatgaccgagtctctcaaactgcttcaacactgatgagaatcctttcgcacaaattaaaaataaatagggagacaatggatccccttgaagaatacctcgatgtggaataattgggccaagacttttaccaccatgaaccacattgtactccaccgttgtaactgtgaggggaaccaaatcaacaaaacgactcgcaaatcccatacgaagcatcatggcacgaataaagtcccattcaattcgatcataagcttcccttaagtcgagtttcaacgccatataaccatctttgcctttgggcttgcgtttgaggtaatgcataacctcaaaaagcaatcatgatattatcagaaataagatgacccgggataaaagctgattgattttcagatataatgtgatgaagcaccacctttagcgtattttcaagcactttatagatcacattacaaagtgaga

SEQ ID NO: 221670 - DNA, 1535 bp, Cannabis indica
aaagaaaaaaaaaaaataataatatatgaagtaattctctttttttatgactactaaaatctaaagattttttttatgaccaactccgagtgcatgcctagtccgactcaacccagaccccaactctgatcatatagaaagcccttagtttacacctcccggatttttgactcaaaaagaggacttttgtttcgacttggggcttatacagttattttttttactacttaatgtgtatttttttttttaaatggcttactgggttttaaaagttgtttattcactctattggttttttttttctttttcatatttgactcatgtggtgcacaatgataatattgttgctcataattatgcacttctgaattctgatagaaaactatatcagttagttggaagaaaatccactatgcatgttttatgacatttatgctataatttgttcacatgtcacttttcctattttgaataaacaaacaaatatcaacagcactaaaaatatcacaactacattttccctgtttgggaataaagtaacaattgtcaattgtcatcaccacatacctttcctactttggcaatattagatttttattttattacaaaatggaatgtgtaaatgtaatactattacttgcaatttaaattctttataaatttaccagtgggaagtaaatataatattatctaacattcattaatgaactatttgtgtgcattttataattttaacaccgagtcaattgattttgagataaaatcttatagtgtattttacaaattttaacatccaaagaaaagtagagcaaaaaaaaagctaccaattccaaaaattaatccaaaaagtaaagcaagaaaaaaaattatttgtgattaaaaaataataaggtaaaaatagccactaaaagttcaaaaaatcaatctgaaaagtatagttaaaagagccacctgtgattcagtgatatatgtagccaaaaagagccaccaaaatttaaaaaccgattcagaaagtagagtcaaaagagccacttgtaattcaagaatagtgagccaaaaaaatacttgtaatatggagttgttaagatgatgagcaaaaaataactattatcttatgaaaatattaaagaatctcatattattaaaaaaaggtaaatactattttggatcctgtattttgcaaaagttattgattgaaccctttgttttgtcaaatgataaaatagaccatgtattttccaaaatgataaaaataggaccctgagtttaatttttgacaacttttttttaatataaccaacttgaagaaaattcttaacacaaacagatacacaaaatgtaaacaattttgtcataatacttttagatcggattattattaaattttattttggcaaaaaattagtttaaggtcctatatgtaccattctggaaaatacggtgtctattttatcatttaacaaaacagaaaattcaaatgataactttacaaaacacatgatctaaaatagtatttatcaaaatatatatatata

SEQ ID NO: 221671 - DNA, 4699 bp, Cannabis indica
tgatggtcgatgaggtggaactcaaaattttgtgattcccatcttgattgcaattagctctttgagtgttgaatgataatggagctgggaatctttgaagtgtccactcttatatccacatattcatccttttccctgctcatcttgctctaaaaggtcaacaccccaatgtttgtcactagcgtctatttgaagaacacgttttctgttagagggaatctataaaggtggtagattctgcatgatttccttcaaatttctgactacaatggtttggtcatgtgaccattcttgtctattcttttttagaatatttctgagtggccttgtcagtacaaacagttggggaacaaagtctcgcaaataattgatgatgtccaagaattgttgcacctagaatttcgtaagattttcatatgggaatttgagtatttcatgggctatatgtggttgggcttcgtattgtcctttggataacttcatcttaagaaattctatttgcatctgtccaataatcattttcttttcagataacatgataccatgggctttagtgatagaagcaaattgggccgctaataattgatgggcttttgcatcaggttaaaagagaaaaatatcgtcaataaagatgagagccttttccaatattggaccatatatcttggtcatagccttttggaataatgaaggggcatttttgagcccaaaaggtaggacggtccattagaaatgatgatttgaaatgcaataggttgttttcggttgatcatctagtttgatgtctaaatgccaaaatcccgcttttaggtcaaattttgaaaaaatatgggctttaaacggcaaacaataaattcttttttggtattaggaatttatcacttgctaagaactcacttaggggcttgtagtttatgaccaacctttgctttcctcgagcttgctctaatcgattcttgacataaaatacatgacatgcccacagagaggaagctgactctttgcattcattggacgccatttgttgatgttctggattcatgcctagttgactagcctttgtagggtttatatcttcattaagcttataaggaaggcttatgaagaactcttgatttttccataaaggatggtcacatttcttcaggaactctgctgattattggcacatgagactttgatgtgctctttcttgatttgatgaaatggattatggggcattaagaaatagtttggtatggcttcccatggagcaaaattttgtttgtaaccaagtccattataaagaatacgcaaacccttcttctttgtttaaagatcaaatccaacaattaagtcttttttgagtaattttgatccaatgactctgtgagtaacagaacaccctgagaagaacaacaaccaaatcagtttgttgatgagtctgtgcaagaaatacctccatttgcagcatgaaagtattttttttctttcttccaatattctttaggaagaatatcagggttcattattgtgtatgacgctcccgtgtcgaaaaatcctgccacttttattggcttggcatattttgttggaagaaattacacagtgatgacaggggatggttgcatcatgtgaataatggatatttgataacattctggagtgtccgaatcactccattgttcaaatgtactaagagattttgagttgaattcatcatctgtggagaagattgactctatgtcattttccttgagagacatcccagtcgtttgttgtatatgtgagataagcttgactgtttttcctttagggcactgttttgcataatgtccctttttgccacacacaacatatatcatatttttaacgaaagtcgcgcttccttttcaaaaattttattttacgtcctttgtgctttgagaacttgaacgttttgaacttgtttttgttctttgggtttttacaagaatacgaagatttagaagggcatttgatgagtaaatctcgtttcctaaaaactttacctaattttttggattgcgtcatacattcttggagaaacttcttatgggatcacattttttcaagggcctttaagacttgtaggaaattttctccaattgtagcatctgttaggctttttctcaatctagagagtagcctgaaagtttcttcgccaagtggctctggaatagaggaaaggaaggcttgcttcagatttggatcatcaatgccacctatttggtagaatggtttagtcatttttatgttatgcttttccaagtctcttttgtccattgaacagcacttgagcttgaaaaactctgctctaagtttttaagttacttgtgcatcttggcgacaaaactcgacatagacatggtgtagggcatttgtgacagatgggagttgcaagaaagtcatttgtctttattcacctaagcttttccaccaatcttgcaaaattctggtgaatcttgagacaaaattcaagaggatcgtccctgtctgtgcttgtggtttttgcgtttccaagctaagccaagcttgaattcttagaatctttctcgccatttaaatgggggaatgtcatcaagagtaaaagtttgaaacttagaatatttactcttttaatgatgattggattctggttttgttgtagctgattcttcttcttcactttcatcatcacttttaaaaataggctcggtttgagagtatgcttcttctgcaaattgagccataaaatgtgggaattacaaaaagtaacacctttggttagtaactaccgttttatcataattcttcttgaaaaaaatgaaaaacttgtaggaattacaaaagttcacataatacaaatacttaaaccttgaagaagcttatctataccactaacctcgtgaaggttaggttaacgttgtcaacactgtttaatttgctgacacaataatggtccccaatccaattatcttaattcctttaaaatagttgcatttatcatcacagtagaatcggtgtttgtgaattgtttcatttgaatatgagaaaatctagaaaactcactctccttactcataccctaacttttctttactaattcatttattaaaccaagagagtcacaaaaactcaaaatccaaccagttatttattcatgatgtctttgttgttttccgtatgttaacttatttcttttcgaccatattgcctgtgaaaaaataatcactctcacaaaaaaatctttatcattaatttcagaggcatagagtattatttgctcaaaagattaatcttctttagccacatggaagaaaaggtaacttaatgaagtctaaattccttgagcgcaaggacaccaaaaaattgcatgtaaattttaatcacccatataatttcagataggacatttattatggataacaaccttacgacgaaacgaacaactcagagtggctaaaatctcatggaaaccttgccacggaaaatatagaatttttgcaaaatttttaaccccaaagtttcctccaccatattgagaatacattactagatgattatggtaagcccttattcactaatcaatgccaaattataacaacttttaactgaatagttaccatactctgtgtagtgccaaaactaattattctcatgctcaaaaggacttaacgggatcgagaagataagctctgcatcttgtgaattgaaattactattaaccttactaacatcctaacattctgatggatcacaatgagttctgaaactgtgattacattaaaagtgggtcttgaactaggaagtaaagatggggatcatggtaaccaatgatcattaaataccctcataaaaactctattcccaatacatcaccttaaccattttagtaatctcccccataaaatccccctccatgtcatagatgaataataaccctcacttgcctccgaaatggaagagtctctaaaataccttgccttacccccttgagccaataaagaggaaggtttaattaaaattctccatgcttgttttgccaaaagagcatgattatattaattgaaccttcaaaaacattactcatcatcagtcttaggttgccacatcttatcccaagctctccaatggagactccgacctgtattcactaatccccacaaatattgagctattaaacttttcaatctcttcatttagatcttctagaattcaaaaacatgacattaaatatgttgtcattgcttggactactgcctttattgaaaactctttacccccttgtgagaaattttttgtactacaacatttttactcagtaccggcggaagtaataccggcggagccaaaccgccggtattaatgggattattaccggcggaaaaggcattccgccggtattacttttgaataattaaaaattaattaaatatttatttaaatttagtattcccggcggaactttagtattaccggcggaaaatccgcctctaatagtttgggcgggatttttaccgcccaaatttttgaaaagactaataccggcggattattgccggcgggttccgccggtattagtcaggggattctgaccgttttattaataccggcggaacccctattaataccggcgggtcccgccggtaataaatgtctatataatcccccccataactcagaaaacattttccattttcccactccatttcacaccacc

SEQ ID NO: 221672 - DNA, 2730 bp, Cannabis indica
tataagatcgtatccaaacttctagcgaaccgactgagtggggtgttggataagttgatctccccaaatcaggctgcctttattaaaggaaggaacatagctgaaaattctattattgccaatgacattgttcatgatatgaaacggagaagaggaggtaatgctttcgcttgcatcaaatgtgatatgtcaaaggcctatgataggcttgaatggaatttcctcctaaaggtgttaaaggcttttggattcagtagtcatttctgccaaatgattatgcattgtgtgacctcagtaagttttcaggtgcttcttaatgggggaattacaaagaaatttttccccaagaggtgggtgagacaaggggatcctttatccccacttctctttattctttgtggagaggttctttctagaatttttctggctaaggaggaggaggggtgtctcaagggtttcccaattggccaatcggggcagtccataacccacttaatgtttgctgatgatctagtggtctttctaaaggctgagaatgatgtgctcgactcttttctagagtctatggagatgtattgcagatggtcggggcaattgatcaatgttcagaagtcaaaagtctatttctccaagaattgttcgaatgtttgccgtgaagattttcttcacaagctggggtatgaagagatgaaacggggagaaaaattcttgggaaatccttttcttatcaaaggtagaggttctgtggattttgatttcattgctgaaaaaattagtaagaggcttgaaggatggagggctaggctcctttcgcaggcggcgagaacgattctagttaaaaatgttttggcgtcaataccactttactctatgtcgacttttcttctcccgagaaagacgactgatgccattgatggcattctgagaaaattctggtggaaaggaaatgttcaagaggggagatttcttgcattaaaggcctgggattcgatttgcaagcctaaaacctgtggaggactcgggtttagaagaagtgcggatattaatttcagcttaattgctaaactgggttgggtcatggcttctaacagtcagtccctttggaagtcggttcttgtggaaaaatactgccctcactctgatttaatgtcttcgacgatcccggcttcggcttccttagtggcgagaggcatctgggcaaccagagacttcattgcggataactctatctgggcaattgggaaaaattctcaggttaatctctggagtgggttatggtcgtgcaaagatggagttgtttgtgacagtggagacttgaatccgatgtgcaaagtggatattactgcgggggatctcgatgctgaactctggggagggatgggatcaaaataagcttgtcttgtggcttagacctgaggcgagttaatcggattggaggggggtggattttgacactttactgaatgaggacattttgtattggaaatcttctccggatggttcctttagtattaagagggcttattgggacctcaatcggtcgcgattctttgagaaagatgctattggtagtcgtatttagaagttgaagatgcatgaaagagtgaaacttttcctttggaagttgtatcagaattctctcccttttggctgcaaatttagagagatttttggtgctcaacctggcctttgtatgttatgtggggaaagtgagggtgacacagtgagccattttgttgccaattgtgctatttctagacaattgtggttttccagctgctggaacattcggatcactaacttctctttggttagtggaaaggatattgtatcatggcttattgatcctccctttgctcaggtaatgtcgactgaggagaaggctaaattctctttgtttggggcaattctgtatttcaagctgtggagggttaggaatgacaattaccataacaagacctcgatgccatatgaaatgatccaaaacatggtgatgaggagctaccgggagtacataaatatcatgactctggatattgttcaggaagggactaacaggggtcctgctgcaatccattggggccttccgagaccaggaagaatgaagtgttttgttgactacgcatctgataatgatacaggtgcagttgctggtgtcatatatgattgggagggctcggtcaagagatttggtgctaagaaggtaactgctgtctcttcttttcaaggggagctggaggcgattgcctttggtgtggaactggctcgggcttacgcagaagtgggggtggatttccattcagataattggcaactggtgaattctttgagcacaggtcgaagtctttggtggaatgcaagcttctctttcaataaaatccttagggagttagatggttttgattgctctgtatcttggatttctcgtagttttaatgattctgctcatactctagctaggtggggtttgtcccataattgtaatggtgcacttcgtttctgggaggtgagtccccatgtgctcaccaaaatgcttttttcggcttaatgaagttgtttttctcagcaaaaaaaaaaacaagcactctattaaggtgagagtgaaaatttattcaattataacgtccgctattattaagttctgaatacaaataggattccctaaccactaaatttcactttttcttttgtcaaagtaagtttagcgcaacaccattacaagatctgcta

SEQ ID NO: 221673 - DNA, 2316 bp, Cannabis indica
tatacatttataatgtgttaaaccatgctaaatcttctaatgatactttgttaggccatacactacgtattatatttttacatgtgtttttccattgctgaataatagcattcggtttctcatctatctgctgccaaaatttcctattcatagctttccaaatgaggaacaccaaggcagtaatagcagctgctataaccctcttttggaagccaaaagtcttccttcgtccaatgcttttcaccaagctgtccaaccgggttgctgtagccttccatcccagccatacttttgtttgttgaaggcagtccaaagcaaaggggcattcaaagaataagtgatcacttgtttcaacacctgtaccacacaacaaacattgcatatctgctgctacattgaaccgaaacaacctttcttttgtcttcaatcatttttggattgcaagccatgttacaaagctatgtttgggagtattaagtctaccttaaacttcattactccacttaacttggttctcattgggacataacaacttatatccttaaaattctatatctgctttgaatgaaagaggaaggagtagttaaagttaaaatggtacctttcaatgcaactatcttcctccaataccagctaccttgttgaggagctaaataactccaccattgagcttctttgatatacacactatggatccatttgacccatagattgtcctttttagttgcaattgcccacacatatttaaacatcactgtcttgttccattcagctactatcttaaagccaatatctcctgctcctttaatttgacaaatgttttcccaagcaattcgaccctgtccttccatcaattgctgccctttccataagaatgccctaaaaatgacttctatgtctttagctgaacccaaattggcatgatgtggatgttttctttcttgaaattaacattgggatcccaagctcgcataatcaccgagcgtttgttgaagaaaatgtatcctcttaataaaacttggtcacgatcagcaatgcttctaaaccgaaccaagaaaacagaatgagaaatcatctccaccatgtctatcttgtctttccacacccgtctcacaaaaccatccaagattgacattgggggatttgccccaagtacatagcagactattgaaggagtccaaaaatttacctcttcttggatgtcctcctttgtgattttgactctttgtttggatggagaaccaaaaatttagagtacaaattcctaattatattaccagatctaagtataggaggtataacatccttacctcgtgaatccgcattcgtagacatattctgagcttctctgaattgcttggcttccatgaaatgtgtaaagtccatacgaattgcatctctcctgatactgtcactcgattccaaagcaagggagtttgcaacctccttctccgcattcatcaattcgtccgtatcatcttcttcgtcggataaagtaaggattcaattccaagaacttaatccatggatttggtcttcttcacatcagcagttgagtcaggatcgcgcttcttcttcttcttcactggagatttgggcttactatgtgttgccctcatctttgccatggcaccagctcggggagctgagagaaagctagagagagaaaaccctaggacctttattcttaccctgacgagatattactcaatctttatttgcatattaaatattacttgtattttattttgaaaaatttcaaactactagtcaaaaacaccactcagagtttagtacgtcttcaaccctccttcctaagagggggaatttcttgaagtctattgcatgtccaacttagttttcaccttcagtcttgaagtgagaaacttggatttcagtacgtctttaaccctccttcttgaaagggggaattgcttgaagtctattccatgtccaacttgcttttcacctttagtcttgaagtgagaacagcgcttggattttagtacgtctttaaccctccttcttggaaggaggaaccgcctgaagtctactacatatccaacttggttctcacaaaaagcacaaccaatatgttttcaaccttgtcccttatttggataccattgcagtcgctttggtctattgaccatgttaataggttttctaaaaacagttagaaaaggaagcacgcctggaagtcctccgcatttgtagtagctctcttatcacaaatttgggaaaaactggtgtaattctgagccagctctatactttggatagaggaagcatggtctaagtgctagtacaaatcca

SEQ ID NO: 221674 - DNA, 2427 bp, Cannabis indica
taatctcactgtaccgttggacagaaagatcatcacgatgattcttcaacctcttcagttcggttctgcacttattaattctcaacttgaaatttcctgtgatattcgacccccacttggataatttttcagcacaaagggcgatttttccagccacagatattcggccagtatcattccaacaatcctttactatctctaaacacataggctctttgagccaagcattctcgaatcgaaaacggcggttaggaatggctttttcaggaagaacaaactcaaggagaatgggattatgatctgaaggagaggtttcaatattcaataaccgagaatgagaaaagtattgataccaacctgaagaaactagtgcacggtccagtcggacttcgatccatcttgaagttccccgccctttttcccaagtaaaagggtacccaacaagttccatgtccaccaaatcgcaatcgctgagagtctgttcaaaacccgttattaaccagttcgggtagggaacgcctcccttcttgtcgctttgacttagaacattgtttaggtctccaataatacaccaagggtcattcaaaggactcaccagggacttgattaaattccaagtatcctcccgttgtgttctctgcggttctccatagatcccagtcagtctccagttttgttcaccattaatttccacaagaaaatcaatatgattttgagaaaagccaacaattctaccatcaatgttatttttccaaaatagagctagccccccactccttccttgggcttctacagaaaaaatcccttcaaagcccaaaagtcggcccacatactcaactctagctttattacactttgtttcacacaagaaaataaagttgggtttcttttgagtaacaatctctttaaggaattgaaaagtccgttggttcccaagcccacggcaattccagctcagaacattcataattcttggcgggcctgtgatacagagcccgccccaacgaagttttttgtctccaatgaactacttacaattgtactctccccattagcttcaatcggcccatcaagtaaggtattagctaaccttttccttttagaatcaataacaattaaatccccatccatatcctcattaatagcctcgtccataccaatctccctaggaatataattagcaggttttccttggtcattgattggtgatttgccagcattgatactcatatcagcaccattatgaccaccttccaatcccccagatcgtggaattgccatattaatcccttgattgaagccaccaattacgcctcctgatgttgctcctttcacccctgaagcttcaccaccacagtcaccggaatcttccactctcgccattaaaccttgtctgagccacctcgaaccgatagtgtgttgtctcctccttggcatggctttcaactccaaactatatggtttcttaatcagatgaggcggagtatcaaataactttggacagaatttttcagagtgtccaaggattccgcaaataaagcagaacgttggaagatcctcatatttaaaattagcataacacatttcgcctcccttcttctctagcttcattctgcgttttaatggtaaatccacccgaaccgcaacacgaactctaaggtaatcacgccatattcccatgaaattattcttgtctgcctctacaaaggtacccacataattcccaatatccttgaccacttttgcagacataaaaccggttgacataccgtgtaattggatccaaaaatccagtttgttcggcatcaccgatcgtggaatctcaccttccttaagtcttgaaaaaaccaatggtactctatcaaaggtccagggactaccctccaccaccctgtcgatatcaatcggatgataaaactgaaacaagtataagttctcctccaattccttcacaaataagcctctccctggtcgccacaaagaagccatcttgtgttgcatcgccatgaaatctagtgttcgctcagtaagaaaccttcccactagacaccatcgatcatcaaactcggacaattctttttcattcgtatcatataacaacccaccatcgtcatcgtctcctgttagcgtgatatgatcacactccttctccaaactccattaaatcctgatctgccatggctcacgtaccagaatgtaacaagaaaaaaacaagacacactttactgctgactagacagagagaacacaggtcacaagaccagactaatgtcttcttttttacacatcgaaatatttacttttaggtgatatacgttataatcacagtataatagctattaaatttttgaaaattttgaatggtttacaataaccaaaaatagattttctgatatattctaattttctacgcgtgttcaaaaaact

SEQ ID NO: 221675 - DNA, 3240 bp, Cannabis indica
catactatcgaacctttgctaaaatccctactaactttttcttcatcaagagaaacaaaaggagtgtagagctagaatttatatgtaaacatttgtataacttaacactcacctgtcaatctaatacaacagactcgtgaactaggaattattaatacacgaaccacataaaaactacctatctttatttattactttatttctttttaagttctatttactcgtttttgaaaatctcaaaaaaacaaataacaatattgagtaatataaatcccacatatcacgcatgaactatgagtgattgagtaatttgtagaaaactcatacctaccaaatcttcaccttaaaatatatatattttttgtaattagatgtaattgattgaaatttatcaaaataaatataaaaaaaaatatacatatatagaaatagattaataattatgtcaattttttttatgacataattatctacgtgtaatgtacataattatttagataaatatgctacgtgtaattgttgcaagaattccatatttttttgattgaatgaattctataaattcttgtcggtctatttcaagatacactgacaggctttcttcacctcatttttaatgtccgagctagtagatgtattatttttataggtacatcaattaatatacttgatttagtttatttaaattaaattataacaaatatcgatcttttgttgaaagaattacaacaaacatattttaaaaaaattatatatattaatctacgcacttttattattaagttttagagaaaaaaacgtgtctaaatttacactctttaattacgtaatattttttttttctttctattttgtacattaatttaaagcgcatgtaatttattatttattaaccaattaatttcactgcatttctctgtatttagttgtagatttctggattaatgaaagataggattcattgtatttgtgagaagcttcgttcgttccctatatatgttgaatttcctccctcctggttaacattctacgtattctactattccacgatcgaaaagaaagaaaaagaagtaacaataaacccataacgttttgtttttaacgaaaacagccaaaaagaacaaaaataatgatccaagtagtgcatggacatgttaaattcctataaataatgcaacatgcattttcctcacaacatctactcaaaagatattccttttgaggttcattacatatattttataaaagtctctatacaccccacgaacggtcacatataatatatatgtatataaatcgtatgtgtagtatataattatataaaaatatgtctttaataaattatcatatatataagtttggatttaataattacatttgtgatacctattattaagtgataatattgtgtttcctatttttttttaaaggaaagtgataatattatggctattagtatatatataggaattaattcgtttttttttttaaaaaaaaaatcattaatcaattttattaacgacaatcattcaagattacatcactaactaaagtcagaaaaaacattgttactcctgataacacgatcaataacaaaataagatgctctagctaagtactaatgaacactgttccaagatcgcctaataaaaaaaatgaaagcatcattcaactcctctaacatcaattttattaacgacaaattttgttgttaatataaagagaaattgtaaactatttaattttatatgattttataaattataattatattaattattttgattcttgtttatttttgaaattttttgtaataatttacactatcaaaaatatgattcaaatatatacagttgcacatataattattttaatttgcacgcgtgcaattataatagtcaccacaaaagttttaatttttagtcacaacaaaacttgtggctaaaagtaaaatagttgtgactaattacaaatcatcatttttatattgtaactgaaaagtccgtggctaaaagtattagtcacacaaattacaaattgttgtgagattaattaatgtgtttttagtcacaatatttatatgaataaaactaaattagtgacttgtgtttaaatactatgttttagttctaagtaatttttgttgtagcgaaaagttacatttagttaccaaaaatttatgttgtgactacaaatttgtaactaattagataactgtttttttatagtgagtctatattttaaactttatttttcacaccataaaatatttagagtttcttgaaaacgaacacatatgcttattacaacaataatatataacatcattttttcaaaaaattaatatacttagaatgtaatttcttaaaggatgacaaatagtaattaaacgccaatacggtaattagagcaaaaatagtactgcacctaattaagaagctctctctctctctctctctctatatatatatattactataaaaaaaaattaataagtacttattagtgcgtgcatttaaatatccaattttacatattttagtttaataataacaaatatacaaattaaactactataatataaagtaaagacatgtttttggcagcttaattaaagtgccagaatagcaatatatatgatcatttaaatataaggtttggtaagcttcctggggaacaggtaagaagttttcccagagtttcttagtccatccaaagactttgaagaaagaaagctcgattaataatcaattttttttaacaatccatccaatagtctttttaacaaattaattaatgaaaatgagcgtcacaaaatgcataattctgaatacattattctagtaaagggaattttatatcttgtatattcttgtactaatatatatatattaacatataaattatatatataattgtctcttggaggaagccagcataacttcaaggcaacttcccatgccatttgcaattattctaataataatacatataatatagatgtgtttatgaacttgactaagacactgccgacaacactggctattatattttaatgttcattgattaataaattaatacacagttgctcgattatgtttttcaaaaatatttcttcaaacaaatattaattggcggagttcgatccgaattgaagtcttcaattaagtttatatatattgctgtgaaaaagaaggtacaattattaccatatattatactttccaattattattagtt

SEQ ID NO: 221676 - DNA, 1554 bp, Cannabis indica
aaaatcaaccacaataaaaaaaactcaaacatattattcttaaactaacaacgatttttttaaaaaaaaataccttatggggatttagagttttgacgggttagatggcagcggaggacaaattatagatggcgacgaaagacgagatttcggatttccacgagttaggtctttgggtctttgaatattcgttcgtcgaccgtcgatgggtagactgagatgtctcaacaatggaggatgggatggagcgtcgatgtaaggcttcaatcttagggtcttcgggtcttcgaccttccatcgtcaatggagtgtcgctaccgatggagaaaaagaatgagagagacaaagacggagacggagtgtcactatcaatggagaaaatgagtacgagaaacaaacaatgaagctaactgtcaagttcttttagaaaatgtgagagagatagagagaaagatatttttcaaattttaaaacaaattaaattaaaactttctaagtatagtgtagaattattagaataaaatggtctagtataattagaattttattttttgtaataggattttttctttttagtagtaaataaaattttccgagaaaatatcagttctataatatttatttatatatatataaaggagaagtatgaggcggtgatgtggcactctaaaatctctctaaatgcttctatcaattatctccttaattctttccttttttaatttttattaaatttataaatattaattgattaattaattaaaaaatatttatataaatatctaaatttctataataaatatacttcttccataacttaattttgttcaatataaataataaataaataataacataaccctataaatctatctaagctttcttcctccacgtctctctacctaaattaataagttaatttaattatttatgattgtgtactctttataatattcttttttaccccattcaatgcaatatgcatgggagttttcttttatgaatagtcaattgatgaggattaataatcatgcatcatatgtcaaggtatgttttattttatctttgataagaattatacttcttctaactatctctcggtgcttattattttaacaccgaataaatttctattagcgcaaagattttcaaaagttaatttctttagcaataaattttttaatagcaaagttagtattaatcttcctattttattcttatgcttcatattaattgtgtggataacacatatttgtttagtatcaaactatcaattagtcgctacgtaaatattaacaagtttactttgtattagtggttttgtgaacatcaataacttggcagggtcattctctttcttaattatttatttcattttcaagttatttttctcttgaagtgatgtcttttatttataatctgaatttataaggaaaatttcactttttggccttaataatacaagtcatatcaaaatttatatcctcccttaatttatacaaattgttgggttttatgccctaaataaaactctttacaatctgattagttatc

SEQ ID NO: 221677 - DNA, 3389 bp, Cannabis indica
ggggaggataagaaacaatgatgccatctatcatcaacacacatttttaagttttacattaaaaatagaaaaatatgcatgcactaccaataaataaataaaagaataaatcacgtcaatcagaatagtattgagtgagttatagttattttactcaaggttgtttaacactcgacggtcacgtttcaatcttgcaatggaaaaagttcatgatgtcaacctgaccactagttacatgaaaacgtgctgaagtcataatttttatagtctaagtgctatgatttcatcacttagctaattcctttgctctggttaggttattcactagttctcaaaggttttgctttttcacgaaatcgagtgttttagaatgatccaatttgcgaataaatcgtccatttattttactttgccaaaaaggtgaaatactaaagtatgaatttagcttgccacaattcgtagatctcatttatttcgtaaaaataatcgaatgctcgaaagggatctggatttggataagcataacctaacgcactaggccaggtgttaacctgggcgttgggtgcctatttatgggcttccggagtgttgttttggtacttccatgatatttgaatttgcaaacgagggctcctcccctgttttggaccaaaataagaagaattccataatagaatttgtgtcagagcagtagaaccatgcgcactaggttgaatgtcaacctgggcgtaagtgaccagtgcctaggtcaacccgttggttaggtgttttggcccctagatggtctcatttgctcactgagaacacttgtatcttcattgttggtgaaaatgaagaaaatgctcgagaggtttctcagggaaagtccttagaaatgacccaggttgacaaaatgttaacctgggcactgggtgagcttcttggccaccagatggccctgtttatttcccaaaagcccttatgtcttcattttggatgtagacagagaaagtgccctaatttttttttttttttttttttttttatttttttttttaagaaatagggttggaagtgcccctagattgacaatatgtcaacatgggcaatggggacaaccctaggttgacttgggcgccaggtgctcaagtgctccaaacgggaagtgttttgataatgattctgatgcctctaacatgcttgtggcaagtcttatttgtgtctaagtacaaagttcgagtgatttgtactaatacaggaccagaaactgaaaccctaaggccatatgtcaacctgggcgttgggtgaaatcctaggcgcccaggttggctttcaggatgccaaattgatatctgtcagtttccaggtttgtgaattagagtcttcttgactttttggctcgaaacattgacggatggtgatttggaaatgactttgcgggatctaaatatccatactagatcccccgatgtcaacctaggtgtaaagctaaagaccatgcccagggttgatcgctatgattctggactctcgactctgggtttgttttctttctggccgtgtgtaaaaaatgatgtccacgtcatcatggtcaatttctaagtaaacacttttccattatattttcttccttaccatacaaatattttttttttgaccttccacttttctctcatatcttttctctcctatctttttttttttaacccaacatggagtaaaagttgatggtgaattgcgtgaatggctatttggagatatttgggatattcttttggacttccaaaaagctaattcaatgatccaaggtgattatttggttcttttatcatttttttccacaactgaaattgaaacatatttttttttgtacaatgtggtccattttgatggagagaaacggtgtagttcatggaagtcgagcatgaccggcaataactctcactacctatgcaacaaacttcttgctgtaatattatttggttcatttatcatctctcttttccaaaactgaaatgaaatatgtatttttttgtacaatatcgtccatttagacaaagataaatggtgtagttcatggaagtcgagcaagagcaatagtggatctcactacttatgcaacaaacttcttggtgcaatatagagcagcacaagctcatgcacacccagtttttgttccactagctgttgtcccagcacccaattaggaaccatggaagcccctgccaattctggactgaagctaaatgtggatgcaactagtgttgttgctattgttagagacgaacatggtcgtgtgattacaacattgtctaagccatttattagatgttttaaaactcatgaaaaggaagccatgacactttttcatagtctattttgggcttcataagagtcttcatgacaataaattagccaatatctatgttattatcttttgcagatattattgtagaaggtgttggtcttttatcttcttttttttttttcttagagttgttgtatctcatgttcgacgagatgctaattttgccgctcatcataacttaactaaacatgctttagaattggttaatgacttagtttggttggaagatgtcccctcccctatattatctgttgttgtaaatgaatatatttaatttacaataatatgttttattaaaaaatatatattttaatatataaaactttaggttgtagtaaaattataaataaaacataaaaaaatgatatttacaaaaatataggagaaaaagaaaagttatatacctaatgaaaaaactaatttcttgatgaaagatctttggtgaacaatttttctaaaaattaaatatgagtttaaaaatttaatttacatacacatgacatatcaaataccataacaataatttaaaaataaaaaatatcataaaaaatgaacaaacttaaaactatcatatttaagtaaaagaaaatttaaaattagagaaaattacattatatacctactttattaaatctgttttaaattttacctttatttacatattctttaagatatactcacttttatagatgatgtcttcattataccccttatgttaatgtaaattcaggactggccctaggcataggcgggctaggctcgcgcctaggacacactcattttagggacccaaataaaaaaataccttttaaaaaaatatacatatttttttaataatttttaaaataccatttttttatagtaagggcccaatttttttttaacttatgacccatttcaactgaggaccggtcctgtgtaaattatgtgctaaacttaagtgaagagtgagggtatattaaaaaaactcactcacaaaagtggatatattttaatgaaatatagtatgaaggtatttatgattaataaatacaaaaaagaa

SEQ ID NO: 221678 - DNA, 1189 bp, Cannabis indica
ctggtgcatgattcaacattggtaaggtgtttagctagatattttcctaatgggtcattcctatctgctagcttgggaaacaaccccagttacgtttggaggagcatattcgaagccaaagatcttattatggctggggctaggaggagtatagcaagtggaattcaaacttcgatacttggatacccttggctccttgatgtggaggatccttatgtgcattctatacatctggggctggtgaatcaaacagtggcttctttaatgtgtgttcagtctaagcaatgggataaagagatcattgaggacttatttgatacgagagatcgtaacttgatttttagtatccctttgcccgaaactgtacaaactgattgttggtcttggagcaaggattgtacgggattatattcagtaaaaagtgcttacgggtggctacaaaaccagaccaatgttcctggtttggatactggtttttggaaagtgttttggaagataaaagttcaaccgaaggtacttcaatttgcttggagagctcttactgacaccttagctacgaaagttcaactcaccacaaagcatgtttatgttaataaactttgcattttctgcaatatggcagaggagacaataatacatgttctggtgcaatgtccttatgctatgtcttgttggcatagatcctctatcaatgttgtctcggctggtcagttacaatttcaagactggtttcaagacttgttgcagaataattctaaggaacaaatagaggaagccttgatggtgtcttgggcgatttgaaatgctagaaacaacctaatgtggaaccaaaagaatactactgctgctgaagtagttttatcagcgcgaactcatctttaccaatggcaaaatgctcaacaaactaaaggtgaacctcctttatctcactttgaggtaggaagagaggtggagcattggacaaaaccaactgaatctatggtaaaggttaacgtggatggagctacttttgaagctactaatgctttcggctatggtttcatttcaagggacactaatggagagattattgaagcaagatgttctagcaagagtggaaattcttcacccgaaactgttgaagtgttgggcataaaagaagccctcagttggattaaggggaaaacatggagtaaggtggtgattgaaa

SEQ ID NO: 221679 - DNA, 3272 bp, Cannabis indica
caatggaggcttgaatcgggacgttacataagcatgccaatatggcaaattacatagtatgcattttagtagttttagttcccaaaactacttcctattttcagttagtgcattacagatgtatgggtgccatcattttatagttcaatggaaagtttcagatactatgtcagttttattaatgatttctctaaatttacttagatctgaagtccctataatttttagacagtttaagtcttatgttgaactgtaatttaatactaaaattaaggttgtgcaatctaattgggggtgaatagaggccattgcaatctatccttgaacctttgggcatcaatttttgacaaccctgtccccatactcatcaacagcagggtagagctgaaagaaaacatcaacatgttgtcgatttgggcctttcttttctggcactagcacaaattccattaacacattggtcggatgctttcaccacagctacatataccactaatcaacttttaaccccaattttgcaattcacaaatccttttgaggtactgtttcatcaaaaacctgattacaattctcctaagacttttggttgctcttgttatcccttactcaggccataccagaaccataaactggcctttcgaacagctcattgcctgtttcttggttacagtcccacccataaagggtacaactgtatgcatccctcaggcagaatttacatagctcgaactgtcaagttcaatgagaataatttcccttaccacaccatatttcccaaaccagcttctgtcccacctatttcacctttaacccaaacaagtgtcttccttattccttcaccaccatcaactgtcctccctccacagattagacacccacctgctccaccacatcattcacctcctaattctccaccaccactacaacaacaactaatagccccaaccacaaccattcccacttcaccgaaatctcctatttcccctaacttaaatcaccctcctcctgtcagtacctcttctcaaccacatgttgaccatgaaccagaaccaacactacatcttgttgacagaacccaaactcaaccttctcaaccagtcaacagacatcccatggttacaagcatcaaagctagtattcataagcctaaagctctcacaacctcctctaatattatcattgaaccaaagacacttaaagcagctcttcaagaccccctttggttcagtgcaatgaaaagtgaaatcattgcacttgttaaaaataaaacatggagtcttgttccctttcaacctggtatgacagttcttgataataaatgggttcgtcgaatcaaatacaatcctgacaacattgtggacatgtacaaatctaggcttgttgccaaaagatttcaacaaacccctgaccttgactactttggacatttagtctagtcatcaagccatgcacaatcaggattattttctccattgcagcaacacatcactggctaattcaacaaatagatattaataatgcattcctaaatagggacctacaagaatgtgtttatatggcccaaccagttggttttcaaaataccacttatcctaatcacgtttgcaagttacacaaaatcatttatggcttaaaacaggcccctcgagcctggtttgataagctcaaacactcacttatgcaatggggatttcacaacttgaaggttggcacttcattattttttctgagaaagaaaggcaaacttactctactattgatatatgttggtgatatataactaacaggtgaagattccacctttattcatcatctgatttcccagatgcatcaatagtttgcactgaaaaaccttggcccagtacgatattttttgggatttgaagtcactagaaaccactctggtatctatcttacacaagccaaatatacttcagatcttttggctcgaactaacatggatgcaacggcttcaacacctactcctatgtgcccaaacacataactttcagtcaacatgggcactcctatagaaaaccctactctttataagagtgtaattggagcacttcaatatctgacattaactaggccaaatatttcttttgctgttaacaagctctctcaatttctcaagagccccaccaatgaacattggcttgcttccaaaaggcttcttcggtatctagcaggcacaattgattatggccttcacttcaaaccagctgatgcactccaactaactgtctatacagatgccaattgggcaagttcaattgatgatagacgttctccctcaggttattgtgtctatctaggtggcaatctcataatgtggagctctagaaaaaagattgttgtggctcgtttaagtacagagtctgaatatcgtgcaattgcccttgccactactgaacttatatgggttcaatccttatttagtgagcttgattttcagctttcctcctgccccattctctggtgtgacaaccttggagcaacatctctagcttcaaataccgtttttcatcaaagaacaaagcatattgaggtggatcttcactttgtcagggacaaagtgcttgatcacacccttgttctattctaataattgtaggtcacaacttattggctacacagatgcaggatatttatctgatccatataaatccatatctcaaactagctatttgttcacttgcggtaacactgttatattcttgcggtcaacaaagaaaactttggtggctacttcctcaaatcatgctgagatacttgcaattcacgagacaagtcgagaatgtgtttagttaagatcaatgacacaatatatcgaggaacatgtggattcatctaataaagaagtatcaacaattctctttgaagataatgttgcttgcactgctcaagttaaatgagggtacattaaaggagatagaactaaacatatttcaccaaaaattttctttacacacaatcttcaagaaaatggtgatatcgatgttcaacaaattcgatcaagtgataatcttgtaaacttattcacaaagtcattaccaacatcaacttttgagatgatggttcacaagattggaatgtgtcgattaaatgatctccatgaatgctaaaatgagggggtaatttcatactgcactcttttttccttgaccgagttttgtcccactggattttctcgacgaagtttttaatgaggcagttattatggacatccaagagagagtgttataaatattaataattatatggatgtc

SEQ ID NO: 221680 - DNA, 1335 bp, Cannabis indica
ggtgattttacaactggactgaaggtttcctgaaagtcaaggccatattcttggtgaaatcctttggccactaaccgggcctttagtttggaaactgacccatctgtgttttctttgactcgtaaaacccatctgcaaccaattactttcttaccaggaggaagcctaacaagtgtccaagttttattctttttgagggccacaacctctgtacccattgttgcattccatttgggatcagctagagcatctgcaagtgtgagaggttctttggaattgatgtaaaccttcggtttataaaaacctgcttttgctctagttgtcatgggatgaacatttgtagtagaagggggaacagaggaagcagatataggtgaagacagaggacatgatgagggcaagggtgaagaatcagatggagaagatgtggtggtggagaggggaggtgcaggtggatgaaatacagtaggttgaagaggaacagggacagaggtgtgggattgagaactggggttggggtgaacaggtgggatgaattgagtgattttagcataagggaattggtactcattaaaaagaacatctcgagagataaaaattctaccagaggcagattgacacttgtatcctttatgtttcaagctatagccaaggaatgtacattcctcagatcgaaaagcaagtttgtgtctgttgtatggtcgagtgttaggatagcatgagcaaccaaatacctgtagttgagagtagtcaggttcgattttgaataatttatggagaggagtatcccctttgagaacagaggagggaagacgattaattaagaatgctgaggctctcacagcttcatcccagaaggacaaaagaagggaggcatgagcaagtaaagtgagggcagtctcaatgagatgcctgtgttttctctctgccacaccattttgttcatgagtggtggggcaagagagcctatgatgtatgccatgctcagtgagatatggagagaatgcttgaaactctcctccccagtcagattggagcattttgatgggtaaattgaattctttttcaaccagatttttaaagttgatgaatgtctgaatagcatcagacttgtttttgagaagataaacccatgtaaatctggaaaaggcatctgtaaaatgaacatagtagtgataaccatttgaggaaatcattggggagggactccataggtcagaatgtattaattgcaaggttttaatatattcagtagtagatctgggaaaaggtagcttgtgtattttgcctagacagcaagatgaacaaaataaaaaacatttttattgctatttg

SEQ ID NO: 221681 - DNA, 3876 bp, Cannabis indica
ccggatgcatacatcgagaattcagtgtgcaaatcatttttataagataggtagattttccctattagtcatataaggtaaaaaaaaaattagagagatccgaacaaatagtattgctttcataaaaacattgggtgcacttttgaagagtacagacaatgaagaatgaaattgagaatttgatctctcgatgatactttagacaatatatcgagaataggacgaacgagcagtatcaaaccaatagcctgaatcttgaaccaacaaaatgtactattggttttcatggtactaaatcagatacgcagcgaaagggttttgtattactgattatcattgtaccatagttcaatagatctccagatgtgtgtacattaaatcaaagtataaattaataactttagaatatatacacactacaagaaatgtcacttttgccaacacatttttgtgctagcaaaagtttggtattgcactggtaaaatggagtttactcctgatgtgttggcaaaaggggttggcaaatcaacgttgatattagaacttttgtcagcacatatgaaaagtgcaggcaaaatgacttatcccaacacgttaatgcgccggtaaaagttagattttagccactgcaaatgtcgctagtaaaactttgacctttttgccaccgcagtttgtgaaatacgcttgtaaaagttacttttaccagcgcagtatcgaactgtgctagtaaaactaacatttgttgtagtgaaatcttgaagactatcggtgtatcctcaaaacttctcgtatgttgtattccttagtctagatgatgaggataatgaaattggactcataccagtatctttcaaattgatccaccacaatcaagaaatagtgtgggctattagaataaagtgcataatgttgttcttattgagttctcaacacatgagcaagaacaattgagagagaaaataattttttttctcctttctatatttcaaaaatattagtgtaaaagagtaagactcatttctcaaatctattttcagtttagtagttaaaaatcattttaattaaatcatatttaattaaataaataaatcaatatatataattgaattcgtttactgatattgatgagagaatctctcaactacttgagagaatatctaaacagctttgaaatatctttaaccactttttaaattcaaatatttatctaattaaattaattaatttactctgaaagacaaacgcatagggttaggcgcctacccttgtcttgtttaggacaaggatggtttcttttgtcctgataacttttgtctcaacaaatattgtcttaacaaattgtcttaataattttagtctatctcctatttaattaatttaaaaattatttatctattacaacaataaataattattattttgcaattcaaaatagatttttctgaacgacattatactactctttatctcttctcttgacagtgtttcaagttggagattcgaggatgatgaacctataattctaagctctaataaattagattattgattgagtctcatcaaccaaataacctttgtttattaattccatgatcaccccactaaaactaggaattgaactcttagtaattatagaattatatttactgagtttttctgtagtgtctattgatataatcaattctagggattagccctccatgtgttgtgttatctcaatttttacccacatgatgtggcatgcttacgtagacaatattagtaccacgtggtagtacaactcaccaacaagaagttcaagtcagtactctagccaacaagagtctcgacactcaaacgggacgacaagcaatagacaagccacctcaaggagaccgaccagcttttgaacagcataaggctaaccagcctacatcttgcagccaggattagacctaacaagactttggtgcacagccttacacatggactacaagctagactgtaaattgggccttaatagcccataaaagtagataagaaataccgattttaaggaacattttagtaatttatattttaccaatttactatgtaaatatctacttattttatttggtttttttttggtgaatcagagtaagtatatatatatatatattccacaaacaacatattacaattcatagcacctaaggttagggctgaatatttacaaattctcaaaccaatccctgtgtatctttgaaacttttttaggcaatattcccctaatcctatactttacatcccttctaatttttttgaccattgtttctattgtgtaaacttttagattccagagaacctcatttccgcatagccaactcagatatactgttgcagcaagtgtagccgcatatacttgttgttggaatttgctttctcctttggttagccttttcattagcccatccaccgttgtaatttttgctccccattccaatcaatatttaattgcttttaaacatccatcactcacatggcaaacaaaaacacgtggtctttattttctctgtgtgagccacacatgacacaattttcatcatggaccatcttgaatctaaacagtctttcttttagcctcaatctatcaatgacagtaagccacaaatatacctatgttttggaattgaaagcttgttccaaacacctccttgccaaggttgtatatgaatagttgggcataatacctcataaacttctttgatccgataactctgcttggagtaatcaatagtggggattgccttgagtttctctttcactttcaccacttgtttccaataccagctacttgttgtaggtgcttcgtaatccttccacttcttttgttccaagtaaaatgcatgtacctatttgacccataagaaatcttgttttgtttcaattgcccagacatttttccctaatgcaacttcattccactcttgaactcttttgaaacccagactcccagctttttttttggtctgcaaatttcatcccatgccactagtcctggaccattagcctcggctaaacctttccaaagaaagcttctacagattgtattgactctctgaagaactttctttggaataatcatcaattgggcccagtacgaatggatggacataagcactgagttaactagcactgctcgacctgcatacgatagatttcgagagctctaaactcttattctctgcaccatcttttcaataatgatctcacattctgaagctggaattcgccttgcacataccggaatccccaaatatttgaaaggcaaactactcttgctgaaaccagaaatcgccaccactctattaactttatgttcattcatttggaaataataaattgatgacttagtttcactcgggtataaacctgatgtattagagaacatttttaggccttgaagcattctataaatcgatacataatctccatggcaaaaatgaatcacataccttagcttcccacatctttcatgaaacttgaagtcttcttctgtacccactttcattaatagccttgacaagtattccattcccaagacaaagagaaaaggcggcattgggtctccttgtctcaacccccttttcgcttcaaagaatccatgcattgtcccattaaacatcaaattaaattgtgcagttctcacacagttcataacaaagattgtaaactttggcaagaaaatcaatttaacgagcatttcctcaataaaatcccattctattgtatcatatgctttcctcaagtccagcttgatcatacattttggcttcaatttattcctttcataatggtgcaccaagtcttggcacaccattatattataggcaatgcactgttgggttttatgcc

SEQ ID NO: 221682 - DNA, 1922 bp, Cannabis indica
gcctaaggaaagtgaatagcttcactttactctcagaaaccctaagacctgtagctttcaaatttctttgtctacaatggagaatattgctcccatggtgctgacccctgttgccattctcattccaccaccgacatctcctgttgatcctgcagtcgaacctgtagtcgagactagtatgactaatccttgccgtgccattgttccttactaatcggaggttggtgcttctacttgccttccaagtcctgaggcgactccgtctccgccatcgcctccagtcattcaaaaacctcacacatttcaagttaaggctcctcccctatctaaaaaggcttcctcttctttgtcgtcacccctcagaccgtgtcaaaaagagtcactcgttcctcttcgagtttacagtctccttcgtccccttgtctagccttcgtctgtgcctaaatcaaaacccataggacctcctcgtcctccatctaaggtttctattcctccccaaagcagagaaaggttcagccaaaaagaaaatcttcacgtgataccacgtatcaaccacctgaaaagaaatccaagaccaagcctattccagtcccatctacagcctcatctcccaaacagtcgtccaaaggctctaaaaagtcaaaacttcctaaagcccatatatcaactgtcgacccatcctctgttcaatgctttgttgatgcctccaaagcatctgtataccaacaatggtttggtagtcgtgagctttggttcaaacaagtggtgatgctagatgattttactgacctgcatgattttttaaaaattgggaaatgggttaacacggtcactaacttggctgcccctcatcccattttagttcgtgaattctatgccaatctagataggactgttatagctgagggtcatccagggtgtgtgagtgcatttgttaggggtcatcgtgttccgtttggtccatctactattgcatgcatgttgaaagttgagtctatcagaaatccaacatatgggaaacaattcaattcaatccagattaaactatgatgggtagaggggtaactggcagggatgactatctttgggacaaacaggaaattttagctactcatctaactcctttctatagggttcttcattgggtagctttgtacaattggtttcctaattcccatctgtcctcaattacacttgagattggcaagttcttgtatgttgtaggaactcatgtgtctattgatcggccatctcttatctttgaaaggatcctcgaagccttagaaacaactggcactcgtaacaaactaccctttccaagcctagttcaacgagtactcatggctgctcacccacctcttacaacgcatgactatcaagttcaaaatcccgttctcagtaagagttttctctcagttgctaacaggcagccctcatcgaccactccttctacttccaaggtgagcacaagcaagtctcctatgtttaaagggttatcagattctagctggcaggtacaaatattttctgagtttaaatcttttgtcaaacgatataagaaggatcaaaagcgccagcttgcctttgaggcctccatgtataaaatggttcgtatcatcaagtctactgtactgcaaaatcattctggggattctgtaactccatcaattgatatttctctgcttgagtttcatagagattcgtttggtgcatcctcagatgggtcagggagtaacgcacatgtgcagggggagctgtctgtatctgccctagtctccagtccaatacaacaagatctgcctcatacagctgacccgtctccagtaaccacggcaactcacttggtgtcgtctgggccactttcccaaggggagtctgacaaaaaactggagcaatcaactcatgttcaatgaagggggaga

SEQ ID NO: 221683 - DNA, 3618 bp, Cannabis indica
cttgtgggtatggttatgccatccatcaaggctagaagcagcacaaaaatcaaactttaaatttttcaataacattttgcatagtgcttggacacataaaaagtagtggatattaatttttaggaaaaaatcttaaaaaatagtaaaatcagtacaaacttatttacaacgacctgaaatggtttctaaatccatataagatgtatttggaacccaactaaaagaaaaaaaatacaaaatcaaaaaataaatcacgatccttgtgcatagacgtccacatactcgtgggcatgctgatgtcgtccactaagggcacaagcaacacaaaaattaaaaattgagtcttagaaaataaaaaaataaaatggaacaatcttatttacaacaacaaggaatggtttttaagtcgataaacacaactaaaagaaaaaataaagacaaaaattatattcatatggtcacaacagaaaatataggaactaagccgtttagattctataacttttgggctgaccataaggatttcaacgaaacagttatggagaattggcataagcctatgaggagcttcgggctgcagggaatatatctcaaaacaatgagacttaagcatgttattggggacattggagaggcttatgacaaagctaaggaagaattcaagggagctcaacttttgcttcaagctgacccattgaacagatctcttatagacaatgaaaatgcagctgctttacactttcaatgtcaggagaaaatgtatctgaatttccttagccaaaggagtaaaattaactgggttcagaagggagactcgaatacagcgtacttccatgccatgcttaaaaagagaaaggaagacaacaagattgttcctttgtcactgaacaaggcaagttgattgataattttttcgaagttgtccaacacttcctcaaccattttcaggcataatgggctaaacctacaaccttggcaattcagaatgagtgcatatcaatgggtcctaaactcaatctttatcaacaggtatacctcttaaaaccctttactctcaaaaaagtcaaggatgccatgtttagtattcctagtactaaatcctcaggccttgatggatttggttcggggttctttaaaactgtttagcctgaggtggggaaggacatttatagtgctattatgcacttctttgaaactatgcagtttcttgctgagttacacaacacaactttgtctttgatcccaaaaaaggataatccttccagagctgttgattttcgaccaatagcttgctgttcaacaatgtacaaatgtatatccaagcttttatgttatcggttggccagaattctttcgagtttaatcaaccaaaaccaaggagcctttgttaaaggaaaatctatagtctacaacatcctaattctccaagatcttttgaagaattataagaggaaaaatcattctccgaggtgcacaataaagattaatatcagtaaagcttatgacactgtcaactgggactttcttgagcaactattgaatgcttactgtttttcaaagaaattcataagttgggttatgatttgtgttagaaatacttcatatatcttacttatgaatgggagattccagtgcaacttcaaaggtgagcagggattgaggcaaggggatcccatctcgcctcttctttttgtgctaatcatggagtatctgtctcgaaaattccaacttgccacaaaagaggaaaagttcaggtactgtcctttatgtaacaaactcaaacttacaaatctatgttttgcagacgatcttgttgtttttgcaaaggggataaagacttggttcttgttatcaaagaggctttggaagagtttagtaaaacttctagattttttatcaactatgaaaaatctcaaatttttatgggaggagtgactcaccctgattctttggctcgaagaatcaacttgtctatagggagctttcccctgaagtatctagggatctcgcttagaccgactaaatggaagcttgaggattgtggtataattttaaaaaagatgaaccaaaagcttctttgctgggccaacaaacacctttcttttgttggtagagtctaactcattcagtcaactcgactgagcctaagaaactattggatgagggtgttccttcttcctcaaagtgttataaaagaaattgagaaactttgtcgaggattcttttgtggattgaaggggaatcgtcctaaaatttacacaaaaagttgggaaaaagtttatctttcaaaagttttggtggtcttggatttaaagatggaaccaaatggaacaaggtctcgctagctcattttgtttgggatcttatgaacaaaaaagacctcttatgggtgaaatggattaatgttgtctatctaaaagggatcaatttctaaaggtataacccaagtttggacacaagttggtattggaaaaaatagtgtcgattaagggatgattttactcaagaagaaatcgtggctgctggtgcaggaaataaatttaaagcgacaaagctttataattcttccctgcagtagcctatagacccgactgcctaggcaatttggtgttcgttgattgctcctaaacatggctttattttgtggcaagtggttcattcgaatctcctaactagagataaattgagcaggtttcaggtcgtggtggaaaacacaagctgtgcagtgtgtgggttagctaaagagagtcaccatcatttatttttctgcttcattttttcgcagtaagtgttggcaggtctatatgtgtggctgggattttcaagttggtccagtaatttcatcagctggtgtacttggatcaggtgtgtgcaatttgatttcttagggagaattatgatggttgtgttggctgcaataatataccatttgtggaggaatagaaacaattgtatcttcttaaatttctctaaaactgtaaatagtatagttaataatataaagaaggatgtcaaatatagattgttcttgctcaaaaataggaaaggctgcaaatggagttgattacacttaagagattgatatgtaattaatttttgtgagttgagtctttcctattggaaggggcttgagggtgtatttgcttggttcgattgatgaaattttcttcttgataaaaaaatcacgatccttgtcacaggcgcctacacacttgtgggcatagtcatgccatccaccaagggcacaagcagcaaattaaatttaaattttttgatgagattttgcacaatgtttggatacaaaaaaaagtgcttgatatcaatttttgtgataaaaagattaatatattagcttaaagatttataaggaatttttttaaaaaaatagaaaaattggtacaaacttatttacaacgataaaaaatagtttataagtccatacacgatgtatttggaacacaactaaaagaaaaaataaaatcaatcacaattcttgtccacggtcgctcacacatttgtgtgcatggtcatgtcatccaccaaaggcacaagcaggatcaaatgaaactttgacttttttcatgatattttacagagtgcttggatacaataaaaaaa

SEQ ID NO: 221684 - DNA, 1670 bp, Cannabis indica
gatactattccttcttcttatatctttaaattataaattgaagcatgtatacctacaacccgatttgatcgttattttatgttgtttattttataatatctgaagacttataattatgacccataatgaagtagtttatttcatcttcaaggtacatgtaactaattgttgtaaatttaagagtttatttctggttgttcatttgttgcaccattgaaggagtagaaagaataaagagaaaaatctattataattcaaaagaaaaaaagagtcttattaccattcttagaaacaaaagtaaaagtaaaaatgaacatttttcacatacttgtctttcacatactcatggattgaagtggataagaatgattctcaaagggtgatcgataaaaagtgtactaaaatattagattgctggaaataaagtatgagcccactatattttttatttaaacaaagattaaattgtattattaaaaataaaatttccccacaagagaaagatataagaagtcctttttgtcttctgaatgtactttgcaacaccagaaataatcaatggggaaatgacttggacatagactcactagggtgactttacattagtagtggtgtgcaatatgtttcttgttttattgaggagaaagtgaccaactcattcttatcataaaaagctttgtacggacgcattccaccatcaattttagactagttctgtttttaattataaattgttgtggaccgcataaaataatttcaatttgattatatacgagtattgctattatacatgtatcacaccatatgcgattcatattttataatagatattcaattaaatatttaattttatcaataataatataataatataattttatcaattaaatatttaatgttttctttaaaaatatacatatttttgaagtaaatgttcttgtaagagtatagattggtttgtgctattcatgttttgggagaaagactaaatatacttctaagatctcatttcaacaacaaaagcctaattacaggcccagttaagataatggattaagttactaagttaggtcatttaggttctagaaaaacatctcacccatgcgagagaaggacctagcagagagagcatttggaaactgtttagtaatgcttctaaaagggtaattaaatagatttccgaatgtcaaggttgatatgatgctcctttaatattgaatcccaccatattaggactttgtctctaaaatcaaatccaaaaattatgcaaaccgtaaaaagaaatatggtaattatctaacaattattgaattgcctttattacacgcgaaggtggcgcacgttttcctcctgttattataaagttgttttcacgtgtacaaataaccattttctcacaggctgggtctcaccgaatgagcccaaagtcaatatattacttgtatttacctcatcaatgggccatgcttacatgcaaaccctaacctataaatataacgaaaccctttcatgcaaaggatgagaaattcaattcttacaggctaaggcaaaagctagggttcataactagacaagaacacatgtgtaatactcgaaagcttttctagccaaataatattgactcgtggactagatttcattaacactcaaaccacgtaaaaattcttggc

SEQ ID NO: 221685 - DNA, 4686 bp, Cannabis indica
tgaaaggggtttggatgaatttataaatcaaacagacaaacaattgattaagtgaaccaaacatacacaaatgaatgaaaaatacttctactactttattgatattgaataatctggattacattgaaatagagttttatttagggcataaaactcaacaggatgttccttgctacaacccccaggttaaaggcaaggggcttgcttgtgcctcaagagttaagaggccgtcatttcaaacctcttaagccaatgttggaagttccatgtgttccatgctcaaacgtgctagggctggtgacaaggattctgaagcttctccctctgctaatgactttcaacaggcaggtgtgggtgatgctgagcacacccgcccaaaaaaatgagtctcctgagctggaatgctcaaggactggggagtcctcaagcattcaatcagctttccctccttgttaagactcacaaacacactatccttttttttgatggaaaccaggcttaagcctcattctggtagataggtttaagaggtctttaggttttgagtgtggtttcgaggtccctaagcagtattttggggggacttcttcttttgtggagggctgaagtttatgttaatattttgaattattcccttaataatattgactgtaatgttggctttaatattaatgaaatgtggcattttacttgtttttatggctctcctgttagttctcaaagacagtttacttggaaattattacatgaccttttttataatgctcctaatttgctctggttaattatgggtgattttaatagttatcttcttcatagtgataagtttggtggaaatcttcctaatcaacttaatatatctttctttaccaattttttgagtgagtttatgatgttccaccttccttatgttggcaataaattcacttggactaataaaactgttagtgaacgtttggattgggctattgtttcggattcatggagtgacctttatcctcataatagtcgacaccacttagggttttatggttcgaatcatcgtgtcttaaaacttgttttagcccatgctagtcctaaccctgttaattttgtgaataagcgttttaggtttgaaaatatttggcttgaggaccctagttcttacaagcttgttgatacaacctggaataagtgtcctgtctcgagtcactctaataaccacttccatagattcatctctaagcaaaatcattgtatctcttcttttacaacttgaactaaaagcaacaatcatctcttcaaaaccagaattcagcaccttagtgaagatattaataaaattcaaaataaggtgatccttcatgatgctgataaacatcgcctcttatagcttcaatctatgttagatgctatgatgtaggaagtttattgaaaatagcgggctcgagtcaaatggcttaaggttggggacaaaaatactaaattctttccataaacatgcttcctttcgtaacaaatccaatagtattaaatatctcaagtctgaagatgatagtgtggttaacacccttgatggtattgtaggtttagttacttcttatttctctaatcttttttcttcccaggggagcgatattgaagtttctgcttcaatatttgctttcttaggtcttggccttgaggagcatgatattggggccttagatcaggactttactattgatgaaaatagaaaagctatcttttagctctcaggggacaaggctgtaggtttagatgggcttaatgcatatttttatcaagaaaattggactgtcttgggtaaggattttaccgatgaagttttggattgtcataataagggaattgatttcactgatgttaactctactcttattgttttaatttccaaaaagcaacatgctaatatgattaaggatttttggcctgttagcctttgtactactttttacaaagttatttccaagaccgactcaaattggttcttgacaaaattatctctcccttttcagagtgcttttgtttcgggccgtgtgatctatgataatattatcattgccaatgagcttgttcatgccattaataatagaaaagtaggtaagagagggtgggctgccctaaaacttgatatggctaaagcctttgatcgcgttgagtgagattttttcaagaacctcatgtttcattttaatttccttgttcgttttgtttctctcattctgagttgcctctccactgcatccatctctttttccatcaatggccatgttagagaatatgtacaacctactagaggtcttagatagggagatcccctctctccttatccgttcattctctgctttgaaagcctttatgcaattcttagaaattactaggatagaggtcttctccgaggtattgctattgctagaaaagcccctcaaatattgaacctcctttttgctaatgatagcattttgttctgtgctgctgatcataactcttctgatgttttaaatcgtgcacttactacctattcaaagcattcgggcagattatcaattttgccaagtcctctattttattttctcctaacactcaaccaaatatcagagatcatttctttcaaactttcaattagaaaacaagccctttatcaccaaatatcttggtctgccacaatatctttctcgtgccaaatatcctactttcacctttctaaaagataatctcctctatcatacactcttggcaccataaatgtaactctaaagcaggcaaagaacctttatcaaggctgcccttcaggccatcccttcatatgctatgacttgttttcgtatacctaccaacatttgcaaggaaattgaatctcttatctccaaattctggtggggatcctctactgaaacccgtaaagtccattggaaaaattagaggtctgtctgccaatcaaaatttgtgggaggtttaggttttcgatctttaacccatttcaaccaggctatgttggctaaacaagcctggcgtatttataaatgccctgagtctttgcttagcctaacctttaaagcttgatatttccccaacacttcgatccttgaggttgctcctggccatagaccttctttttcctggcgtagtattctttggggtcgaaatttaatgaaggattaacttatttagaaggtgggtgatggcaagaccattcaaaccttataggatcattgacttcctgatttcaggttcaaattctactcatcttctcctcctcctaaacccaatttatctttctttatcactccacctggtgcctaggatcccaataaactccatcaatattttgaagatcaagttgttgatagcattcttcacgtgccaatttcgggtaatagttgtagggatgagttaatttgggatcattaccaatcaggtctctttaatgttaaaactgcttatcatcttgcactcaaatctagagatctaccttcttcttcttcttttaatataagcaaacaattctagtaaaaaatttggatgtccactatcccacctaaagtaaagcacttggtgtgtcgtgtactttcttgttccattccagttgcctcttcattgttctttcgacacatcatcccctcgcctatatgccccctatgccaatcgaaatcagagacagtggaacatgctatcctggaatgttctagtgcaaaaaaagcttggaaatactctgttttttcctccttctatatggagaataaagatcatgatattgatatgtttattgccaaagcgtttgatttgtatgataagcataatttggctgtgttattttgtctaatttggatgatttggaatcagcataataatctatttcacaacaaaagaatcatctcctctttggagctttttgatcatcctgctagctacttgtgtgaatatggttaatgctcatcagtctaagtttgtgtcctctaagaacagagacaggtgaacatgtacctcggctcatttcttgattttggagaatcaacacagatgctgctataaataatacatcaaagaggcatggtcttggagtggtggcccaagatgatggtgacaacataaaaactggagtggtcattctagtcgatgtggtgatttctcctgaaattgatgaagctaaagctatccttactgcgattttctggattcaagcagccaagctcccagtctctattattgaattagattgtaaaagtgtgatggataaaattaattcttcttattgtaattgttctgttcttagcaatattacaagttgtatcaataattcattcttgttgagtccacacttgtatataacttatgttccaagagagtgtaataacttagctcatgagggaggcttagggttaaacaatgagcttgtatgatatagttctctaccttctattctagcctgcaccttctgtatcaaataatcttgtaaaagtatataagtaatatttttaaatttttatatttttcatgtaaatttttcctaaaaagtaggggtgtacatcaaaccgctcaaaccgcccgcaccgcaaaaaaaaatgcagtttgaaattcttcgcggttgcggttgcggtttgaatttttcccaaaccgcgcggtgcggtgcggtttgcggttttgaattattaaaccgcgattcaaaccgcaccgcaccgcatcttt

SEQ ID NO: 221686 - DNA, 2757 bp, Cannabis indica
acattataatggccattaggggtaaaaggccaaaataatttgtcttccatgtataaatctataggaattccttgaatccaaggactatcatcttcatgaaagtatgtagctatctcggccatattccactctccttcctcagttataaatttagaaagtttggtttgaggcggaaggtgaggaaatttagatagagtagattcatgaggtctagggagccatttatcttcccatactttgatcgttcttccattacccactctccatttagccccttctttgatgatttccctcccccaacaaatccccttccacacacaagaggcaccattaggacagcccgcttccataaaagatgtattaggatagtagctattttttaagattcgggtgagaagagagtggggattatgagtgagtctccacccttgcttggccaaaagagcttggttgaattcagttagactacggaagccaagacctccctcctccttaggtctacataatttatcccacgaactccaatggagtttcttatgatcctttgtatccccccaccagaaattgacagccaaggagtggagagttttgatgagcttcttgggaagacggaagcaactcatagtgtaactcgggatagcttgcacaacagctttgattagtatttccttacccgcttgtgagaacatagaggctttccacccttgaagcttgttccaaactttttctttcacaacttcaaaagcctcttgtttccttcttcccacaaaactcggaagccccaaatacttggcatggtgagagactagtcgaacccccaatcgttgagctaaaacttgtccttggctagttgatatcctcttgcccatgcttacttcagacttctcaaggttgatctgctgacccgagagcttggagtattggtgaaggatcctcttcatagtatcacattcttcttcctttgcataagaaaaacaaagctatcatcagcgaagaataaatgcgaaactttaattctttctcttccaaattggattccattaatacttccagccctttcggcttcatgaataaggcaagatagaccttctgagcagagaagaaataggtaaggggatagtgagtcaccttggcgaagacccctagtagggtggaatttacctattttttccccattgatgagtaccgagaaggagacactctccacacacttcataatcttgttgatccattgttcttcatagcccaaccctcgcatcattattctcaaaatgttccattccactctatcgtaggcctttgacatatccaatttcaaagccattttccttccattaccgaaccttttagtcttcatacaatgtaggctttcgaacccgattattgcattatcttgtatgagcctcccccccacaaaggcactttgttcctcggatattacttgatgcaaactattcttcattcggccagcaaggcattttgccacgattttgtagatcacgttacaaagacttattggacgaaattctaacattcgggttggctttggaatcttaggaataaggcaaattagagtatcatttatttcatccacttgcatatcttcatttagaattcccaagcacactttggtaacctcgggaccaatcactgcccaatattttctgtaaaaaagcccaggtaaaccatcgctgcctggagctttcaaaggatgaatattgcgcattgccttgaacacctcttcttcagtgaatggctccagcatatagtcattcgttgcacgagatatacggttcgggataatgctttgaaactcatgcaactcattcctattagctggagtggaagtaaataactgtttgaagtagtcacacgccacccgacccatatttcggtttcctgtgatccattgcagcctgtcatcaattaacccatggatggtattttttacttttctattgcttgcctttctatggaagaactttgtgttcttatccccctcctttaaccaaagcgccctactttgttgattccaaaacttctcctctttgtcaagccaaatgttttgtttacgttccaattcctgcatttgttgccaatcctgaatacttgtgcttcgggtaagaactgccattttatcttcatattcctttaaatgccttgacatttctttcttttttgttttgttccattgttgaagagcttgcccacatcttcccagccgactctgtagctctcttgtgttcgaaatttccttcccatgttgccaagctgactgtatgatattagcacattcattgtcttcagcccaagcgctctcgaaatggaatctggttcgccatctagttttattatgattctgtacatgagggtcatattccataagcagtaaaggacaatggtccgagtttgtacgatccaaatgacgaactttcattgaagggaacatatcaaaccagtcttcgttgccgcaaacccgatcgagtctttcgaagatgagatcattcttcctcccattacaccaagtatactcacttccttcatagccaacatctcgcaaatggcagctgtccaaggccttttgaaagttgttaatgaggtaccttggcttggggaggcctcccattttttccttttggttaacaatttcatggaaatcccctcctactgcccaaggcccttaatacattcggcttattattcgtaataacttccaagagtgacacctttgacatggatccggatcgccataaaacc

SEQ ID NO: 221687 - DNA, 1306 bp, Cannabis indica
tattttgcacggccccaagcccagcagacttattcaatttattatttttagcctcatttgattctttctggtcgagcatagtagtggagtgggctttgtcaacaaccccacttaaattagaatttttatgggtctgaagtgggcccccaccaccattaactattgcactaggcaaacaattcaacccatgaggccccataacatcacttgaacccacggccggcccaacaagagtactcgacccaatatcaattggccaacctcccacaccattgagagcctctttctccaaattcaaaccggtttccaaaatcgaggcattccgtccttctaaagctaaaatcggtttggtagtagaaaacttttcaccaaagacatgtcccttatcacccttattaccagaaatggctaaatcttgaacaggtcgtcggaggccttgggagccacaccgcctgcacgtttacctcggatcctgtagcatcaatgggtcgtgaagtcgttttcaacggatttcgaaatcgccgagcattggaaggaccagggggcttcgaacggtcaccaccgttcccgtcaaccgcccgtgagggaagaggagcacgagccttgttcccctgagacctggcctgcacaccacggtccgtatccaaatttagacccgaaaaaaacatctccataagctgaagaaggagaaagccaaagaccgaacataggaaatggtttgtcatctctgttcacaatcatcacaggtgaggataagctacatccccttcttcggtgaccgagaatgccacatttatagcagaaaattcccactttttcaaacttgaactgaagccactgtttcacaccattagccaaatcaaagaaacaacctgaaacaagtggcttctcaaagtcaatatccacaagcactctaagaactttgctccacgtgaaaggtttttcatcttccagatccactttcaccacttttccagcaagactacccaaaagattaccatttgcacaagaaaaatactcatgtggtagattatggatttgcatccatattctcagccatttaaacacaaccggtccaacagtcttcggggaccattccttcaacacgatagtgtacccacagaagcaccatggaccattctgtaaaacccaatctctgtcttccacaacttcaaacccgaattcaaagcaattagagatcctttcatggtcctccatagccacaaccgagacctttttttttccaagttttagcaacaaagtcaaccatggcattctcatccacattcataggagccaccacttt

SEQ ID NO: 221688 - DNA, 1958 bp, Cannabis indica
ctaaataaattcaacttttgtctgggatacatgtaatgttttgatttgactatgcagttcttggaatgggtgggtgaggaggatgcaaaatgtccatattgtgatgggcttgggtattcaatttgcgatgtatgcgacggaaagacagtggtataataaggtattaataactgtgttgtatatttcactgcatactaatcagaacatagattacttcttaatatccttaatcagatgagattggtcatgtcactgagtgttttggtacatattttgtgtcacatatcatttagtctttttttgaaataaaattgtcgagtgtttttctttttttctttgatagaactggacaaacagaaatatacgaaacaatgatgtgtatatctttgacgtgagcatattacgaggattattactcataatgcaattaagccatcagtaactctgagtaaggtagtgaaggtgatcttctttataattgttctttaatttttcagaaataaaagaaaaaataaccatgcattttggtttaaattatcgtagtgtaatgcttagaaaaacacaaaaattgagatgtaatttttaattagttattatatatatatgtttctaagtgagagttccatccatccatcgtatatttgtgtagatgtagggtgaaaaatattgttttattcagattaagggcagacacttgtatgtacatttaatgtttccgcaactccttctatataccgccaatatgagatttatttttaatttttttaaaaaaaaaaaccaaaaaccaaggagttcgtttctcataccgtgtatagtgttgtattaaataagttaaacattgtattaataagtatatccataaattttattatattatattatgcaaaaaaaaaaaaaagtttgtatctcttatattatatatttaagaactaggttctgatgtctaaggtttagactttggggtctggtgtctaaggtccaagctagggttcgaaatgtggtctaggtcagtgtttgggattaggggattgggccgggattcaaggtccggggttgggtttaggatcagaaaagggttgggtgcaaaattgggattgaaggcggggttttaacatttggtcgaggtccatagtcaagattggggctggagtcccgatttaaatatggtccagtgtttgcagtcttggtttaggctgaggttttgggtttgtgatcaagctggggtctgtggtcaggatctaacaaaagtggtctatgttcaacactgcgacaaggtttgggttgggatccaacatttggggttgcagtcggagtctggacgtgggacgagtaaaaatacacacttatattactaccaactgttaagtgtcaaataatgcctaccttctctaacaggaaagtactttatccgtaaaaatttttttagatgtttaagttagactagaggtgtaaaagttgagttatattttgtataaaaagtaattttgtgatatttttatattaacttttactattgtacttcaatatataattataaatttaaaatttaatgttcacttaataatttattaaaaaatataaaataatgataaaatttatttgtactgcaagttcttaaactataagtgttttagcaagttagtcctcgaattttattttatggcaagttggttttcaaattttatatttggtaaattgatctcaaaatttttatttttttagtaacattaagtttcaactattagacattgatatttttattatttatattttactttaatttatgtttttgtgttaaattcaactaattttattttgttaattttaatactttgagaaaaataattatattattattttttatttattatattgagattaatattttaatactttaatttattatattcatatacattcataatagaaaaaaaaataactagcagacatatataatt

SEQ ID NO: 221689 - DNA, 2997 bp, Cannabis indica
tgatataaccattcaaaaccaagaaaaaagaacagtaagcaaaactggttcttttcaatttctattctgctcagttgtgggactttcaccatacaatcagaatcaatgagtacggattaaaagtaactttagtgtcaaaacagaatcaattttaacataagagatgctggtgagttagcttaacttatctctccatgtgaggtaattagagcggttttggttacttttagagatggcccgtgacagtgaaactttctccacggtgacattgccattggtatcgattctgtatgaaattttgaatccttccaagatcaagaagtaaagcacatcctcagaagaaagtggagcctgttcaattccatggttatgagccgtatcatcattatggtcctcggaatcagaaggactatccaatgattcgccattttctgttctcataatagcattgtgaggtcgattgcgttgagccagagaccgaatatcccatgacagaacttgccttatcaagttttgaaactcatctggcgaggcatagagtgaattctcgccctggaacaaaccaaacaacaatgccgttgatagtatgaagattaaaaccaatggaaattagtgccttctaaagttttgtcatgaagtttttttcaaacaacatgttcttaatgaactataacagtcaggaaaaacatagaatccaaattagtaatacattaaattggctcaacttttcagttttcgagtcaggataacaacttgaagcttcaaaatatggagttgttaatcttaaaacaatgcaaatcaagaatagaataataatatggctttggaaatatagcaaacttgactatttgtaataaacagaaatgagggttttccaaatcaaacaaaaatcacagcgacccaagtgtttgatagaacgcattagcaagtgcgttttagataacataccactttttcccagcaatccgaaagtgtggaattgaagcactcggcaaagctaacagaagatgctactaataaattctccccctgtgcaagacaagaaatacaattaccaagaaagttgtttttataggcaacatgatgatgacaacaatgcaaccacggtttcttagttaagaggttcaaatactgaattagtactttaacaagtatgattagtcgtaaaaaaaagaaatgtatcaacggactatgttctaacgaaagttataataggctaaaagacaataaggtcataccatcaaccactcaggaatgcttgtgttttggacactatcacagaagggaagatagggtttgacatcaagcaccggctgttaacaaaattaaaacaagatgagtcatgagtgatggcgaaaaacgcaatagaagtagacgagtttaagcatattgaaaacttactgtcccatcaaccagatccgcaccagagagaagcatcatatgctcttgcactgcctcaatctaaaagaagaatgtaaactttttgtttaattcatcatattccttctcaaaatacatattttactcaaactaatagatgaactttttgaaaaaaatgagtgtgaaaggaaatgcaataagtttttgaggtttatgtgagctttcaaaagttaaatgatcaatcactccaaactcaagttgaagaaataattcttgggaacaacagcctacttcttttacctttgcaacagtgagcccaataggacatggacggtgtggtgatcgagttgcaaagactcccatctttccacctttcaaccgtggcaccctcacctattgattttgccagccttttataataagaagataaaaagattgcagcaatcttggtatacaacagcaataactacaagagacacaccttagccttgaatcttgccttagatggatgcttccaaagcttctccatattggtatttaaatgaaaaacatatataatccagcaatgagaatagcccccaagacccacaagtgatgctggaggtacaatagacgaatcgaagaccaagcatgctctagcaaggggaacaagtaaaggttgcctcggtgtgccattcctataacattgtaaatcaatttctataacaaaaacaataactttgataagaacaaaaatatactgcatatctagaaatcactactgaattattttgccatctaacccacctggtagaaaagcatgattggatggtaccaattggtgtcatgggataagaagtaagctgatcactattctcaagctttggttgattacttagagttttcctcagagcctgcaaaagcatcataaagattataacttgtgacatagcaaattcagtaataatatatgatattcaaatctttttactgaattccagaactcaattatcatcaacacagaaaatgtacacattattattattatactcattaatagaagcattaaaaagggtatttactatgaatcatcccatgaaagccataaagatcaatcttttctttcacatattcaaaaacccaaatgagaacaaataacaaaattgatatggaggaaaaacctgttgagcccgaattcggccttgtctctcgccggcacagttctccatggaggcgttgagagatttctgaagaccacgaatcttggtttccaaaagcttcgactttttcttccattgaatcactaacaacaacaacaacaacacaaaaattaagtaaagaaagagatgttatgtttggattggaaaatgggaaaagaagaaagtgaaccagagaaagcagtggtggaagcaaagagagcagccatggctaaggctaagtaagcagaaaccccgttggaatctgaggccatagccatggattggattgagatggtgttacaggacacttcagatgcgcgcgcattacaatccgaagattgtgacctaaagcttcttactttggccgcgcacacccaaacccaaatctaaagtttcaattttttttttttatttttttcaaatttgtaaagtttcaatg

SEQ ID NO: 221690 - DNA, 1318 bp, Cannabis indica
caacaataaaaaagattagctctgagagctcctcacaattcttaaaggtaactctcgcccctgagcgaaataacttgagcttctaggagggaaggtttgggaggggcttgaccctcaggatgcctccctagccatgtgtggtccccacttgtcagcgcacaagaaggaaaaaacagtgtagcttgtcccttctgtaccaacgacaaaacgagtttctcataaaataaattgttgtgagaatttccccttaccttttctaacacgtaccgttcccatgcgcttgtaggcaactcacgacctcgcttgtcacatcactagcaaacaagtcttgccccacgcacctacttctggactatagcccattagcagaatataccctttttaccaagggaaatataccttaaagatattacatttaggataactttcagcgaagggctaaattcaaaaaaaaaaataatatatttttaattttctataaatagaagcattatgttcactgtaaaaggatcagagaattttggaccaagccaaaatcctattagattctctaagtaatttgccattgttgtaaccttcaacatcaatacaagtaatttgtggactagtacttattaacgtctgaatctcgtaaaaactctcatcttaaacacattttatcattattaattatatattaaattagttgctaaaaattttcggttaacaaaaaaatgtaaaacctccttcaatttgaggtttgagatctttcacatgggacaaagaatttatactgtagcaacaattgaaatgacttgctaaaataggttttgataactggatagtacacaacttttagtgagtgaaacaattttttaatattctttctgttttggatattaagtacattgatgtgtaatttaattttattgggtagatgtatttaccatttataagagagagtatcttccattaaggagtttgtacattgatgtgtaatttaattttattgggtagatgtatttaccatttataagagagagtattttccattaaggagtttgtattctttgcatattagatagtaattgcacgtcaactataaactgatatagtacaaaattgtgtttaattgataattttttttattctatttgttgactcagaaatctagattaaatttttaagccacactcactcgctaaattggcgaaaataaaaaaaaaagtaagtcaagaaattaagagagacacatctaatttatagtaactcacccctatatcatgatagtaatgagattacgtctacttcgaatttttatttctcatgagatggtaat

SEQ ID NO: 221691 - DNA, 4625 bp, Cannabis indica
gtattcatcagttaaaacattagtagtatggaagggaaagatggtttcatggaagtgcacatctcgggaacaaaattttgttggtattgagatttaacaacttataggctttcatcccaatgggatagcctaagaaaacacaaggtgcagctcggggagaaaatttggatctattaacattcaaagttgaagcataggctaagcatccaaaggcctttaagtgactatagttaggtggtttagaatttagaacctgaaaaggtgaaatatttttaagattgggggtagttgtcctattaataagataggcagcagtagaaacacattcattccaataaactaagggaatggaagattgaaataggagagctctagcaacattaagcaaatgttgatgctttctttccacaacagagttttgttgtggcctatggatgcaagaatgattatgaagaatcccaagactattaaacaaatcaacaaattgccattccttagcattatcagacctcacacatttaatggttttattgtactgagttttaatgagttggataaagttaggaatggcagtttgtgcttcagctttacttttgataaaatgaacccaaatatacctagaatggtcatccacaatggtaataaaatacttatgtccttccatagtgagagtattaaaaggtccccaaatatctgtggattaaatcaaaacattctttagcaatgttgtgttttgaacaaagggcaatttttttttttggtttagcataatgacaaatagagcaatgaaagttaggacaaggttgattttgaaattaaaatctttattcaatgaatgaataggttgcttaaggtagaacaattgtccatgccttttagccatcccaatctgttgtgtcttcaaagtgtcctgaataatacaatgattaggataaaaggtaaagatacaatttctagattcaagaagtgaagtaatggaaaacaagttaagatgaaaatcatgcacatatagaacatcttggagtatcaaatcaggggaaagaacaatagttcctaggcaaaaaactttaacagtgtttccattaggcagattaacacatgaaattttagaactagaataagtgttttcaaaatggggcaagttgtgacacacatggtgagtagcactagtgtcaagaatccaagtaaaagagtttttggtaatgttcataccagaaaatttttacacagtaggctggttttgttgttcatttcctatgtgttcctgccctttctgagataacaagctcatcaatctttggcattgagcaaaggtagccataaaatcttgttcaatgcttttccctctccaaatattttcaccatttttttgggcatcagagagattggcagcaggtggtttttcatacccaggtgcatttttgttaggaaacttactatgcagcttgtgtcctggtggatacccatgaaatcgataacactttgccattatatgccctggaacactacagtgatgacaaactgttttggagttattaggctgaacacttccagcaaattggccagagttagaagatgtagcaagagcaattttgtcaatttcattgctgttagtgactattcctctttgtctttcttcttggagaacagaggcaaaagctttattgatgttggggaagggatcctacatcaaaatctgtgatctagctcaagcataagactcatttaacctaatcaagaattcaagaacccgatccttgtcttgatattcttgtatggttttcatggcttcacaagtgcagactagttgaggtctgaattcttggattaaatcccagaaggatttcagtcgagtgaagtaagtagtgacagaattggatccttgaacaagagcttgcatagaccttttggctcaaaaactcttggggcattttttgatgatatatttcttgcagttctgtccaaatcttggcagcattgtcaagatacataacactatcagctatttcacttgaaatagcatgtaaaatccatgatataacaagactgttacaacaaaaccagacatcataaagctcatcatcgacatctggttcaggcagtcgaccatcaacaaattttattttgtttctgactgcaagtgctacaatcatggatcttctccatgaactgtaattctcgcagccaatcaaaatcttgggaacaagatggacagttgactgatctccattagagatgaagtaaggacttcgaggatcttttcctggtggtcgatcgtttgttttcaaaacagagaatctattagtctcctgagattgatttccttgattgttcgaacttcgagtattaacaccacgagccatgaaccaaagggacaatcaagaaaaagcagacgaagaagaggtcacgcaaatcgtagctctgataccaatttacaaaataagaacaaactagaaaaaccagaggaaagaaagaagaaaagcagaggagaatgaaaaatcaaaattcattaatcatgaatgagagtgagtgagccttatatagtgctaaagctcacaaaagtacaatcgagttagttaacaaccgaaaacaactaacaaaactaactataaccgtacacattaaactgaaatagacaaaacagaacatagcaaacaaacttaactaactcaacttgagtagttatagaactaatcttaatagtctctttattaaaaataataatgaattcattaaaagagaacaaacaaataaatcaatcataatttttgacttgtcaaggacagtgaccactttgttcacatttaagctctcctgacaatctggggactaaatcgattgcccgaactaatttcgcaataacacatatatagtatcgtaaagttagttttaatagcaaagttcttgcccaaatagttattattctttaatttatggatgatatttgatattcattccgattaaaactaatttgattataataattgtaagaatgtacttctcaaaagtggggatagttagtagttaaataaaataataagtaaccatattgatgatcaaagaaaagtacattataaatatgctagaaaactaagaacaaagctggtaacgtaataaggacatcaattttggcaaatttattttaccaataagtttattaataattattctaagcaatcaaattttgggatcacaaattaataaaaataataataatatagagatggtgataatagattaacttgcctgcaatcgagttaaatcggatccaggtcgtacatttttaaagaaacttagaactcgttgaagcatattgggggccttgtattgatcataaggatcaatagaatcaagtgacaaaggctttgttagaacaaccttcatctcctccttactctctgtctcctgcattaatgttattccacatatcatccttctaaacttaactccataaaattaaataccaaaaataaaataaaacaaaacatttattctagaaatcctttttgttttctacaattgttcagttgttcctctctataattaataataacaccaatgtccttgcttctttgccatgtaaaatgtatacatactaaataaaaattacaaagtaaccaaagattaatactttcgtaataatatagatttaatttaaaattttatattttttgttggtaaccaacaaatatctagttgataaaatatatatatctacaaatatatattatacttaaaaaatgttgcgaagctaccaccagtaaaaataattctatatcggttatttataattatttttagtcacaaaataaattttttataattaaatattatttttagtctcaacaaaaaataataatatgtgcacacacaaatgtaacacacatatatgtggcaaaccacttcaaccaatcatttttatttataaattttggtatcacttattaaaaataacttaccatataagtgtattatatttctgtgtgattcatgtgtgtacatatcattactcattttagttatcaataagttgagtcgcaataaattttaaatttgtgactaatatttatttagacacacgtcttcctaatgatgacttagttttaggtgcgctgtggccttcctaggccttgcagagtgagggattatgtggattttgctttggcaaatgatgttggggcggtggcagtgatgttttttgattcctaggttcggtcttggcttgtggcgcgaagaaagttgtggttcagggcgtttttcatggtgaaatggagcctttgattttttgtgctgatttggctttggagctgcagtttggagttgtagatttcttcacggataatgtttagatggtcaaggctttgattgcaggaaaatgttcgtgctggaatctacatttttctctctctaaactttgtgttttgttggataatggtgattgtgttgttagttggatttctcgtatttttaataaggttgggcatgctcttgctaggtggggtttatcccaatcttgtaatggcttgttgcgtttctgggaggtgagtcctcatgtactcaccaaactttgtgtttcggcttaatgaattagagtttcttagcaaaaaaaaaaaaaactaaaatag

SEQ ID NO: 221692 - DNA, 1996 bp, Cannabis indica
aacaaagtatgccaatttatgcaaaatccttcacaggctcattggactgctgtcaaacggatattgaggtatattcgaggcactttggattatggattgcatctcactaagtccaccagctttgatctcactgggttctataatgctgacttggcatcagatcctaatgacagaagatccacttctggttttgctctgttcttgggaagcaatctcataacgtggcaatccaagaaacaacatactgtctccaggtccagcactgaagcagagtatcgaagccttgccattatcactgcagaaattgcctggctgcattctctcttctctgaactgcacattcatctgtccaagcctcctgtggtgtggtgtgataaccttaacaccattatgcttacactcaatccagtcttacatgccagaactaaacacatcgagttggatctctattttgtggagaaaaggttcaacagaagcaattggaagttaagcatgtgcctgctttcgatcaagtagctgatggtttgaccaaggctatctcaagctctagatttgacatttttcgaaacaaactcaccattggtagtaataccaattgtaagtttgagggggcctgttagaatatatcatttgcttgagttagtttcagttagttagaaaccttttattagttagttggttgttattttccaactgtctcttatcaactaacttgtaactgtttatgttattcttgatctgagtgtaagcttgtatataagtcatggataatgactttgtaatcaatgaagcaattcattctctttgttcattcttttcttcatcttttctctctgtctttcctctctcttttctttcttcttttctggtttgttctgttcaggctcaataatgtctagaagatctaatacatttggattgtgttctgtttgttttttaggccagcccgagtgtgtgtataaatatatatatatatatatttaattaaattatttgtttaacaattgatcttgatctgttggactgtttgtttaatgataattgatttgggaatttggaattgtatcattgaattgtcatgtcggcggaacataatccattaaaataagagaatatgagtgaggatcagtttttaattgtttctcttttctctttcctattttcagacagtatggatttccaattgagacacatagaaagatcaagtttgtttgtttgtttgtgtaaattgattatttcaatttggttattaaaattgtaagagaaaaagtcattttcgggcatgttattatttcttctcactctgttttgtttacttaatattgaattaattatttgactcggtcttcttctgacaatctacaggtaatagagaatcaaaattaactaacaaggacatggcagaggaagaggcaccttgttacgattttattgatccagttggttatgattgggattgtacaccattccggaagggacccccacatccaacgacaatttcgatcccaaaatacttcgttacgattcagatgaagacgaggaagctatccttcattatatcaaccaactcgaactctctgatgtattcattattttttccccctctctcacactctcaattacttgatcattattgctgatgaatgatactatatttttcttttatttatttatatatgttccataggattttcatgctgataagccgaaaaaacgattttactggacttcgtttgtagtagataaagttacctcacaggactgcattgatgcagcccatgtagcagtggaagaatttaacaaccttaaggttggttgttcattttatttaattaaagatacatatatacatgtatgaatgtttcttttaatttatatttatatatgatgatgaactttcttacttaattatgttgttgtatttgtattaatgcatgctgcagggtgctgatttgaagttcttgaaacttttgaatgtgacatctagaataaccgg

SEQ ID NO: 221693 - DNA, 4217 bp, Cannabis indica
acaaaaaaatgaatactttaagcaatatgtgactgaatttaatttattattatgagaaaaagatgcttttaaaagctagataataaactttttttatcatgttgtatggttaattacacaatatatttgtccaatataaatatatatatatatatatataaatgtgtatctgtaccttactgcagcaccaactccatatggaattgcatataatgttgcaatggtttgtaagctgttacaaaagtattattagtataattgatataattaagcaaattgttaaattattataataacacaataaaaatctaaaatttaaaactcaccatatagatagaactgaagtttcaagttgtggatttggtaggattccagacattaaaataagcagttcaaatgaccaccattcaaggctttaataaaattaaagaaaaaaattattaaaaataaattattgaaaaaacaaaaaacaaataaaagtatttatatttttaccatatcataattgcagaaggaatagccaatcgaaaaaactgcttgattccacgaaaaatctccatagagattggagttcgagttttctcacataaaggagaaaactttatgtagaaaccgagtataacggcatttaaccaatacgaaataccaatacccaatgctcctccaagatttcccaatccaaatttgaatactaaaacccaagataaaggtatgtggaaacaaagtatggcaaaagaggttatgaccataggagttatcatgctttgtgtttgaaaatatcttataagtggttgaagaattgcatatgcaaatagagctggaataagccatattatgaattttccagcttcatgagaaatttgagggtcttgaccaatgaaaacaagtatttttcccatgaatatccaaaccaaagaaattggtatacaaactaagaacaaacaaaatattgaagtgtaagtttgaagcccaagtttcttgtattgcttagctccatatgcttgaccacatatggtctctagtgcacttgccattcccaactgtaaaaacatacaaagaaaaaaaaacccttttaacataattacacaatttgctttactaatcaacttggtaatatagtttgtctatgtatgaaatgaaagtcattgctcaaaactaaacaattcaaagagcacgaattagtaatgataatacttcgaaagtgtaaaataattatgtgttaattttacatcacatcaatttttttggatatagatgtacgatttaatatagtaatagtttaagaaaatttttaaataatatgaaaaaaatttaagaacacaacttatcaagtagtgctctctaattgtgccttttaaaattttcatatcattttaaattctttaaaatttgaaagacatgaattgatagtatgaataattggataacacaaacttaatagctcaataataaataagaaacacaattttacaataatattactctaaagtaaagacaagttaatttctcaattttgatgtatgattctcctttctataagtattcagtcatcaacttaagaaagaaaatttcataaaaatattttataaaaacaaaaaacaattatattgtttattcatttatgacaacaaaccaaacttatgttatcattataattaaatattaaaacaatacacctttttctttttattgaataaaatacaagataaacttgaaaaatcattaacactactttttcttcttcctatttatcatcttcactaagcaaaaaagcctcaattccatcaaaacaataaattggtattttcctatattataaagtaatatatatatatatattatatatataaatatatatattatatataaatatatatatatattaattctaaccaaattaagtagtgacaaatttatcatcttaaaaagaattggaaaaggatacccttttcatggatttgcataactttcttgtacttgtaatcatcatcacataatatggaagatttgttaggtttttgaaagaaataacaaatttatatgagtaattattattattattattattattatttattacttacaagaagactaaaaccagtgaccccagaaagagatatggctatggctgagcttgaaagagggagttgaccaaggtgaccaaccatcatcatagaaataacttgtaaaaaatattgacataatagcacaatcacaaggggtcctcctaagtaccctaatttcttcacttcttcaaaaaacaccttccaatgaataatttcattcctcctactaatatcttcttcttgatgattactttgttctaataataataagctttcttccatggatgagatggtgtgaagtaatcaatctcaatggactcacaagtcactctttctcttcccttttaaaaatgaaaactaggtacccatcgccacctatgtacatataaatagactaatatataaaggtaatattgtttttgagtatcagtagtatctgtagtatattttataggtagtgttttacgattggttaacgatattttctaaattaaaatttagtgagtcataagaaaaaaaatatatatttttaggccctcatttagaaaaaaaatatggtattttttaaaatcaataaaaatgtatactttttaaagggattttttttttcttgagcccctaaattaggtgagtcctaggtacaaatttattccgcatatgcctagggttgggtctaacaccgaggaggatgctaagcataagtagtacattttagcaattctcatataaacgggatgatgtgactcaatctcaatgtgtggcaattggttaaacagttatgcgattatgttatttgtcgcaattcgcgtgtgataaaacttaacaaaatgatcaatttataatagtatgtatagttcaagaactatttttaacagaaaaaatttaagaacacaatatacataagtcatagttcggaggacaaaaatcataaataacctaattaatattacaaattatgtataaccagagccgatcttgagctaagacgaaggaggcggccgccttagggcccccaccgcacaggagcccatttcgaacaaaaattaaaatatagttaacaataaaataaataataatacttttaatgttaaatatgtgttgtagtctagaagtaatttgatcagtttaacaattaagaggttgagagttcaaattctaaatagcttcactttttcactaagtcccaatttttatttttacttaagccctaaattaagatagggtcggccctgtgtataactaattacatttaatttagtccttgcatcccattcatcgaaataataaccgctagatcaatatagttattgggttaaattaatatcattaagagctaaagtatataaaacaaaactagtagtaaaattacaaaagaagggaacaaaatttattgtctataataaacattatagggtgctttgcacttcattaaaaatatgtgcattgatgtagtgtaattcataactatttcggtatttatataaaagaattattttaatttttttttatagtcattttcattatagttatttaaaattttttataaaattttgaaaaatccgaaataatttacaatttaaaaattaatatttataccgtttatttcacacgtatataaaataaaaaatgtcatacgtgcttcacactctttgaattatatttttggggtgttaaatttttttaaattttacaaaattttataagatatcttaaataaatataatgtatatgcccataaaaaaaatagactaatttttttttaaaataccaaagcatataaaaatacgtatcaatgaacctctttcaacgagtacattgtagaattttttaatgcgataatatattttttttgttatatgtatacgtggttatttaaaaagtagacacacaacacaatgcatgaaggcaataattaagtagcaaccaagaacatgagttactttatgaactatttattctttgtataacatgatatatagcctagggcatttaagagcagtcctaacagggtagctaaactagtcaaaattgtaaaatatttaagaagtggtcttaaaagagtagctaaactatttattgtttgccgcttcaaaatgtatttattaatgaataaatagtatttttggacgagaaatgctattcatcccgagt

SEQ ID NO: 221694 - DNA, 2556 bp, Cannabis indica
attatttttcacttgtgttagtatagggaattatgtagaataatgtagaagctagtcatttaataatgtttctagattagtccattataaatagagatgtgattccatcattattttgtaccaagttacaaatcacacaagttgagataaaaaatatagcttcttccattcaagtattctctccaaagttcttattttccaatatcaatacccaacttttgcgaccataaaaatactctagcaaaagtcttatttcctgtagtgtgtgtttaaattatgtgtaaaaataaggtttttttctttccaaaacagttgtgttatggataaaattataaaaaaaatgtaatcgtagagagaaattgagagagaaactatcgtagagagagaaactatcgcaggagagagacactatcgtagagagagagaaactattgtaggcgtctaggagaaactcttgtcggcatccagcgttgtcttctccacgtctgtacgccatcgactagcatcgccgatcaacgacgaccactgtcggcaagtcttatcttttgtgacatggtgtgattattttcttgtttgagattgttcttgctttttccattgtttttctggtttgagagtttaagttctctgggttgagattgttcttgattttgccattgtttttctggtttgagattttaagttctctggtttgagattattcttaatttttcctttgttttctggttcgccattgttgttggttctcgtttgagtttgcaagtcttgtctttcgtttgttttgggatggcttttagcagtaatcataggatggatgaagaggatttggctgctgttatcattgaggagcaagatgcggtagtattatcctatgatgcgagtgtcactactggtaatgattatgatgatcgctggtgtattgttggtagattcttgactgagagatccatagatttcgacgcgatgcaacatatgctggcttggggaagggtatgttcgttaaagaattgtattctaacagatacttatttcaattctatcacgaattagattttcaaagtatgatggatcgtggtccttagacttttaataagttcttgctgatttttaaaagattgaaaatgggggaagaccctagacagatagtgttgaatgaagttgatatgtgggtccaactgcatgatcttcgatcgggattcaaaacggctacgattgtaaaagatatagccaattatgttgggaagtttgtcgaatcagatgaaagaaattttatgggattatggcgagattatttacgtgtccgagtaactatatattgatgtcaccaagccattgaagaggcggatgaaaatgcagaatacggatgggattgagttctgggttaacttcaaatattctcactctccgataagttttttcctcgccgatttgatgctccagagggaaagctagtcaagccttatggagaatggatgagagtgcggcctatgtgtaagaagcacaccataggaacaaagtggctgaaataatttatggtggctatggaggaggtacctactgctcctgtaaacacgcccaccagtgaggttcaacgatcacagttagtcagtgctggtgcgggtacagttggttttttgaaatctcctatgattgtggaagataacatgggtcaatgtgatatccctattaatgtggagactgattttatggaggctgctactgatcaggaatttagtgagaatattgctaaagataatgattgtttggacacgaagagaagaaggacagaatcgggcttgtttgatggggaatgaattggatgaagatggggagattaacaaagctgtaatgggttcaaaaaatatgagttttgtgggttctggtatccaggcccaccgtccattatgaaaatattatcatggaattgccatgggcttggaaacccatgggcttttcaattccttaaggatattgtgatccaaaatcaacccaaaattatattcctttgtgaaacgcttagtaatcgttctccgatggaaaaggctcgtgtttcattgggatacgatgggatgatggttgtcgatgttcaggggaggagcgcattgattgcattactatggaaagaagaagatgaagtttcggttctggggttctcaacaaattacattgacgtgaaggttccagttgaaggcatggttgtatggaggtttactggaatgtatgggaagccaaatagaagccataggattgctacctggaatcttctacgttcgctcgctgctaattcaaacttgtgcgtcatgggagatttgaacaatgtttgctctcatgaagataataggggagggaaccgctatcctgagtttttaattcaaggctttcaacaagctttgaatgacagttgtttccaagatatggaactttgtggttatcctttcacatgggaaagaggcagaggcacttctcattgggttgaaattcgattagatagatgtttggcaaatctttcttagctgcaagctttttcatttgttaaattatataaccttgagcttt

SEQ ID NO: 221695 - DNA, 2175 bp, Cannabis indica
aaaaaaaaaatatttttgtatcatataatttgatatacattttgattacctctaaacttatttgtatacatcttagtaattaattagttatttttaaattatattatggtagcttgttattcaaaatacattttgataactttaaaatttatttttgaaactaatgattctgcaagtaatataataagctaccatttttatataccacttattttatatatatttttgttattttgaaatcgacgtgtttatttatttatttttttctttatgatatttcaaaactgcttatgaaactaataaattacaagaaagaaaaagaactcacataatggtatcaattagttataataagttacaatatttattttctagctaaattgatagacctttaagttatcaattagttattttagaattttattatggtatcttaatattatttaagatatttttggtaactttaatttgttgtagaaatgacaaatataattggtatcattagtaaatcaacagtttctttaatttaaaaaatgacaagaaaatataagcttctcatatcttaaaataatcatatttaataatagaacgcgatggtgcaacttttaattccaaatagttatcggcgtagctaaaattcttctttttttaacagtagaggagagataaagataaaataaataaataaaagaggtatgttgtaaggctgaacatcgaacgtgtttgtcaataacgagttcgtgggtcaatgaattgacccggtcaactcatttttttaatggttatttcttttgctttattattttattaaattaagcataaaaatgttgagattttatgctttaaataaaacttcattcaatataatcttatttatattaataaagatcaaaagaattatatattgactttgtcatatgctttgttcacatatttattacatgattataagttttatatatgagctatattaaatcatgaacatatatattcacaattattgtgatgaatcaaactcacccctaattcacactgtttcttaagtaacagtggcaagattgaatccaaaaataataacagcaatgacaagaaacataaaaccaaaaaattagagataggacaagagtaaagaacatcaaacttaaaatgaataattagaaaagattagcaagctcagagccactttattccttgatgatcatttgaattacatagagaatagcttgaattcaaaagtacatgtttgagagaaaattgtacaagaacaagttataatagaacctctctttagtcaactcaatagaaacatgagggagactttaacaacccttcaatctctctaaaaggaactctctactattatgaatgtatgtacaaatgaattacaaaagccttagttgatcgtgtagggtggttgccttttatattggttgtagaagcttaacttgactggtttagctccaaccgaattaactgttatttttttccagctaggataggtagttagctgacatggcagggagagagtgagccaaatctaccacaaatccacctgatctgattcacttgttcactgcctggatagtgctggcagaattgatcatacccttgcaatcgagtatgctcaataggttcaaacaatgtgtaaatttatccctcgtaacactctttgtgaaaatgtcaacagggttatcatgagcgcaaattttccttacttgaacttgttttgccattaccacatctctaaatgtagcttgatgtcaatgtgttttgacctctcatgaaacataagatttttcatgagatgcaaatcactttggttgttgttgtagtgagatttctctcacctagaaactcgagaccagactcctctttaaaggacacgtgtattcagatttccaatgaaggctgaatgtccgtaagagactcctcgaagtttagacctcgctcaggataaaaccagcgaggtattgcaagtgcgacttaagttgcaccgcgtaaccgtaattctcatcatacagggtagacccaactcgcatgtgtcagagcatgtgcgagtgtcccctctatatctccgcgacaagtatagagaccaactccctatgatgcagtttggtcccgacgactcaatagccctgacagaccaatataaattcgcatgtccagactttaata

SEQ ID NO: 221696 - DNA, 2207 bp, Cannabis indica
taggacttggcttcagattagttagctcagccttttgtagtaactcagctatgtactttccttgtaaaagataaatactagtgttgtctctaaacacttcaatgcaaaggatgtagttgagtggtccaagatctttgagagaaaagatcttgttcagtttggtgatgaacaagtttagctccctgtaattgttccctgtgatgattatatcatcaacatagattaaaaacatgataacatattgtggtttcttcacaatgaagaaggatgtgtcagcctttgaattctcgaattgccattgcagcagggtatttttgaatcgatcaaaccaagcccttggggcttgtttaaggccatagattgccttgtttaatttgcacacatgagtaggatgttcgggagactcaaaaccaggaggttgcatcatgtagacatcctcctcaagtgtgccattgagaaaggcattgtttatgtcaagctgtctgatttcccagtccttagtaaccgcaagagtaagaacaactctgactgttggggctttgacaaccgggctaaaggtctcactgaaatcatcacctggcctttggtgaaaacctttagcaaccagccttgattttagtctttgaagtgacccatcaacatttagtttaatcttgtgaacccatttgcaccccacaatattgtagaaaggtgaataaggcactagaacccatgtcttgtttttcttaggagcccaaatttcatcttgcatagctttattccacccttggtgttgaagagcaacttcaatagtcactggttcatgattggacagataaaatttagcttgtccaaggtacaccttaggcttgaaaattcctgcttttgctcttgtcaccattggatgagtaattggaggtgctggttactctgtttggacaggatcagatgactgggtgaggcactccctggactcacagattcattaacagactgtgcaatagtaggtagatcaaattgaaaattattactgacctggttgtgtgcagaggattgagatggtgattctgagttaagttcttctgtgctgtcttcagcttgagagttgagagttgtgttttaagccattgaggggaaagtaaaccaggaatgaagtgtgtttagtgtcagtgtgttctctggtttatagttgttcagaaagccatgttcaaaggggaattcattctcattgaatatgacatgtcttgagatataaattctcccatgaggacttaggcatttatagcctttgaacacttcactataccctagattgacacattttatagagtggaattggaatttatgttgctgatagggtctgatgcaagggaaacaagtagctccaaagatttttaaaagcttgtaatcaggtgctttggagttgactatttcatagggtgatttgacactcaacacagcagtaggtagcctatttatcaaataaacagaggtctgaaatgcatcaaacaagtattttagtgggatatgggcttgagctagcaatgtcaatcccatctccactatgtgcatgtgtttcctctcagctctcccattttgagctgaggttctagggcaagaatgttgaaattcaattccacttttggcaactaaattagagaaagcatcatactctcctccccaatcacatcttatcatcttaattttatttcaaatttattctcaacaagtgctttaaactgtgtaaaagcagctagagcatctgatttttattttaagggaaatagccaagtgaacctactatgatcatcgatgaaatgaatgtaatatttataattggtatgtgatgctattggtgctggaccccagaggtcagtgtgtatgatttcaagcaacattttggctctactgtgagagatattgaagggcaatacataagaattcccatactgacaggcgtcacaaaaacaggtcttttcgttaattgaactctttaaattagacatttttaagacttgatttaaaacagatagagagggatgtcctagcctcctgtgctaggtatcctttagggaacttaaaaaaacattttgagtaggttgaacttggacagaatacgaacatggatgagattggttgagacaaacagatgagcaattggttgatgttcccaagctgtagagaccatctttaagagctcctcttagaatcaccttccctgttcgatc

SEQ ID NO: 221697 - DNA, 2623 bp, Cannabis indica
gccctagagacagccacaaggtcgaatctacagctgtacaaaactttactaagataaacacaatctgcagcatcagaaacatattttgacgcagcaaatcagaccagaaaaggaaacttgccataaacgagtccgatcttgtattgagtcttgattcttgccataaacagcctgcatagtctgattgtatcaagacacaatcgaatttaataaggaaaaaggccataatcaaagtttcctttaaaaaaccaactttccataagagaattgcttctcttacaagaagtttccatacaagaaaagttcagctgaaaaatgcatctttcctaacatagaaaagagtaataaaaactgaataaacaaggtgagaaaatcggttatgaatgcaaacaaatctcaccataaaataaaaaatattttggcatctaacttgccgaaaaaggactttacagtgctgatgagtttcattctccccccacatgattacacgttttttgtttctctataggccaaagcttttcacaaagagaagagatattcggtttcatatctgtgaaaacagctcgttccatcatctctctaatgaagtttttaactgtaccaactacttttttgtggcgcatcatagctccacccaagttgctatagagccttctttttttctttttcttctttttagcataaactagaggaagatttctaaatttaagagagactttcttgtggctgccttgaatgctatgatctacgccatttggaatactaaaatttgtttttgggagtagtattttttttattgtacatactctagttcaaaaaataaagatatatatttgttttaagatttcttattttaaaatagaaaaagctagtatagtagatagaaattgattcgaagctttgatgtcttgtaattgattgtcctcttataattggttgtaaggtttttgagcaataaaatttcttcttattaacccccccaaaaaagaaaagaaaagaagagcaacttgggatgatgaaacaagtgagtaaatgatcaagtgctgaggaacaaataaagatttgagatgaatccgttatatattttgattttggttaaattatatattttttctcagtgtttatttttttattagtaaaatataattattattttgattttttggctaataaaatttaatatcatttcacacacaaaattttataattacgtaactgactggttcaaaaaattgtggaccgttaacattaagctaatgtgccatattctctttcatttctcaaagggtaaatagtgatataagtacccaaaattttaagtttgtaagcagcatatacttagggctcgtttagtacgctatattgtattgtgttggattgtattgtattgtattagtattatttaatacaatactatgtttggtattgacttgtattaatagattgtgtatagttataatatattttcaatacactcaaccccaacaccaactaagggttagggttgggtctcgcttcgggtttgggtctcgggtttgggtttcgagtttgggttctaggtccgagtctgggtcctgggtctggtcgcgggtctcgggtttaggttgcagatctcgggttaattcggggtttgggttcgggtctgggtgcgggtccgagtctaggttcgagtctgggtccagggtctggttcgggtccgggtccgggtttgggttcgggtccgggtccgagtcccgaccctggttcatgagttcgagttccgagtttgggtctaggtccaggtccgggtctaggtctgggttcgggtccagggtgcgggtcctaagattaggtccgggtcagggttcaggtcccggtttgggtcctaagattaggtccgggtcagggttcaggtcccggtttgggtccgggtctgggtttgggtttcaggtcacaggtctaattaagttcgggtctggtctgggtcctaggtccgggtgtcgagtctgggtcgcgggggtccgagtccaagttcgagtccgagtttggagtctggtctggggtccgagtctgggtccgagtctgggtccgggttcatgtccccatgtttgggtttgggtttgggtttaagtcttgagtttgggttcgggtttgggtccatgtcggagattggtgttgaccctgaatcctttgtaaatattataatacattctaatacaaaatgtattaaataatacaacatacattgtattaaaaattttggtcgtcataattaatataatatattgctttatccaaacatagtgttatttattatttaatacaatacgacccttatatggcgtaccaaacgagcctttcatatttattttcagcgacataagtaccaacatttataaaacagtattttcttcagctttattaatacatactctattttaaatttattaagtaaatcatactatatgtttctgtgtagacccaataatctagaatctgagtcttatatatatcctatttaaaataataacagctgtactaacaaaatcagaaaaaaaaattacagttttacaaacattagtacttatactgctaaaaataaacattaaatttataccacttacaaatttaaaattttaaatac

SEQ ID NO: 221698 - DNA, 874 bp, Cannabis indica
gacttgttgtgatagactatctaagggctggctgcgttactgaagcacctcgttgcaacgaccagtgtttcaacccttttcttttttgtcttgattatctcttggttaatttaggaattgcccttcaatttgacccttttcttggtgttgtgatgcttttttgatttactagcggaaatgttgtttgcttggccagaagacgaccccttttttttgaaacagtgtctttcacaatttcctacatcttcttcaaggtctagttccttcataaggtcacgtcccgggggtgatgtccacaattgccttagacttcaacattttctttacttcggtccttgtaagtctttcattctggcttgccatgcaactcgatgggctaagttttcgtgaattccatggagacgtgtaaaaagggatttaggcacatcttttctttttcaaaatagttttggctggacgtgcttcttatctccgggttcacttcttaagtttagcttttgagggaagatctcaagcgtatttctctcgaggggactttaattgagaacgtttctcatttttttttgcatgtatacttttggtgccgaatgactttggcaaatggacgtaagatgttgtagtcatcagcaatcgagcatatcatacccaacaaatgagctgggaattttggacccagattctcggtcatatgctcagagtttaacgtgcgtccccatctctaaggagttcaacgtagcttctccttgtttgaagaagtacattgcccttttgggttagtttcttagaggtgcacaaccacctgcagggtccgggaagggaaacatggggttctgggcaagaatatggttgtatgtcccaacagtctccacatggt

SEQ ID NO: 221699 - DNA, 1350 bp, Cannabis indica
actaattttttttttctttgaatttattatttgttattttatttattttgatatgttgttggagacataaaataactatactttgttttattttgttgctagttatgtaagaaaatattttttttcataaatattaaataatttaatattaaaaagtaaccaatccaaaataactgattcaatcagtacttttgcgaattggatttgacctattgtgcagattggattggatttaaaaaataaaattcacacttagtgcagatcggatgcactgtgagcaaaataatgcggattggatattaaatttcacacaacaaaaatcatagctagcatgtgacgtgcttagctctacattttcatatggtaaggtatttgtgagtaattttagataatttaatttaacttaagaaacctctattatattttaggaagaatttttaacaagctgtatattttaggggctaaaaaatttaggaagtaaaagtgctaattattttataatttatacattattcacataacttttaaatgctcatatgatatagcatgagtagtattttaggtgcttatttcattattatcaaacagtgagataactttcattactatatttatcctttttgattttcaagtagatgaagaatttgcttcctatagaaagtcttagctcttgacattggtgtaatattagagaagatattatcaataaaatatgttgttatattatatttgacaatatctaatataaattaaaatattaaatgtgaaaaaaatatatagcttaaggttaatatatatatatatatttgatgtttaaaatatatatgtggtattattctttaaagtttaaaccctcaacaatcattcaattagttaattagtctttaactaatttaactgtcaaatatgacagcttacatattgggtctattagcctatataaaaaagactactcatctcatttcataagagaataacaagaagaaaaagtaaagagacacaatacatagtagagagatagagaagttagagtgagaaatggagagagagagagagttaggattggaaaattgtattgagcaacattcattactacaaaacatgcctttagagacatttttttcagcataataattaataaccgacgtcatagggttgaaattttttagaaagaaatttgacgccacttttggcgtcggttatttgaaaataaccgatgccaaaagggtttataaccctagcccatcctttcgtcttcctcaatcgattagccaacccagaaatctccaaatcagagaaatcccaaaccgtctacgccaaccaccatggaaaatcacccccatttcacca

SEQ ID NO: 221700 - DNA, 3073 bp, Cannabis indica
tagtgtgtaagaatgtgaagaatccaatcaataagaaggagaatcaggctcagatcttggtgatactctgctacagaaaggatacaagggttagagatctgagtgggaggagtcatttaattccgctgcaaccactataaggtttctcataccttttatgtgtttattttcatcgtattagaaattcatattaggatgtttaaaaacatacttgttagtaaatctagatcctggtaaaatatattccaacaaattacagcgtctccagggcggatgtagtggctgacaacccactcggagagatcaacaccaacgccgattcaacggcgagcgccagcggtgggagttggggtggtagctggacctccggaggagtggtgacgaggagagggtgggtggtggattttgatggtggggagttgagggtcgatagagttgagctgagggtttgagatctttccaacctttccaaccttggcttcccaaccttgataaccctctctgagatcaatttctcttcaccgcgtgccaatggaacctgcacctccaagccacctaaacccaatccatattcgacctgacacccaaatgacccatcccagaccctaatccctcccaaatacaacccctcacaaaccagattgatgaccacgatgacatgtcagacgctagaaaaattatgtgagagagaacaaatatgagagggagaaagtgagagagagcatatcttaaatgaaaacgacacttgcgatggcgataacactgaagaacgacattgggatctcgagttttaggtcttagtcctcgaagttcttggtgatggcgacggaaatggatctcaggatctttgggttcttggctatgggaacgacactggggtctcggggttctcggtcacccgtgcgggattgatcggcgacatgacaaaggtcttaaggtcgacttagagggaggctaacataaatattaagtcagttacattcgttatgtctatatgtgtctgtcattcagttagttagttattctttctttccttttctttgctttggttagttagtcggttggttctttaaccacagtttgaggtagctgagttggttgtctagttaagagttattatgcttaactctcccctatttttcttacatttgtatagttaagagttattatgcttaactctcccctatttttcttacatatatatagttgtagctcctttgtacaattcattcaatctaatatagaattcaattacattttttattctgcaatagaggctaagagggagagagagaaaaaagaaagaaagaaaggaggatgaagaggaaggaggaacggggttctgatggttctagaagaaacaaaaagaaagaaaaaaataaaaagaaaagaaaaaaagaaaaaaacaatgttttgtaatttatttttattttaacatttttcaaaaaaaaatattatatttaaatagttaaaatgatgtggaacattaaaaacttgttacgtttacactagtgtacacatcaacagttcacactaatacttaacatctcttatgtaacaaaaatataaatataattttgaggattttacatcaaaaatttaatttgtagagttaagtgttacaaattgtataattcacatagatttgcagtaatatctccaacaacaataattaactcacctcctgttattaagttaaagagcccctaaccatcagttaatttcccaaattaccgtccaaggagagtcccccgcttaccagagtggacaacattgtccttcttggtcactacgtgaggtcaatttcatcttttcacaaagctcgtgccatttaaaagaagagttctatttgcaccctataaaattatatatacacttcattattaaaaaaaaatataaacttaaataattttaaaaattactcttaatatatttttttaattttttcttcacattattttatgttaatttggatatttattttgattttttataattttttctaacttatgtatatatttttttattttttttaaaaaaaaattcatgtaattttttatcataatatttaaaatataatttaattttgtttgataggtatattttttaagaatataaattagaaaagaaattaaaaaaatttagtacaattaaagataaattttatataaaataaaaattattaaagttaattatttaaaaagaaatttaaggtgtaaataaaattttctcatttaaaaatggactcctctccacgtcggcaactctttatttattttatttttgctcagttaggacatgagagagaggtgtaccaacctgtgttgcagaggtcactttgactaacgtttgtttgaccaagcaaaaggaccaaaagccccaatggaaaatagggccatggaacccgatttgtccttttcgttcttagttttggaactctagcctgcacgtgttagtagtgggtacatacaaatataagggcaaaatcataattttactctcatgctctattcttattaggagtggaatggggtccctgccctgcccctcccagtttagtgtcagtgaatttaatggttgaaactgtgatgaagaagatgatgggaaaaagattaagtgaggagtatagaaagatgtttcacatttggagatcatatataatatccaatatccataacagttcaattaataaaactccacctacatgtatattattattatatgtatttttcttagagagaattatatttacatacttcatataatatatttattatagttattgtttcttgcactatattcaagtaccatatggtctaaagtcatgtatggacattgattgtggatcgtaaaacgatgaataatggcgcctccatcacaagatataaattgtatgttggcattaatgtcttattccaaactatcaataatagtataaatatttaatgctacgctccactaagcttagtactatgaggtggggttgtataatttgttagctattttttataatttttattaaaagtaaaatatgtactacctaatattaaattatattaataataatattaca

SEQ ID NO: 221701 - DNA, 1289 bp, Cannabis indica
gaatcatcttcctcctccgaatcgtcatcttctgaactgaattcattaatttcttccacacttgggtcttcatccttatccaactcgtcaaggtgatcttccccgaatatctgctcacttacaacatctctgccataagaaatgaattttctttttctaatgtatactttcagcttctttttgctaataatttcctccccaagtagaacttgttccgttgcttgtaacactgagtttgcaataattctctctttagcattgaagtcttcccacaaactaatagctgcatttttaaaatcttctcttctcttcagtctgactgccttgaggatgccttcaaaaattagatttaatttattcaaggcagttgttgtttgacaagatgagggtacccgagcagccttttggtccaatagaatagtatatgggcccaaatgtttatacttaagatggcccatgtcacttctcagcatctccaaacccaatgaagggacaaacttcacaaccggcccacttaaagtctggcccaacctgtcctttgacccctcacactccaagtaattaatattggacctctccccttcataaattcggcccaccttaaataaattactttcctggcccattttattaacaatatcttcttcataaatctgccacatgtactttaaattgataaaagtactaggtattgaaaataacctcacacgtggcccttctaggtccctcatcagccgcctaaaaaccttctgaataaatatcacatccctagattcctgtgatttcattttggaaataccaaccgcctccataccattaatttttgcatgaacatcagtatcgataaccacaaattcttttctgcccgttgagtccttccctgtcagagcaccggtcaccatgatccctggacttaatgagttctccacaccaactccagtcaccgtagccaccgattccgccaccaatgagttctcagggaggttcatttcagcttctctgtagctgtcgtcgccattcgtgaaccagccaacagcctcgaggtcgactcctccaagaagctcatcgctgccagccaactcctctgtttctggttcgacttccagcgaacaggcggcttcttcctcctcgcaacctgatacccttcccggctctttagtcctctcttcttcttcgacttcttcgtgatggccagggaccccctcttcttcgatcctcctttctatttcaaaatcttgatgccaacatgtattaaaaaaaccactgaacttgtatcccaaatcattaag

SEQ ID NO: 221702 - DNA, 1973 bp, Cannabis indica
cccgctttaattagcgcaatgtccgacctcatgttagaaccaacatgtgaaaaattattatttttttacttcatatttctaatctagcaaattcttgcaatgtgattgcaaactacaatattactactctggtatctctgagggtagccttttataacataccacccataaatgaactatcttcttataagattaaatacaaattaatatatgtttttacattttagtctattttatgttctttttttttttttttttttgggtttgcttccacttattgtatttatttatttattcgtctgtatgtccactgtatataaacatttatatttaggtatttttctgataggttttaagatttattaggaatttaagtctcttaattttgttagactgttaaaaaaaaaaaattaaaattgttaaattcaaaaaattttctttaattttattaacggatacttgacgtagatgaaagttaagggggtaaatttggtatatgttaaagtctaggggaataaaatttaatacttattaaagtttgagaactcgattttatacatttacaatcaccacattagtaaaagtgaacgaaattagatagaagtttagataaaatcaagcacactttgatattgattgaaatgtatttctcagctcaattaaagagagctgctattcattatatttatagcagagtattacatacagtaaaggaccgttggtcagggtacagctgtcagccaaatacaaaaaggaataaggaatattttgacaatacaaaggacactaatgattgcagaatcaataaaaataatgacgccataacagaaagttgttatacggatgctgatatggaaatgatactgctgactatgcacaaatcctatttctcaacagcccctctcaaacgaaggggggattgtttgactccaagtttgctcacgagaaattgaaaacgggagtgtgacagaccctttgtaaggcagtctgcgatttgatcatgggatggtatgtaattcacttctaattgcttctggatgactttgtctctcacataatgaacgtctatctcaatgtgcttggttcgggcatgaaaaactggatttgatgccaaagctcctgcactaacattgtcacaccaagctactgatgtcataaacagaggaaaattgagttctttgagtagtgattcaatccaggatatttcagcagctaaatgagcgagtgcgcgatattcagattctgtactcgacctcgacacaaccgcttgcttctttgaggaccaagacacaagagtttcaccaagaaagacgcaataccctgccactgatcttctatcatcagggcagcatgcccaatcggcatccgagaagcctgtgatgttaagtctactgctgcaactgatgtgaagtccaacattcatggttcctttgaggtacctcaaaattctttttgcattgctccagtgtactgtggtgggagattgcaaaaattggcttagcttgttgaccgcatatgctatatccggccttgtatgacagagatactgtaaagccccaatcaaactcctgtatttggtttggtcatgaagtggttctccatctgttgctgatattggtttccctgctgctataggagttgggcaaggcttcaaattactcatttcaaatctatttagcagatcttctatgtacctggtctgagttagataaagaccagtttggtctctaaaaacctctattccaagaaagaaatgtaatggccccatatccttgagagagaatttcttgtttaaccgagtgatgaactcatttagagtgcttgagttgttgcccgtaataatgatatcatcaacatagattaacacaagaacaatttctgtagtctgttttgaaaaagaacagtgaggaatcggctcttgagtgactgaaaccccattagcagtgtgttttgagctgatcaaccatgctctt

SEQ ID NO: 221703 - DNA, 2144 bp, Cannabis indica
gggtcattgtgtgggtatcgaacgtgtttggtgtcatcctcagagaatgtgatagactcatattcatatcgaggttgtttgggagctcgctcccagactgctaacacatcgtcacccggctcgtgcctcagagactaagcatatttctcttgggatttcttggagtcccggctaaatgaggtcctccagatataatgtctaagcgaccatcaatggggggaggtaaaaattttttgtcatccccagttgtgtgttgttattgtcgtgtagttcggtcgttgtcacgacgtacatatcttttcaaatgggggttgttttttttgatgaggaactttatcaactccttcagattgttgctcgtcagtgtcatgaccataatcattgtggaatcgtcaaaacttgttcatgtcccatttgttaatatcctttctcataggataaggcttacgctatggcaccactgagtgagtttcattgtagatgttttctctagtgtccaggaggatgttgtaggtagtgaaccttggggttggatcttgtctggctggctcaggggtcttctttggtcgctttttgttgttgttgttgttgttgttgttaccgccattaccgttattccccctcttgccattgttggagccattcttaccgttaactccttgagagctttgactattcgagcttgttccgttctttttattcttagtgtggttaaagccttgagcatttcgctcggcttcttccaatttaatgaactcatcagccctgttaaggaaatctctcatagtatgagttggtttctgccttgtatctttccacagccgacttcccacaagaatgcccccatgatagcggcccgtttaccatcatcacttagatttttcactttggttgcttcctgcataaagcattaaatgtagttttttagcggctcatcgagcttcttcttgatggagactaagtcacccaactctactggaaagtcgtcgggctgaagagaattgggtgtagaataacccttcgaactcatcccaagaagtgatcctccctgggggtagtttggtaaaccattattgtgccgtgtccgtgagggttgtgggaaggattcgacatctcaggtcatccctgatcccttgaaggtccatttagatcttaaagtttttaacacgagttaggggatctttactacccgtgtacttgcaagtaggcattttgaatttcgctggaatggggaggtcattgatcatttgggagaaagaaggccctctcctcctttccagttctaagttagtgagtttcggtgcagtaaggtctttgaccaattgggttaactcatccaaccgagcttggatcaccgaatttgtggtctcttggggttgaaccactttaacgtcagcattcacttggtttctttaaaccagaccaggtggatttactatgtttaaatagtggttgtccctattcctattgagggcctcccgaaggtctccacccctcatgggcctacacgttcaaagattgacccggtatttggccttcctcctacattttgactatcagcccttcaatcgatcgtgggtggtacttggccatctctacccctttaaggtagattcttaggttgactttacctattaggggcgtacgaccatctggcttggtaaccccccagctcaggatttggttggttgttgacccgacttttagcttcctcatcgccatgaccatcagggtagtttggacgataatcattattgactttggggtcttcccttctccccctaggcctaatatttctcaggcgatcgttgccctctcgtggttgtcacggggttgccactccctatgttagggtgtccttctaccgtctctaccgcggtcaccattgttatttctggagtttccttctccgctctgccttagacagacattatgggagtcatcacgtcccatataataattgggtaggacttgttcatttgtagagagtggtcgattaattttgcggggaaccctattgaaggggtgactcctagccctctcttggttccttagacgctcttcaggtccatagaccaccctctcccattggtttctcggggtagggacatcctatggatatgttcggtggtcttgaggtatct

SEQ ID NO: 221704 - DNA, 5482 bp, Cannabis indica
aacataattggtcacttaattttgtatcacactttataatagcatatacattatacatatgtgcccacataggatttttaatccaacagatagcagctggaaagcatgtaacaaaagtttatttattaataatttatttttgtttttatttcatttgttaataataaataaaaattattatttttattatattgtattgggagaatggcaagcatgtaggagaggtctcactcatcgaggtaaagggtctaattcattatgtggcattcggattaccataatcacccatgcttttagttagagattaatattttgttgatttattcccaaaatgattattaatataatattaatataatattagcgtattaatttaacacaatttaaaaatttaaacaaaaaataaatacataaataacattttaataataaaatatgagaatatgtacattatatacattcttaaagctacaatttatatatttaacgttaataaattagattttaagtatcctagagttattgaatagacccttattatataggcacataagcaaattattttaaaaaatgaacataatataactggaagagatattgcaacaatttgtatagttcaaggaatttttttacaacggaagagaattcaacgagataaaaacaataagggtctcttctgttgtagagtttctggaagagataccaaagtctacccccaacccagtacccatgcttttacaatttgtggcagcttgatgttcccctgaaagtgcaccattttctttggcgatcgatttcaggatgccttccaactaagacacagttaaacacaaaaatatgtgaatgtggatttgatgtgccctttttgtaaccttgctagtgaatccattcatcatgttcttcttcagtgtggctttgctcaatcttattggagagtttcaggtgttaatatggctgctgggttaggggtagactttagtagctggttctttaatgtcgctaaaactcaaagttgggtattggtgtgtgaagcggcaatggttggttggaaaatttgggctgcaagaaatgatgtgttgtggaatagtaaaacctgttcgactatggaggtggttcggtcagctagagttgtccttgaccaatggaagaatgctcaatctcaaaaaggtggtgcgttgttagttaatgatattaacaatgcatgtgagcgttggaggaaacctgtgttcaatacggttaaggtgaatgttgatggagctatttttgaagctgaaaacaagtttggtgttggttgtgtggctcgtgattccaatggttgtttgattacgactttgtctgtaagtcgttttggcttagtcaaggcggaaattgttgaaataattgggatcaaagaagccttgagatggataaagaagaaacagtggactaatgttgtaattgaaactgatgctttggtggtggttcaagctattaatagctctattcttatgccttctcagtttagattactagctcgggattgccgtgagatgctttcttcttttactaatgtttatttgatttttgttaaacgatctgttaataaggctgtttattgtgttactagagggtcttgttatttatcagattgtgagtttagtgagcatgatgctcctagcgctctaaagaatattgtatcttctgagtgtttttgaataaattcctatctttgatcaaaaaaaattctttttaaaccaacaatgcaataatattgaatgcctaaaatgttagccattaattttttttacaataattatcaatttttattggctttcctttttgtgtagttatgcaaagatgtagtaaagtcttagtctagtcctctcttcattctctctcactcatcatcacgttccttgccttgtcagtccaaaaaaatcctacccatttgtgggtcccacacaccaaataattaattaataattattataataaataaataaatgtttattttatgacaaaacaaaccgacaatcatctcctcttctctattttcccaaggataattaattctgtttagattggaattttcttaattacccatctttctttattttatttactcaaatgccattaaaaaaaagctttagatttatgtcaaatcggaatatcggcggattgtttatttactattctacccctattcggattttcagctacggtagttaagcggccagtttagtgtgatgttttagccgaagggtaaaacagtattttcataaaccgaaaacggacctcttttaatccggtttcatagcattggatctcttcgaatcttttacttttttgaattttgaatctctttaccaattcacccttggtttttcctctttattacgatattgacactgtcagtcgttaaaaagcgggaaaagcactgattttccaataataacccgtcccctttaatgttgttgatcactaacacgagggtaaaaatgtcattctgggaaacactaatgaacactcactatcaatggcgaaactgtaaaaattcgacaaattgagggtaattatggaaatagaggtccagaatatgaggcccactagtctttttaggcaaaaataagttgccacgtcacttagctagcgccaaaaaaaaaaaaaaaaaaaactttctcaaagctcttcctttgcacctaagtagcttaaagtttcagctgtactaagtactacacttctctctctcttctgctactcactttctctctcttagggtttctggtttcagtgaagaagaagaagaagattcaagttctgttcttcatcgtcttcggcattgtatggtttcgattacgtttgatcaagtttattcaagctcttttacactccacaaggtttgtattgctgtacttgttgttcttcttgttgttgctatttttgtcttttttcagcttctgaactttggttttttgttgttgaaatgcttatagggaagattttgattggagtttgagcaataatgacttctagagggaggtccgatcagactccgccgccgcagcaacagccgcagcggcggatccagcggacacagactgctggtaaccttggagagagtatatttgatagtgaggttgtgccgtcttcacttgttgagattgctccgattcttcgtgttgctaatgaggttgagtcgagtaatccgagggtcgcttatctctgtaagtttattctttggtttataattttctttgaatgcgtcgtttttgttgcctggtttcgtatatggtattgaaattatgatcttgtttctacttttgtctaactcggttgataatggtttttagctcaaatggtaagtgcatatagcgagaaactatggtacatttctgaaaatgtagatttaatttaagtgtttttttttatattttttggtcatgtacacaacaaatcatcttggcaaatggtttaatatggaaatgccagttaatgtatcatgagtttaggcttagtttgtaaatgcatcttctttcgctctgtgcctgcttaaggtctttaagtatctcctttcagcgtacttctatattgtcttccttgtttctattttatgctggtgtagtggatgtttcgctagaattgttttcccttctatatgtatgcattactgatgtgaaattttgtttgcattctgtcgtaggtcggttttatgccttcgagaaagctcatagattggatcccacatcgagtggtcgtggtgttcggcaatttaaaactgctctccttcagcgtcttgaaagggtaatttttttgagtcttggtggctgttataaaccagatttaatagtgtttttaagatttcttgcttgttttcttttgagtcctaagctatattgactctgattttcaggaaaatgatccaacattaatgggaagggttaaaaagagtgatgcacgtgaaatgcaaagtttttatcagcattactacaaaaaatatatccaagctttgcaaaatgctgcagataaagctgaccggtgggttatattttatgtttgggacgatcactttggtttttgcattagttgacaatcaatcttttgctgttttatagtgcgcagcttaccaaggcataccagactgctaatgtactctttgaagttttaaaagcagttaatatgacgcaatccatggaagtcgatcgagaggttataaacatttacctgttatccttcgtgctgtcatagtttcctgtatcacactttgttgaatgtttttcctattttgcttttcgtgagctctagtttggacctttatttttgttcctcatggttgatgaacccagattctggaggcacaagataaagttttagagaagactcagattctagttccatataatattcttccactagatcctgatagcgcaaatcaggcaattatgagatatcccgaggtatgtttgtaacattcaggctttacaatcacattgcctaccaacattcctaaattagactggtacatttaacttttataattgcattgcctttatgttttattctaatttttattgtaattttcagatccaagctgctgttgttgccctccgtaacactaggggtcttccttggcccaaggaccataacaagagaaaagatgaagacattttggactggcttcagtcgatgtttgggtttcaggtcgtgcatttggcaaaaaattcaactgttcttttacagtgcactaaagttttgcatagcgagccatagtccatcacatgttgatgcccaattgacatcctttacatgtttaatcaattttacagaaggatagtgtggcaaatcaaagagagcacctaattttattgcttgctaatgtgcacattcgacaatttccaaagcctgatcagcagcccaaggttgtaacttataattgtttgcttttcttttttttatttgaaaattacattgatgtgactaccttctgtgagattattatcataatattttctgttgttaggagtcttttaccagccatattcaatctattgcttcctaattatgagtatgtagaacttttagactactgacattgctgacaaggtcattgtcttaagcaagatagaaggtgccacatttcctattttgtgtagtcaacggccaagtagtcaaattgtagagcctatatgattgaacatctggtatttaagtgttatgacttatgatgttatctagaaaattgtagaaaaaagaacatagagtttgtcaatagtttataattaacttttataaatggtttctgactagtgcatttattttgttagttggatgattgtgctctgacagaagtgatgaagaagctcttcaagaactacaaaaaatggtgcaagtacttgggtcgtaaaagtagtctttggtgagtgctttttgtgctgagctatttgtcattagattttgaatgactttgtatttggttcattgtgaatgcctctaatttgtaattttt

SEQ ID NO: 221705 - DNA, 2365 bp, Cannabis indica
atttgcattactagaataattaaaattaaatattaaatataaatttggttgaaaaatcacatacaattcaatttaaatttattttgcaacaaaatttcagtagcagaattattatatttttaagtactaaagttgtatttgttaccaattttaaggtgatttgctactaaaatgtagtactaaaaaagttttagtagtctttcaaagtaattattttgctactagatttgatattttttgctacaaaaatattagtagcaaatttgctacaaattgccttggtagcaaaaaactttcagcaacggagtattagctacgaagtagccaccaaaaaaagttagttgcaaaaagtatattagctactaaataggcattatttgctaccaatttttttgtagctgaatatccatttttttgtagtgctttatagaaatgatatggtatattattgcgtaggtattgcagttaattaatcttataatggagggtgttgatgatgtgattctgaagatgatgatgatattcacaattatgctatctatgttccatagtaccactactactgcctcttattctaattcttcttcttgtggcaatatccataatataacctatcctttcctgctcatcacaaatacatcctactgcaacatgatttgtgtggtttgcatgaacaacactaccctcctcctcacatcagatgagtatccttacaatttaacagttgtgggaatcaattacaacgactacacaattagagttgtgtacccaaatctccacaacaacaacgatgattgctcctccatccctaaccaatacgacatgaatctgctcagcacaaattctgaattggaaatagtaactaggattggagaggatgggttgtttcggtggagaaaattcaaaacttaccccatttcagagtacatactattcttaatttgtcaaaacaaggtgtacaacaatcctctttacatagacccatctccttgcataaatagctctacttttgggttcgggtctggatctgggttcgtgtacgtggtgtacgcttctgggttcaagtattctgatttgggtaactcttgctgaatactccagtcggccctcgtatctgtgaggacagatgaggagaagaagaggcttaatacatcctacaaacacaagattaactgtactgtccctcttctatcgatgcaatcataattaactgtattgtcccgtttctgcattgatagaaatatatctttattttgcatagtcgagcaccacttacttttcatcttggtataatattattcgttttggacaaaagtctcaatattttgttcttggaattcaccccgaaagacctcataccaattgaagactttgtcggtcatgtatttaaactctaactatgaaatcctgtatcatcctggaaaggcaaatgttgtggcagatgccttaagtcgaaaaggacctgaccagatattcaatatgatcatgatttctcctcagttaatctcaaagatgtctagggaaaaacattgagttggttgctgaaattgcataatctgacacttcagtcagacttgttggaaagaaacaaagtggctcaattagaagattctgaattgattaagattcgagaagatgtcttagtaggcaaagctaaggacttttcaatctttggtggtggaatgaaatgatattgtttaagacgcaggtgtgtgtccctgataacactgatcttaagagagaaattttggaagaagcacattctaccccatacccattgcatccaggaaccaccaaaatgtatcaagatctaaagccatattactggtggtatggaatgaaaaggggatgtggtagactatgtcactaagtgcttaacttgtcaacaaattaagcaaaacatcagcgacctccaggattacttcagccactaacacttccagaatggaagtgggaagacattgtaatggattttgtggttggttttcctagagccacaggaatgtacaactcagtttgggtcgtggtagatcactttacaaagtcagcacattacttgcccgttaaggtaacctatacagtggatcagtatgttgacttgtatgtgaaacagattgttcgtcttcatgggataccgaaatctatcgtttcagatagtgacccttaatttacctcgaagttttggatcagtttgtggtaggccatgggaactaatctgaaatgcagcacgacctttcatcctcaaactgatgggcaatctgagcgaaccattcagatattcgaaggcctattacgagcttgtgtcatggattttggagggtcatggagcaaatattctcctctgattaagttctcctacaataat

SEQ ID NO: 221706 - DNA, 3828 bp, Cannabis indica
ccacgacatccagataatacctctccctgtactagaacttgttcgccaccagaaactagccatcagtttttctatttcatcacaagtacccaatggaaggaggaaaacactcatagcatatgtgggcaacgattggacaactgttttaagcaaaatttctttcccagcacgagaaagaaacttgccatcccagctattaatccgagctatgactttgtttttaataaagccaagcactgcatttttgttgcgccctatgatgtttggaagccccagatagagactaccttcatgagcttcagccatacaaagagtagcacatatcagattacgcattgtggtattggtattggggctgaagaagatagaagactttgtgtagttgactttctgaccagatgcgttttcgaagagctgcaagagagtggatatactatcagctgcaccttgtgtggcttggcaaaacaagtagctgtcatccgcaaaaaacatatgtgttatagatggcgcccgttgagcaacacgacaaccttgaataagtctattagcttcaaatttttggatgagagctgagagaccttcagcacagatgataaacaaataggtagatagtggatctccctgacgaattcctctggatggagtgatagattcgattgcatgcccattgtgaacaactttgtagtgaactgtagatacacaacccataatgagatcaatccatttaccagcaaagcccattcgagacataatcgcttttagaaatctccactctactcgatcgtaggctttactcatgtcgagtttgagtgccatgaagccttttttgcctttccttttccgttttaaataatgcatgacctcaaaagctaccatgacgttgtctgagatgaggcggccaggaataaaagcactttgtgtttctgaaataatactatcaatcaaatccctcatacgattcccaaaaccttcgatatgaccttgtaaaggacattacatagagctatggtctgagatcactcataacagtaaaatttttcttctttggaatcaaaactagattggtggcattaagattatcaggcatgacttcagtatcaaagtactccttaactgttttgataacatcagtaccaataatgtcccagtgatgttggaaaaacccaggtcccataccatcgggcccaggtgctttgtcagggtgcatggagaatacagccaacttaacctcttcatcttgtattggttgcaaaagagcttcattgtgtaaggccgtgacaacaactttcacattatcaataatcgaaggagaaaatgagtctgtggactgatataattcttcgaagtattgccttataagagtctcaagaccggtgttccaactttgccaagtcccattgctatcttgaagttgttgaacattatttgatctctttcgagcgctgcagtggcatgaaagtatttattgtttttatcccccgagtgcagccaatattgctttgaacgctgtttccagtagagttcttgttgtgctaagatctcaaagtaattatttttttccaccgcaaagttctcaacatcaaaatcattacccgaatttttgaattcagcaatcagcttcttgcttttggacaaacgggctttgaaattccctgtcagcttgcgtccccagtcagctagatgagtgctacatatctcaagcttcttcactaagctttcattcgaatttgattcccatacattagctacaatctgcttgcaaaatggttctctattccaagcattttcatatcgaaagggagtgtaataggcagtgccagtagacaattcagggagtaaataaatgggagagtgatcagaggatgagaaatcgagattagtgagtgatacctcattgtacacgtccagccagctttgagtgaccatggctctgtcaagtctgatttcaaccgcctgaggagagcctcgacttcgttcccatgtatatggatagcctttgagatcaatatcaataaggtgacagtcacgaacagcctcttggaaaccagaaattaatgaagatggatatggccgaccccctttcttgtcttcatgactcagaatgttattgaagtcgccgataatacaccaaggaagattagattcattgctcatatcacgaagcaaattccacgttcggtatctgaaggtgcgatttggctctccgtaaagccctgttagcctccacggagtcataccaggaagatgaacagccatgtcgatatggttgtgtgagtacttgagcagatgggcttcagaagaaacatgccataacatagctataccaccttttctaccaatgacatcaattgaaaagcacccttcaaagcccaatttatttttaactttctcaacaacatctttagtacataaagtttcactaaggaaaacaaatttgggtttcttttggacacaaatgtcaaataagaattgttgggcccgtgggttcccaagcccacggcaattccaactaattgtactcataatgttgggtgggcctggaatccaagacccaccttttgcaagttttttgaattgttcacttctgcagaagtattttggtttttctccacatcatcttcagttattgctgttgagagagtcatggccccacttgaaacaatcagctccattctttcctttttaagtcagctatctcaattaaattctcatttgaaaagctggcagaattttcattgaccaagataacatggtcattatgagaatgattttggttcccataattttgtgaatccgaaatcatgggatcatgattgacatttgattgctgctgatttttaggaatcgcattgatctcagggattatcgtggcagttggcggtgtggcttcatggtgcatctcacggttgtcctccttgccggtgcgcagccatggagaagcggttaggaagctttgccttttcagaggagccttcatctctagactgtaaggcttgacaatctgatcagcaggagtatcataaactttgtgacaaaacttctcagcatgtcccatgattccacaaatgaaacagaaagtgggaactcgttcatacttgaaatatgcataaaaccagtcgccatttcgtctacgaaacttcatccgcctcttgagtggttcagcaacgttaatcttgactctcacacgaagataatcacgccagactccattaaaattgttaggatcagaagttacgagagtaccgatgtaacgagctgcttcacgaatagcccaatctgttttgaatccagatttcaattcatggatttgcacccacatatccaaagaattcagtgctaccattcttggattttcatcttgtttcagcctttcaattataagttgctttctatcatatgtccatggactgccatcgatcactcgttggatatctatctcatggtagaattggaataaaaacctgttttggtctagaatttttattgtaatccctttaccaggtttccataaatctgccatgatgttttgaaagatcttaaagtctgagaccttcccagacagtaatcggcctacaaggcaccacctgtagtcgaaatcagcttcttcctctcctatgcagtcatcgtcgaatagagcctcgtgttcttcttcatcttctaaacaaatatcagcccatcttttggtaacttgttcctcgttgcttgatgaagccattggcgcaataagagacagataacacaagagcagaacacaatactaacagatcagacaaacacactcttgatcaaaagagacaaacactctctatttttatatacattaaattt

SEQ ID NO: 221707 - DNA, 3335 bp, Cannabis indica
acacagtgcaatcatcttgagccttggagatgaagttttgagagaagtcttacatgaggagactggagctgcactttgggacaagcttgcctcgatctacctcaagaaatctttggcaaacaaattgtatctcaagaaaaagctatacaccctcagaatggaagagacaaacgagcttagaaagcacctagatgaattcaacagaatcatccttgaaatgtccaatattggtgtgaagattgatgagaaagatcatggtattattcttcttagttctctccctaaatcctatgaatattttgttgatactatattgtatgggaaggatactctaaccatggtagaattcaaagctgctctcaactgcaaggagattcaaaagaaattagaagaaaaaggagaaaccagtggagaaagactcctgtcttgaggaagatttgacagaaaagattccaagaacttcaagaactctgatggccacaagaacaacaatcatcacaaaggaaaatccaagtacaaactaggaaaattctacaattacagtaaaaaagaagggcgttgttatcttcccaagaataaaacaaatgaagaaagtaaatctgatgttggagaagctggtttagtgtcaaatggatatgaatctggtgatgtgctggttgttacaaatagtgtgtccaatggagattgaatattggattctagaagctccttccacatgtgtccaaataaagatctttttagtagttttgaagaaatttacgaggatcaattctgttgggaaacaacaaggcttgtaaggtgcaagacattggttttgttgtcattaggatgcatgatggtgttgctagaacaactacaaatgtgagatttgtacctgatctgagaagaaactttctatcaattggagttctagcttttaatggttgtactgtggagattgagggcatccacatgaatgtttttaagggagcaatggttgtcatcaaaggtgagtttggaaatggcctttattttctcactggtaagcctgtggttggaatagtagccttagtttctagtaaataaattgatctcacccagctatggcatcaaaggcttggccacattagtgagagggggattgcagaattgctaaaacagggggttttctgtggcaaactcagtggcaagttagatttttgtaaagaatgcatctatgggaagcatttcaggctaaaatttggcaaatgcacacataaaacaacatccccactagtctacattcactttgatttatggggagcaaccaaggttccattcttgggtggaacaaactattcatgtagcaatgttaatgattactcaagaaaagtttgggtaatgctcttgaaatctaaggatggagccctatatagttcattaattggaaaactctcattgaaaaccaaatttatttgaaggttaagaagctgaggactgacaatggacttgaatattgatccaaagaatttgacaggtattgcagcagtgttggaattgccagacacaaaactgtgagaaaaatcccttagcaaagtggagttgctgagaggatgaacaaaactctccttgagagagtttggtgcatgctaaagggtgcaaatcttggtagaaaattatggggagaagttgtcacaacaaccaactacttgatcaatagatgttcatctgtagctttgaattttaagactcctcaagaagcttggactggcaagaaaccatgttatgaacacttaaaagtgtttggctgcactacatatgcccatatcagacaagacaagctcgagccaagagctatcaaatgcatgttcagaggataccccaatggtgtaaaggagtacaagctatggtgtttagaagaaggttttaagagatgcatcattagttgggatgtgatctttgaagaagatgagatgcccatgaagatcactaagaactcagacaatagttctaaacctaccacaactcaagtggaagttggcaaaggtgataatgacaaactaccaaatgatgcaactaatcaaagtgaattgcctcaaccagatgaagctgaaagtgagctgagtagttaccagttagcaagggacaaaaaaagaacggagactagagcacctgaaagattaagatatgcagacttcattgcatatgccttgctgttgctaaagaagagatcaattcagattccttgactgtccaagaagctcttaccagacctaaaagtacagcctagaagagagcaatggatgaagagatggattctctgattaagaataaaacatggatcatggtaaagaaacgaaagcatgcaagagtaattggctgcaagtggatcatgaaagtaaaagaaggaatccctggagttgaacaagcaagatacaaggcaaggctggttgcaaagggatttactcagaaagaaggggttgattttaatgagatttttttcccctattgtatacaaacatctattagagtcatgctagccaaagcagccaaagaaaaccttgaggtggaccaaatggatgtgaagacagtgtttcttcatggataattagatgaagaaatctatatggaacaaccacaagaatatgaaaatggagatccaaaaaaagtatacttgatcaaatggtccctgaattgtttaaaataggcaccaaggcaatggaatatcatgtttgacagctttatcactagcattggtttcactgaaagtcactatgatccttgtgtgtatatgaatcaaaatctatatttgctttatatgttgatgacatactaattattggaaaagagaagtgtgagatcaagaagatcaggggaaagctcagtgaggagtttaatatgaaagatcttagcaaggctaagaaaatcttggggatagaaattgatcaaagctagaaaggaatgatcaagttgtcacaaactgactacttaaagaaaacacttgaaaagtttaggatggacaactgaaaggcagtatctacacctttggctcctcaattcaagctctttcaatctcagaatccccaaaccaatgctgaaaagaagctcatggagcaagtgccatacaccaacattgttggaagcttgatgtatgccatggtttgcaccagaccagacctagccatgctctaagtgtagtgagccgacttatgaccaaccttggaaatgctcattggacaattgttaaatggatactcaggtatattaaaggccactaaacctaagaatagtttgttgggaatattttaccaggatctagatttactagcaagtatgtcgaataacatcctaaagatgaattctataaaacaatgaaa

SEQ ID NO: 221708 - DNA, 5263 bp, Cannabis indica
caccagtggaatccatttcaaaagtctctcaattcctccttactgttcgattagattgcaacaattacctcgctcggaaatcgcaggtgatccttacagtcatcggccatgggctcgatgacatccttctcaccggagttgcccctgttgagcgccttgtcaatggtgctatcaaccccgaattcacggcctggaaaagaaaggatcagctactgctcagttgattacgctcctcaatgtcccaaacgattcttggttctcttgctcatcacgaatcatccttcgaagcttggcgtgctctgacccaacggaaaaaatgaaaaaataactatagtaatattttttctttgggggtttggtttagagtttttaaaaatcaaaagttggccttgctttttatttaaagacatacatagatatgtaaaacatgaaaaggtcattacttcgataatgcgcatgcgatatatacagaggtgtaggaccttgaaccaagctcaaacaaatatagacccagattttcatggccgaattacaccaaagcatagacctgataaccaataacgcacgtgttagttggtttagttttgtctgttattttctgttttctttgtaacagattctgttcaataacaaaattcttatcttgtaattctctggtgtataaataaagagtttcctcctcagtttcaaccaagggctgtttctcttggttctgaggctttcttctctctgttttgttactctgctttaagctttcaagacccatatgatctcttgggaacacggggtacgctgaaaagagctttgatttcatttaagaacctctctgttcatttacaatgttatgcttaattaaagatttagctaaacagagtggttggcttgtggcctgatgatttcacttacccaattgagcataaatctctgttcatttacaatgttatgtatgtaatgtaactccttcattgacatgtatatatgctcaattgggttgaggttcaatttttcacaaaactgttcgaggaaatacctgagggagattctctatttcttggaatgtcgtgattttttcttattgaatgaagtgattattctcgcgggtgttcggatgcttcttggtaaaattcatgcctctgatgatagatgatgggaagacatgacaatggtgagtattgatgacttatcttgtctactgtccacctattattaattcagttatttactttacttgttctgtttttcccctttgtaagaatcagttagtttgttaggactttgctatttttcaactgttagttttattctctgttcaagactgtaacaaactctatcatatataaatagcagctcacttgatcagataaagtgatcaagcttttccttctctacagtactgttttctaaactaactgttctaaagatttatatggtatcagagctcgtgactcacgtccatggaaacagcttcctcctatccaacacaaggtcaaggctctgccctgtttgacaacaacaacaacaacaacacaactccggcaagctctgctacaccggcaaccacaaattcatcttggaatcccttttcgaattcccttacatcgtctttaaccatcaaacttgatcgaacaaattacctcgcctggaaatcgcaagtagtgccaacagttattggacacgatcttgatgagatcctgttcagtaatgttcgtccaccgactactctaatcaatggagaacttaatcctggtttcaaccaatggaagaaacgtgaccaactcttgttgtcatggctgagatcctcaatgagcgaaggcattcttggatcggttgcagcttactcaacatctttcgaagtttggaggtctctcgaacaaaagttctctggccaatcaaaagcctaattgctgcagttgaaaagtcaattaaccaacattcagaaaggtaatatgtctatatctgattatgttgataaaataaaatcaatttgtgacaatcttgccatagctggatgcatcatcaatttggacctgagtatgactctgtagtttctggtattacctccaacaatgaatctaaaagccttgaggaaattcaagccctattgatggcccacgaatgtcgtttagaaagacatcattctgtttcaaatattaccaacaaaatggctgctaatcttgctgttggaaattcaagaaccagcttcaacaacaatagaaatggaagtgggaacttcagaccccactatcaacaaaatcgattcaatgagagtacaagaaactccaacatctttcccccaaggtatcctaattccaattcaagaccaatctgtcaagtctgcttgaaaattggacacacagcctccatttgtcactataggtttgacaaaaaatttgtcactccaaagaataactcacaatccccaaaagcttacattgctgaacaagagacatctgaagcaaacgatccacaagcctattcaaccactacagtaccagattttggggatgacatgaagtggtatgtcgacactggagccactaatcatgtttctcttggcattgaacatcttgacagtgccactccttatcatggctcagaaaccttggctgttggagatggtaagcaacttctaatatcacatattggtaaaaaattcattcactctaattcatcctctcctttgaaattgaactccattttaaatgttcctgccatcactaaaaaattgattagtgtatctaaactcactcatgacaataatattttcttgaatttcacaaaaattattgctttgtgaaggacaaggacacggggaaggtcttggttcgagggaaacttaaaagtggcctatatgttcttgatgagaattcatccaagttttctacagctacactacaatgtaaccttgctacaatttcgaaattacatagtccagtagataattcttctagtaatatttctcaaaatgattgtatttcaaattctgtgaacactagttcacaaatcaattgtacaaatcaatctataaataaagaatctacagattcaaattttcaatctcaagctttattatcttctactggacatgatattaatatgtggcatagaaaacttggtcaccctggaccaaataccttaaaacaaattctatctcatctatgttaatctaactcattaaaagaactaaaattccgtgatgcttgtcaaaagggcaaaagtcacaaattgccttttcccttgtcaaatagccgagcctcacaaccattagaactgcttcacactgatgtgtggggaccctcacacacaccttctatagatgggtttagatattacatacatttcatcgatgactatagtagattcacatggatttttcccctcactcttagatctcaggcatatgatgtattcaccacctttaaaacacttgtcgaaaaacaattttctttacctattaaatcggttcaatctgactggggaggggaatatagagtgtttgctaattttttgcagggacagggcattacttttcagcatccttgcccacattcacatgagcaaaacggccgtgcagagagaaaacatcgccacatcacagaaactggtctcaccttattagcataagcaaatcttgatatgtcttactggtggcatgcttttcagtgtggagtatacacaattaacagactgcctacaagacttcttgacaacagcagtccctatgaagttctattcaataaactgccagattacaagttcttaaaaacttttggttgcatctgctacccacaccttcggccatatcattctcacaaattaagtttcagatctgaaccatgcaggttcctaggctactctcctaaccataagggatatatttgtgaaagtgtgcaaggcagaaaatacattgtgagggatgtcacgtttaatgagcagcaatttcattttcccaactcccactcaacggaccagccatcaccaccaacacaaatgccctccacaaatttttatccacaccagataatatctagtaatgtctctacctctcctacaactcctactacccatacttcagcacccatcccttccccacaacctgacacctcctcacctaacacacctgactcatccttgcccatacccgagtctaatccttcccatattgccaacactaccacagatactacatccatccaatctcaatctctcttacatactgcccctgccacccagcccatcattcgcactcacccgatgaccacaagatcacaaagaggcattttcaaaccaaaatcctacttagctaccaaacataaactaccctctatcccatttccctatgaacctacatcattgaaagttgctcttgctgatcccaagtggaatgcctctatgactgaggaatatcttgctctcaaaagacaaaacacatggacattagttccctacacacaagacatgcaagttctcaccaacaaatgggttcataggatcaaattaaaggctgatggttctgtagatagactcaagtctcagttggttgcaaaaggttttcttcaaacaccaggaattgatttcgaagacactttcagtcccgttgttaagccggctacagttcgcacggtcctcactcttgctgtctctcacggctgggaagtaactcaattggatgtaaacaatgcattccttcatggcacattaaatgaactagtttacatgaagcaaccagctgggttcattgatccttcaaagcctactcatgtttgcaagctcaacaaggctctatatggtcttaaacaagcccctcaggcatggaatgacaagctcaaatcgacacttctccaatggggttttactcaaccaaaatctgacaactccctttttatttctgtctactgtccacctactgttaattcagttatttactttacttgttctgtttttcccctttgtaagaatcagttagtttgttaggactttgctatttttcagctgttagttttattctctgttcaagactgtaacaaactctattatatataaatagcagctcacttgatcagataaagtgatcaagcttttctttctctacagtactgttttctaaactaactgttctaaagatttataatgagaaggaacatgaataactttggagccagaaaggtaccaggatgtagttaaatagagattcacggttattgagattgataggagaaagtttcaggaatcgtaacagcttggaaatttcaaattattcatt

SEQ ID NO: 221709 - DNA, 4291 bp, Cannabis indica
aaagtggcagtgtgggattgaaaagatacatgacgagtgttccgcagtccaagatgacacagacatttttttactgcagtattctgtttctgctactaaaacagcttcatatgagttgagaatatgacaactgcaaccaacttcttaaaaaaggaccaaatgatatgctcaaggacaaaatgaaaacaaaacaactaattacaaagctttcattatctacatggtatagggtgtttgtctagaaataattcattcactcaaaaacttgttattcaccggaaaatgatatcattttctcaatagagctgaaattattagccaacaaagatagatgcagcagcctcattgtacttgattaagctggacattaaatatcaaaaacaaaatctaaaaagactgaagaaagttaaaatgaaaggtaacatttatttttcttctatttcttaccaggatatcttgacctatccaggcaagtgagtcacgacgataaactgcccaaacaacagcaaacgtaatgcagaaaggagaaacagctagagtcaggtatgaaacagctccaagtaatggcacttttacatatgactctccagcttgtttaaaacatctgaaactatagtcacttagtcatcagtttcataattgtataacaataagggaagaactatatcagcaagaatggaaaaccacatatattctggaaactagctgagctcccagaaaactcttttaagtagctgtaataatggaattttattatgaacaattaaaaataataatatttgaaaaagtttagctatgatgttcgaccttaaataaaacaaaatgcacttcgagtgtacaagatatttgatgcttgtggtgcaaatcatctttatcacaaaaaacttcaaaagagatgattttaaattaaagttcattgcaaaaataaagaaaactgcaaggaagatgtttccaatctaacaaaaatcctacataaatgctaatgaaatcctttttcctcttttcataagggatcatatttgaccttgaacagaagcataatatagctataataaaaattccctcaaaactccaaatattataaagaaaacataatgaaaaaaaaataagaaaaggggacagaatatataccatgataacagagccaccaagcaggtttgcaggccctgtaaacacataaaatgtggtgttcagaattcatgttgaaggaagctgagagtatgatgcaaaccaattttaacagttcatgtcccaatataagaaatttaagcatatttatgcaaaaaccttattttatatttattaaatttgataaataattgatgaagaattaatttcaccaagttaaaaaaaatggaacagaggcgcataattggggtcataagaattatctaacttaacaccttcattaaaaagctgaaaataaataatgcaatcaaaataatactatcataatttaacaagaaagcagcaatggcaaaggtgggttgcagtcttggggaggaaaactatcacttaaaattaagtttctaaactatttttcttaggagaaaatattcagataataggaaaaatagtatagtatatatcttcatatataggcacatacatatctaaatctatgtgcgcatttgtctatctgtggataacacagaaggtggccgcacctctactccaccaatagaaaacaggaccaccagaacctccacaaaccagaatgacataagtttgtaaagcataaccaagaagcatgaagcgatcacaacaaagaggactgctgcagtggtattaatgtccacataaccagttggcccagcatcttccatgtgtaaagtttcctctgaaccatcctggaagcacatgtagtagtcaaagaagtcagtgaaatattcaggcaaggaaacaagctcaacaaaaagaaaatccttgcataagcttaactaatattattctggaataagactagtaacctttaatagtttctcttgttcaagtgccgcttctctagcagtccatgcagaccagtatgatgcacataagatggtaccaacagccataagccacagaaatacttctgcaatgtcaaccagtggacgcaatggagagtatagctgcacagatactggagaaaagggtatcaacccgtcaggatttgcaggaaaagtggatacaacaattgctaagttacaatactgagttcgctacaaaaggattattttaaggaggcaaagcatacccttggaattattcttaagatctgtttccaagattgtaccagcatcttgaggtagcattacagtaggtatgcctatgattatgtcagtttcattctcttcgcacaccatcttgaaaagttctgtgaaatagaaagcaacatttattgaaacaaaaccaaattctgacataatacattttaggtcttaattatgattcaaacaaactctactactagaaattctgattctgttctctcccagaagattcttatggaataagaagacaagcagcttaataactaaataaattaacctaatattttctatgccttataaattttaataaaaatctgagaatattcaggtatgcaatgtgttggctgggactaagcacttatgattggtaatggaacattacatgcaggtacctgttcgatagtttataatgagaagagctgaagcatgagcagtttctgcataattagcctttgttgtgaaactgcaatttcctctatggaccaagacaatctcccctgagagctaccaaaaagccaggtctccaaattatgagacacacaacaaatgaacaatcttgcagattccacatataaaacgcataaatcacttattttaaactttgaaagccgtatcaaggattatatagtctacactaagagtaccttttgctttggtggactacaataatcaggaggatctgccagaaccactctagtatggttggcacgtttttcctttgattccaaggtaggaccaaatcgagcaccaacaccaacatactcactggtttctatgccatcaacccaagtaggaacttttacctacagggttaaacagaacttatcgttgatatcaaaccaatcacatcaagcaaatgagaattaaatttaatagaacaaagaatcatgcctgcctcaagaacatgggttcagttcagatgtcttagtagtgactagtgagtgtagagaaattaggtcaataacttacatacttaaagcagtgagttgactgaaagtagattaccaccagagagaaaataagatcatgcatttctctacttttgattttacttacagtaatattttaataagcacagggtttagagtttatgctgtgataaaggaagcactagacaaggattgatttccatgagaaatgattattctatttgttacattgtttgttcacacaacaacataagaatcctattttgcacaggcatggaagactaaattatcaacccaaataaaactcactcccaattaatctgacaattatcagaacccatgttcttgctcaatatttttccatttaatctatgtgggacaaccgatttgatcggttaaaaagccaaaactattaacaataccataccatgtatgaaaaaaactatttggtcagtttagaatcataggatcgataatttaatacaattttacttaaaatcatggtttcatctcaatccataactaaccatccattaaatataaattctaaggtgatcaaaagtcaaacttcagcacaaaaataaaataataaatgccatgaaattttaaaattgaaaaccaaaaacatcatcagacagatatcttgtcttaaaacagcttatagtatgttctcagcccattattttgtgaaactaggaattcgatcaaatccaaaaaaaaaaagtcaactaggagtaataagatgtgaatcaaagataaacaacccaggatctaacgtggaaaggaaaacaacaagaaagcacggttgttaatattgaataacttcataactttagaacacaacataaaacttgaaatttgttacagagagcaacagttcaatcctgaaatgaactgagtcaactgacaattttattatatcctcaaactgaaagcagaagtgttaagacgaaataatttagtattatttacatgccaaacaggggcacaagaaattgtgggagctgggaggtgggatgggaaataaagaggcaaattcaagtttttttttttttatgtaaagcaactcttttctactgttattttataaatacaaaaatccttagtttt

SEQ ID NO: 221710 - DNA, 2346 bp, Cannabis indica
tatttgtgttcactaattggaaagatttctttggggaagttgattttgggtttgggaaaccgttgagcgtaggaagcataggaaaggttggccctgcttttaggaatttggtcatcttagttgatgctgatcaatggggtaaaggctcagtcgatgcatttattaccttaaaagccaaagaaataactctcctccaaagtgatgaagcctttttacattttacatttcagaatcctgtcaaataataataatagtaatgcatagtactaatactatgaaataaagctcaagctatagctagtatatgaaataaagctcaagctagttactggagagtgtgtttgttggaggttttgaattttcaactctgtattataatatataaacgcttacataataaaacatcaaattagcttgggtgtgtatttatgagagtgcagtagtataactatagctatagtaccatgaacatgatataatattgttaagccacgtcccacgaattatattatttttttatatatataaaatggaattatacaacaaattttttggttctgttgaagttttattttattattaataaaacttacaaaagagtaacgtttcccgttagctttctttagtaaaataaaatataatagtactaatggtaaattatatagtaaaataataaaataaacaattaaaataaaaattgcaattaactttttccgtgagcttgacaaattacaattgagtgttggtggtaaggaataaccacaactctatttatatccaccttcaggtggtctattccaatcagatctagctcgatacttaaatctatactctctatttccatccccaactaaatcagttcaacggagaatgctgaagtgtacaatgggaatctttttaggagaatcaaatcaactcatatttacaacactattttcgactgtaagcttttgcccggcatcagagaggaattacagactgtacaatcccgatggtattgcgatgtataatatctggtcacaggggtatctaccgggctgactttggatacttcttcttcttcttcgttactgttcatgtaagaaatgtggtctttttcaatttgtctatttttttgtttatttagaataattttcgatatttcatttaacactttataccgatatatttggggctgccagattgagcaacaactatggtgtactcaaggtaaatttacagtatatgcaaattcttttttctttccaagaagagagttttgtttttctttcctccaatttttttttttctctattgaaattgaaccagctgttaaagaaaataaaaaatgcatttttatcatcacaactttttttttgaaatgtttatcatcacaacttattctccaatgtacttccttttttggtgcacttcttttttgctatgattatctcaactcttttttagtgcttcctttgatatttcttggctgttaactcttactattttttttagttgattatgattttgatttgatattatttggttgttcttgtatcattgtacgttatttatttattcacatgaactaaattttcaactaacgtttttctttttttttttttactaattcttcttcttctgctttcttctttatgttcttaattaaattgtgtcaattgtttacgatgaacaagagtagttaaattttcttttaggatgttagtagatattgtttgacatctttttatgattttaatatgatttaatttttttctctaaatttctagttgcatctttttcatttgttcttaatttattttaattgtctgatcacaaattacatgttttataattttgatacagccgtgagtatcaattaactataatgaaatagagacaaattttgacatataagacgagagtacctatgtgatttggatagcatttaaggtttcttatctaatgccttttatatatttaaatttatcacgagagtaaaaatttacatatagatttaaatttatatatatcctagtccaaataaaaattactttagtaatcctactattgcatacaattttgaatttaagaattaagttaattaagccatattagatagatacaaatgaaattgataaacttcaactctaatcataattaatttcaccataattaattattttcttcatttgttttattatttaatttatgcttagattattcaatttaaaatcctttcatttgattgctaaacaaaaataagaactggttttttattagattggattggatccatccaatgaatcccatggatgaattcaatccagtttaattaaccactatttaagctaatttcattaaaaa

SEQ ID NO: 221711 - DNA, 2758 bp, Cannabis indica
agattttacactaaattggtgtatctatatatagatggttctttatatggtcacatatgtagataattctttatagtagaagtgtgcataaattaattcaataacaatcaaccaatctaattacaatcgagctttaaatattttatatctaattgtaattagattgaattagatattatttttgaatatctaaatcggattggatcgaatattgtatggagtgttcaaaagttcaacacatctaatatccaattgaagtcattaatattttcatttagtttgaatgagtaaataaatttttttattattatacgtagtaaagtatatgtatatttgaaacttaacattaatttttttttattattggatagatttaattcaattcaatatcttggatctaaaatattagatggatacaatcagatctaatgaaaattaagtctaaaatattgaataaacttaaattaaactcatagatatatattaaagggtaaatagcggcataagtacttaaagttttaagtatgtaagtggcataatcccaatgtttatttttagcggcataagtacccaatgtttgtaaaactgtaatttttctctaatttcgtccgtacaaaccctgtaattttcttatacaggccacatataaggtttagattcttgattattggatctagacagaaacatgtagtattagttacttccaaatgttcatttaataaatttaaaacagtactgacaaaattgaaaaaaaaaattacagttttacaaatattgagtacttatgccgctacaaataaacatgggatttatgccgcttataaacttaaaactttgggtacttatgctgctatttactttatattaaatacatcttacgaataaatctgatccaattcaatatttattggatgctagattgaccggatgagattgaattgtaaaatttatattaattgtggttagatgaaggcccttatttatatggtgtcaacttgtccaccgacttggtgaagtctttattattgaaagagtactataagttgaatagagtgctagtagctttgtctgagtacagtaaaagtaatatgatggagagttccatagtgttatatccttcttcaggcataggccacctagtttccatggtcgagctatccaagctcatactcacacaccacccaacattctcaatcaatatcgtaatcataggattaccggccaatccaacggctgctgctgctactccagtaaacacatccaaagatatctcatccaacagcgcaaaatacattgctactatctcagctaccatcccctccatcaagtttcattacttaccacaaatcactctaccacccaatacaactttgggtcctgttgaacttggattcttcatcccaaatctcaacaaccccaacctccatcaattccttcaaaatctttctcaaacctcaaaactcaaagctttcattctcgatttcttctgcgatgctgcttttgaagtctctactggtctcaacattcctacttactattacttcaccaactcagcaggtggtctttcattattgttgtactacaccattctcagagaaagcttagagagcagaacaaatctggacgacgaagatgcctttaagcccactataaatgtgtcatggttaccaacgattcctaattcggaacttcctgaggctaatcaggatttcaggagtgatcgctgcaagaaatttttggatttgtctttacacatgacgaaagctagtgggcttttggtaaactcatttgatatgttcgagaataaaactataacagctcttagggatgggcttcccttaccgggaaaatcgatcccaccggtttttcctgttggaccggtgatcaaaactaatatgggatcgaaattggaagatgaaagtggttgcttgagttggctaaatgggcagccaagtaaaagcgttgtgttcttgtgttttggaagtttggggcgtttctcggcgacccagttgaccgacatggctgtgggtttagaaaatagtggccatcgattcttgtgggtggtgagagacccacctgacaacaatggcgatgagaagaataaggagagagagttggaagaaatattgcctaaagggtttctggaaaggacaaaagaaagaggattggtggttaagcgttgggctccacagatggctattctgagtcatgactcggttggtgggttcgtgactcactgtggatggagctcagtgatggaagctattagcaatggagtgccgttgttggggtggcctttgtatgcagaacagaggatgaacaggattttcttggtggaagggttgaaagtggcactgagttttagagaatcgaaagatgggtttgtgagtgcaactgagttggagaaccgagtgaaagagttgatggactcggactcggtgaaagggaaggaggttagagaatgggtttggcaattgaaagaaggagctgttgcagctaagaaggttggaggctcttctcatgttgcattgagcaaggttattgagctttggaataataattaactaaattgatgagaatctcaactcttttctataacctcatttttatgtgttctgttttatggccatggatctgaaggaacaccatcgaagttgtttagtttaattctatcaatatctactatcagtttgtatcaattcagtcttatgtttattcctagttaatagatctgcagttgtttaatttctatcaaaat

SEQ ID NO: 221712 - DNA, 1843 bp, Cannabis indica
agagaaaagttcaaattcaaatcactctcaaaatatataaaagaaactacactaatgtagataatttttagacttcagcgttgctaaacactatttagctcgacaaaacgtacaacattaattaattacggactcatttagtacattgcattgcctttgtattatattgtattgtgttagattgtattgtattgtattagtattatttaataaaatattgtgtttagtattgacttgttttaatagattgttttaatacactcgaccccaacaccgactacgggtcgggtcccgggtccgggtctaggaccaggtccgagttcgggttcgggttttagtttgggtctgagtccgggtttggatcttggtcccgggtctgagttcgagttttgggttcaggtctgggtccaggtccgggtttgggtcccaagtcccgagtctcgggtctgggttcgggtctcgggtcccatttggggggcggggggtcctggctctaggaccaggttcgagttcaggtttgggttcgagtttgggtccgagttcgggtttggatcatggtcccgagtctaggttcgagttttgggttcagttttgggtccaggtccaggtctgggtcccaagtcccgagtcttgagtctagagtcccaggtctgcgttcgggtcagggtcccgagtctggatctgagtcctgggtccaggtccaggtccgggttcaggtcctgggtcttgggtctgggtctgggtcctggatccaagtccgagtccaagtttcgggtctaggatctgggcttaggtgcatgttccaggtccgggttcgggtcggagattggggttgaccttgaatattttctaaatattataatacaagttaatacagaccatttgatatgtattaaataatacaacttacattgtaataaaaaaatttgatcgtaataaataatacaatacattgcttcatctaaacatagtattattagtttgtttttttttaacatgaaatatcaacttcattgaaataaagcattcaaattacaaattggcattataatctgccagacataccaaacatagtattattagttatttaatacaatacgacccttatatgacataccaaacgagcccttagtctatgaaaatatacatgggcagcccaattccgcttagtccattctttagaaaactcatttttaaatataaagattcgtcttggaaagtataaaattatgggttttaccatgtcgtacccatatttacaagtaaggtcaagctcaatctgtgatcccaattagttgtgttgtgcttgaattcgtattgtgttctaatgtgcctaaacatgagtctgaatacggccaaaatacgagtaatttttatacaagtatatattattttcatttaatttttaagcttaaataagaaataaataagttagtattttttaagcataaatatattagtattaataatttttttaataatattaaataacatacaattatatatatatatatattttaaataaatttatgcatatatgttttaactatataaataaataattaaagtacaaaaaatatatttttagatttaagtcatgttttttatgtttgtgctttcatgtcatgcattcttacttgttgtgtcgtgtcgcgcttaaattcatatcttttatatcgtgtccaaatcctataattttccgtgtcatgctgaacttgagcacatacttttttgtatcgtgcttgtgcctcctggccatcttgtgtcaatttttatgttgtgctgaaaagtccaatccaaatgtataactttaaccatatatataataggttttttttttttt

SEQ ID NO: 221713 - DNA, 2750 bp, Cannabis indica
tgagaataatttagctcacttaatgtagcactattttattattttttagctgaaaatttaaaaataaattattttaataactacactaatgtgagtgctagcttaatagaaataataaaatgaactcatatatgcaagtggcaattgaaaaaacaaaaaagaaaaagaaagaaaagtgtgtgagaatagttaatcttgtttggacagaataaatgtcaagctcaaagaaaaaataatccggatatggaaccctataaaatctctcaatatcgtggatattatactttcatcctttcaaaagaaaaattatttattaaaaaaaagagccaataacatttaaaaagagtagaaaccaatattaataataatgataaagagaaatggaaaagcagatataagcgtggtcggttatatggcagagatcgaagagaatgggttacataataagggggaacgtgatatggccaagccttcccggacctattggcccagcgcttcaggatcttaggacaaccttcatgagtaacgctcacttatctaaccgttgaaatagtctaataatattcctataatatatattattcgaatctatggctccaacttccctacaataaataaataaatgaataagactcaacttttcatattagtgatattcaacatatgtacatatatagatttagagctgaaaacatatttatatctatgattgttaattctatttataatttctcaatttgacacagtccactaaaaacactcataaaagataattatcgaacattttcacgtagaaaaaggatggcactagtgatggtttgtgtttgtgtatcgctttttatatcgtgctcacgttttaagtttattgaaaaactgctgacatgaatgtacatgactcatgacacaaaattaaaaattataaaattcaaacacaatccgaataaattttgttcgtctgaaccttttagtaaaataagaagtgtaacagagagaggaaagagagaaactgtacaatcatgcttttacaatgagtatatatatactcggttcaatacaattcttgtacaagaattagttataatagaactaactaacttcctatacagctcactaaacaactaacacacacctaacactatagctggcctattttgatacttcctggagtgtagatattcatcaaacccatcttgtctttgagatagccaaactgaccaggcattaaagcctttgtgaagatgtctacaagttgttctttgcttgagatgtgagctgtcttgattatcctttcttgaactttttctcttatcaaatggcaatcaatttctagctatatgtttgtccactcatgaaaaataggattagcagcaatatgttgtgttgccatattatcgcaatgcatgataacaggtcatttgtgcttgatttttagttcttcgagcattaacaatagccaaataatttctgaagttgtattagccattaccttatattttcagcctctactaaggatctagacactgtgtgttgtttttttttacttttccatgaaattaatgtgtttccaaggaaaatataaaaatcagtagttgatcttcttgttttcggacaagctgcccaatttaagtcagtgtaagcttctaatttgaccttaaattgagcatagaagaaaattccttgccatggtgtacctttaacatattgcagcagtctttgagcaacaaccatatgtgatactcttggtgtgcttaagaattggctcagtctgttaactgggaatgacaaatctagtctagtcaaagtaagatattggagctttccaataatttttctatatagtgcagcatcagccaacccatcttctttagcttcctaacacaatttaattaagtttgcttccataggagtgttcaaaggtttgcttttcaaatatccaaagtcttcaagaatttgtaatgcatatggtctttgagaaatggaaacaccttgttcagatcatgcaacttccaaacctaagaaatattttagctttcctagatccttaagtttaaatctttggtcaagctttattttgagcagctccaattcttccaagttgttgctagcaagtatcacatcatcaacatagacaagaaaagctatgaaatcatgcttgaaatgtttaatgaagaaggagtaatttgtagcggaatgtgagaatccttcttcctcaaggcattgaaaacttctcaaactattgtcttgaggcttgttttagcccatataacgattcttgtagcttgctagagaagttgcatagcacgtttaacttcgaaaattcgcgaagcatttttttgactgaacctctcctacaattcaaccaaaattgatgaagcatttcttagatacattatgctatcttcgatctcagtcgagacagcacgcaagatccaagaaatgatcaaactattgcatctgcaccagggatcataatcttcatcatgttgtggtagtcttctatccataaacttgactttgtttcgcgcaactagagcaacaagcattgatctcttccacgagctgtaattctcagatccagtgagaattttagctacaagcattgaacttggatgatctccatgagagagataataggatttcatggatcatcgaacctcaaattcgaatcagtagcaaatgaacgatttgcatttttagagttgtcatctaaatatgtattgcttcgagtctgtgttgctcctctttttgcc

SEQ ID NO: 221714 - DNA, 1795 bp, Cannabis indica
attttacaaaccaactttttgagtttttttgctgctaaaccctctcaattagtttttatttgcatttaaccctccatgcttaaattttgacggtaaaatcttccaaactactaagatgtaatcataacaccctgaacaaggaaaggttccaatcgattttgttgagcataacaccattagttaagatgtgatcttactgcatgaactacatcagctgctgttttgttctttccttccataacacatcatttcctactgtccaaatttgccaagcaatcattaaaacttctacaataacagtggcagtacctccttgagtaacatcaatgaaccaatctttaaaatctccatatgttgcagaaacaatgctaacaacaaacctatgccaacatgagcgagcgaagggataaagtactaagacatgaatgatcgactcatcaagtgtatggcgtacaaggcataacagattgacatatatgtgctttgtttgaagttgagtctttgtaggtaagcaccttgtgatagctctccaaccgaagtgaagtccctttggaggcacttcaactttccagaacttcttccaaaaatcaccatggagcaaatcatctccatcattctactgcagaactctataagcacttttaacagagtagtatcctgaagcctctgtattctaagtccaacagtcattaacatttgagctgctaagtggtatccccaatccccaatatgagagcacgatccttggtgttgaataaatctgagacaatttcaacatcccaactatgattattcacatgcattaggctagccactttatgaccaattgaaaaacatacaaagggctgataaatctagcagccaaggatctattgtaatcattacatgtaggtcattaccaatatgaattctagctcctgcaataatgagatcttttgtttctaggatgctttttcaaatgaagagtatattattaccaagagtagctgtgaggaaagaaccatttgagaagtatttagctctatagactttgcaaactagggacgattcatcagttaacaacctccaagcttactttcctagtaaagcaacttaaaacgaaacattttttcatatttaaaataaatttcacttatgaagtttacttcaacagatagattatcattattcctccaacacatgtcctcaaaagaattttacaatctgttgtcgtttaagtgtacaaacaaaacatgtctcttgataatgttgtcgttttcaaaggctgttgaaataaacgacaaccaaatcaaagttgctgccatgcaaaggccaaagttacaaaattttgaagaacataaacaatccctctaaattcaacttcttatgttacaaagctaaagaaaaagtaatgaactaaataacaaataatttaaggtctaagcagacaacatagtttttgaagataaggagacagacatatcacaattgcacagaaccgtagaacgccacttcagctggaccggtcatgtaaatgtgattgtcttcttccctccattcgatctgtaatggccctccaggcaagtcaaccgtgcaattctatgccccgacaccaaaaacataacaagattattaagacaaacaaaggcagtttaaactacatcaaatatatggtttggttccacttgttatggatagtttcagattcatttcttgatatgttcgtacttgaatgttatgaaaataggaagaagtttatgagttgtttagcttcgtaaaagtaatagggggcgtttagccaagttttttagaaacg
